(19) United States
(12) Patent Application Publication
(10) Pub. No.: US 2007/0015696 A1
(43) Pub. Date: Jan. 18, 2007

(54) 621 human secreted proteins

(76) Inventors: Craig A. Rosen, Laytonsville, MD (US); Steven M. Ruben, Brookeville, MD (US)

Correspondence Address: HUMAN GENOME SCIENCES INC;INTELLECTUAL PROPERTY DEPT., 14200 SHADY GROVE ROAD, ROCKVILLE, MD, 20850, US

(21) Appl. No.: 10/664,356

(22) Filed: Sep. 20, 2003

Related U.S. Application Data
(63) Continuation-in-part of application No. PCT/US02/08123, filed on Mar. 19, 2002.
Application No. PCT/US02/08123 is a continuation-in-part of application No. 10/100,683, filed on Mar. 19, 2002.
Application No. PCT/US02/08123 is a continuation-in-part of application No. 09/981,876, filed on Oct. 19, 2001.
Application No. 09/981,876 is a division of application No. 09/621,011, filed on Jul. 20, 2000.
Application No. 09/621,011 is a continuation of application No. 09/148,545, filed on Sep. 4, 1998, now Pat. No. 6,590,075.
Application No. 09/148,545 is a continuation-in-part of application No. PCT/US98/04482, filed on Mar. 6, 1998.
Application No. 10/100,683 is a continuation-in-part of application No. 09/621,011, filed on Jul. 20, 2000.
Application No. 09/621,011 is a continuation of application No. 09/148,545, filed on Sep. 4, 1998, now Pat. No. 6,590,075.
Application No. 09/148,545 is a continuation-in-part of application No. PCT/US98/04482, filed on Mar. 6, 1998.
Application No. 10/100,683 is a continuation-in-part of application No. 09/148,545, filed on Sep. 4, 1998, now Pat. No. 6,590,075.
Application No. 09/148,545 is a continuation-in-part of application No. PCT/US98/04482, filed on Mar. 6, 1998.
Application No. 10/100,683 is a continuation-in-part of application No. PCT/US98/04482, filed on Mar. 6, 1998.
Application No. 10/100,683 is a continuation-in-part of application No. 09/882,171, filed on Jun. 18, 2001.
Application No. 09/882,171 is a continuation of application No. 09/809,391, filed on Mar. 16, 2001, now abandoned.
Application No. 09/809,391 is a continuation-in-part of application No. 09/149,476, filed on Sep. 8, 1998, now Pat. No. 6,420,526.
Application No. 09/149,476 is a continuation-in-part of application No. PCT/US98/04493, filed on Mar. 6, 1998.
Application No. 10/100,683 is a continuation-in-part of application No. 09/809,391, filed on Mar. 16, 2001, now abandoned.
Application No. 10/100,683 is a continuation-in-part of application No. 09/149,476, filed on Sep. 8, 1998, now Pat. No. 6,420,526.
Application No. 09/149,476 is a continuation-in-part of application No. PCT/US98/04493, filed on Mar. 6, 1998.
Application No. 10/100,683 is a continuation-in-part of application No. 09/149,476, filed on Sep. 8, 1998, now Pat. No. 6,420,526.
Application No. 09/149,476 is a continuation-in-part of application No. PCT/US98/04493, filed on Mar. 6, 1998.
Application No. 10/100,683 is a continuation-in-part of application No. PCT/US98/04493, filed on Mar. 6, 1998.
Application No. 10/100,683 is a continuation-in-part of application No. 10/058,993, filed on Jan. 30, 2002.
Application No. 10/100,683 is a continuation-in-part of application No. 09/852,659, filed on May 11, 2001.
Application No. 09/852,659 is a continuation-in-part of application No. 09/152,060, filed on Sep. 11, 1998, now Pat. No. 6,448,230.
Application No. 09/152,060 is a continuation-in-part of application No. PCT/US98/04858, filed on Mar. 12, 1998.
Application No. 10/058,993 is a continuation-in-part of application No. 09/853,161, filed on May 11, 2001.
Application No. 09/853,161 is a continuation-in-part of application No. 09/152,060, filed on Sep. 11, 1998, now Pat. No. 6,448,230.
Application No. 09/152,060 is a continuation-in-part of application No. PCT/US98/04858, filed on Mar. 12, 1998.
Application No. 10/058,993 is a continuation-in-part of application No. 09/852,797, filed on May 11, 2001.
Application No. 09/852,797 is a continuation-in-part of application No. 09/152,060, filed on Sep. 11, 1998, now Pat. No. 6,448,230.
Application No. 09/152,060 is a continuation-in-part of application No. PCT/US98/04858, filed on Mar. 12, 1998.
Application No. 10/100,683 is a continuation-in-part of application No. 09/852,659, filed on May 11, 2001.
Application No. 10/100,683 is a continuation-in-part of application No. 09/152,060, filed on Sep. 11, 1998, now Pat. No. 6,448,230.
Application No. 09/152,060 is a continuation-in-part of application No. PCT/US98/04858, filed on Mar. 12, 1998.
Application No. 10/100,683 is a continuation-in-part of application No. 09/853,161, filed on May 11, 2001.
Application No. 10/100,683 is a continuation-in-part of application No. 09/152,060, filed on Sep. 11, 1998, now Pat. No. 6,448,230.
Application No. 09/152,060 is a continuation-in-part of application No. PCT/US98/04858, filed on Mar. 12, 1998.
Application No. 10/100,683 is a continuation-in-part of application No. 09/852,797, filed on May 11, 2001.
Application No. 10/100,683 is a continuation-in-part of application No. 09/152,060, filed on Sep. 11, 1998, now Pat. No. 6,448,230.
Application No. 09/152,060 is a continuation-in-part of application No. PCT/US98/04858, filed on Mar. 12, 1998.
Application No. 10/100,683 is a continuation-in-part of application No. 09/152,060, filed on Sep. 11, 1998, now Pat. No. 6,448,230.
Application No. 09/152,060 is a continuation-in-part of application No. PCT/US98/04858, filed on Mar. 12, 1998.
Application No. 10/100,683 is a continuation-in-part of application No. PCT/US98/04858, filed on Mar. 12, 1998.
Application No. 10/100,683 is a continuation-in-part of application No. 10/059,395, filed on Jan. 31, 2002.
Application No. 10/059,395 is a division of application No. 09/966,262, filed on Oct. 1, 2001, now abandoned.
Application No. 09/966,262 is a continuation of application No. 09/154,707, filed on Sep. 17, 1998, now abandoned.
Application No. 09/154,707 is a continuation-in-part of application No. PCT/US98/05311, filed on Mar. 19, 1998, now abandoned.
Application No. 10/100,683 is a continuation-in-part of application No. 09/984,245, filed on Oct. 29, 2001.
Application No. 09/984,245 is a division of application No. 09/154,707, filed on Sep. 17, 1998, now abandoned.
Application No. 09/154,707 is a continuation-in-part of application No. PCT/US98/05311, filed on Mar. 19, 1998, now abandoned.
Application No. 10/100,683 is a continuation-in-part of application No. 09/983,966, filed on Oct. 26, 2001.
Application No. 09/983,966 is a division of application No. 09/154,707, filed on Sep. 17, 1998, now abandoned.
Application No. 09/154,707 is a continuation-in-part of application No. PCT/US98/05311, filed on Mar. 19, 1998, now abandoned.
Application No. 10/100,683 is a continuation-in-part of application No. 09/966,262, filed on Oct. 1, 2001, now abandoned.
Application No. 09/966,262 is a continuation of application No. 09/154,707, filed on Sep. 17, 1998, now abandoned.
Application No. 09/154,707 is a continuation-in-part of application No. PCT/US98/05311, filed on Mar. 19, 1998, now abandoned.
Application No. 10/100,683 is a continuation-in-part of application No. 09/154,707, filed on Sep. 17, 1998, now abandoned.
Application No. 09/154,707 is a continuation-in-part of application No. PCT/US98/05311, filed on Mar. 19, 1998, now abandoned.
Application No. 10/100,683 is a continuation-in-part of application No. PCT/US98/05311, filed on Mar. 19, 1998, now abandoned.
Application No. 10/100,683 is a continuation-in-part of application No. 09/814,122, filed on Mar. 22, 2001, now abandoned.
Application No. 09/814,122 is a continuation of application No. 09/577,145, filed on May 24, 2000, now abandoned.
Application No. 09/577,145 is a continuation of application No. 09/166,780, filed on Oct. 6, 1998, now abandoned.
Application No. 09/166,780 is a continuation-in-part of application No. PCT/US98/06801, filed on Apr. 7, 1998.
Application No. 10/100,683 is a continuation-in-part of application No. PCT/US98/06801, filed on Apr. 7, 1998.
Application No. 10/100,683 is a continuation-in-part of application No. PCT/US98/06801, filed on Apr. 7, 1998.
Application No. 10/100,683 is a continuation-in-part of application No. PCT/US98/10868, filed on May 28, 1998.
Application No. 10/100,683 is a continuation-in-part of application No. PCT/US98/11422, filed on Jun. 4, 1998.
(60) Provisional application No. 60/277,340, filed on Mar. 21, 2001.
(60) Provisional application No. 60/306,171, filed on Jul. 19, 2001.
(60) Provisional application No. 60/331,287, filed on Nov. 13, 2001.
(60) Provisional application No. 60/040,162, filed on Mar. 7, 1997.
(60) Provisional application No. 60/040,333, filed on Mar. 7, 1997.
(60) Provisional application No. 60/038,621, filed on Mar. 7, 1997.
(60) Provisional application No. 60/040,161, filed on Mar. 7, 1997.
(60) Provisional application No. 60/040,626, filed on Mar. 7, 1997.
(60) Provisional application No. 60/040,334, filed on Mar. 7, 1997.
(60) Provisional application No. 60/040,336, filed on Mar. 7, 1997.
(60) Provisional application No. 60/040,163, filed on Mar. 7, 1997.
(60) Provisional application No. 60/047,600, filed on May 23, 1997.
(60) Provisional application No. 60/047,615, filed on May 23, 1997.
(60) Provisional application No. 60/047,597, filed on May 23, 1997.
(60) Provisional application No. 60/047,502, filed on May 23, 1997.
(60) Provisional application No. 60/047,633, filed on May 23, 1997.
(60) Provisional application No. 60/047,583, filed on May 23, 1997.
(60) Provisional application No. 60/047,617, filed on May 23, 1997.
(60) Provisional application No. 60/047,618, filed on May 23, 1997.
(60) Provisional application No. 60/047,503, filed on May 23, 1997.
(60) Provisional application No. 60/047,592, filed on May 23, 1997.
(60) Provisional application No. 60/047,581, filed on May 23, 1997.
(60) Provisional application No. 60/047,584, filed on May 23, 1997.
(60) Provisional application No. 60/047,500, filed on May 23, 1997.
(60) Provisional application No. 60/047,587, filed on May 23, 1997.
(60) Provisional application No. 60/047,492, filed on May 23, 1997.
(60) Provisional application No. 60/047,598, filed on May 23, 1997.
(60) Provisional application No. 60/047,613, filed on May 23, 1997.
(60) Provisional application No. 60/047,582, filed on May 23, 1997.
(60) Provisional application No. 60/047,596, filed on May 23, 1997.
(60) Provisional application No. 60/047,612, filed on May 23, 1997.
(60) Provisional application No. 60/047,632, filed on May 23, 1997.
(60) Provisional application No. 60/047,601, filed on May 23, 1997.
(60) Provisional application No. 60/043,580, filed on Apr. 11, 1997.
(60) Provisional application No. 60/043,568, filed on Apr. 11, 1997.
(60) Provisional application No. 60/043,314, filed on Apr. 11, 1997.
(60) Provisional application No. 60/043,569, filed on Apr. 11, 1997.
(60) Provisional application No. 60/043,311, filed on Apr. 11, 1997.
(60) Provisional application No. 60/043,671, filed on Apr. 11, 1997.
(60) Provisional application No. 60/043,674, filed on Apr. 11, 1997.
(60) Provisional application No. 60/043,669, filed on Apr. 11, 1997.
(60) Provisional application No. 60/043,312, filed on Apr. 11, 1997.
(60) Provisional application No. 60/043,313, filed on Apr. 11, 1997.
(60) Provisional application No. 60/043,672, filed on Apr. 11, 1997.
(60) Provisional application No. 60/043,315, filed on Apr. 11, 1997.
(60) Provisional application No. 60/048,974, filed on Jun. 6, 1997.
(60) Provisional application No. 60/056,886, filed on Aug. 22, 1997.
(60) Provisional application No. 60/056,877, filed on Aug. 22, 1997.
(60) Provisional application No. 60/056,889, filed on Aug. 22, 1997.
(60) Provisional application No. 60/056,893, filed on Aug. 22, 1997.
(60) Provisional application No. 60/056,630, filed on Aug. 22, 1997.
(60) Provisional application No. 60/056,878, filed on Aug. 22, 1997.
(60) Provisional application No. 60/056,662, filed on Aug. 22, 1997.
(60) Provisional application No. 60/056,872, filed on Aug. 22, 1997.
(60) Provisional application No. 60/056,882, filed on Aug. 22, 1997.
(60) Provisional application No. 60/056,637, filed on Aug. 22, 1997.
(60) Provisional application No. 60/056,903, filed on Aug. 22, 1997.
(60) Provisional application No. 60/056,888, filed on Aug. 22, 1997.
(60) Provisional application No. 60/056,879, filed on Aug. 22, 1997.
(60) Provisional application No. 60/056,880, filed on Aug. 22, 1997.
(60) Provisional application No. 60/056,894, filed on Aug. 22, 1997.
(60) Provisional application No. 60/056,911, filed on Aug. 22, 1997.
(60) Provisional application No. 60/056,636, filed on Aug. 22, 1997.
(60) Provisional application No. 60/056,874, filed on Aug. 22, 1997.
(60) Provisional application No. 60/056,910, filed on Aug. 22, 1997.
(60) Provisional application No. 60/056,864, filed on Aug. 22, 1997.
(60) Provisional application No. 60/056,631, filed on Aug. 22, 1997.
(60) Provisional application No. 60/056,845, filed on Aug. 22, 1997.
(60) Provisional application No. 60/056,892, filed on Aug. 22, 1997.
(60) Provisional application No. 60/047,595, filed on May 23, 1997.
(60) Provisional application No. 60/057,761, filed on Sep. 5, 1997.
(60) Provisional application No. 60/047,599, filed on May 23, 1997.
(60) Provisional application No. 60/047,588, filed on May 23, 1997.
(60) Provisional application No. 60/047,585, filed on May 23, 1997.
(60) Provisional application No. 60/047,586, filed on May 23, 1997.
(60) Provisional application No. 60/047,590, filed on May 23, 1997.
(60) Provisional application No. 60/047,594, filed on May 23, 1997.
(60) Provisional application No. 60/047,589, filed on May 23, 1997.
(60) Provisional application No. 60/047,593, filed on May 23, 1997.
(60) Provisional application No. 60/047,614, filed on May 23, 1997.
(60) Provisional application No. 60/043,578, filed on Apr. 11, 1997.
(60) Provisional application No. 60/043,576, filed on Apr. 11, 1997.
(60) Provisional application No. 60/047,501, filed on May 23, 1997.
(60) Provisional application No. 60/043,670, filed on Apr. 11, 1997.
(60) Provisional application No. 60/056,632, filed on Aug. 22, 1997.
(60) Provisional application No. 60/056,664, filed on Aug. 22, 1997.
(60) Provisional application No. 60/056,876, filed on Aug. 22, 1997.
(60) Provisional application No. 60/056,881, filed on Aug. 22, 1997.
(60) Provisional application No. 60/056,909, filed on Aug. 22, 1997.
(60) Provisional application No. 60/056,875, filed on Aug. 22, 1997.
(60) Provisional application No. 60/056,862, filed on Aug. 22, 1997.
(60) Provisional application No. 60/056,887, filed on Aug. 22, 1997.
(60) Provisional application No. 60/056,908, filed on Aug. 22, 1997.
(60) Provisional application No. 60/048,964, filed on Jun. 6, 1997.
(60) Provisional application No. 60/057,650, filed on Sep. 5, 1997.
(60) Provisional application No. 60/056,884, filed on Aug. 22, 1997.
(60) Provisional application No. 60/190,068, filed on Mar. 17, 2000.
(60) Provisional application No. 60/040,161, filed on Mar. 7, 1997.
(60) Provisional application No. 60/040,162, filed on Mar. 7, 1997.
(60) Provisional application No. 60/040,333, filed on Mar. 7, 1997.
(60) Provisional application No. 60/038,621, filed on Mar. 7, 1997.
(60) Provisional application No. 60/040,626, filed on Mar. 7, 1997.
(60) Provisional application No. 60/040,334, filed on Mar. 7, 1997.
(60) Provisional application No. 60/040,336, filed on Mar. 7, 1997.
(60) Provisional application No. 60/040,163, filed on Mar. 7, 1997.
(60) Provisional application No. 60/047,600, filed on May 23, 1997.
(60) Provisional application No. 60/047,615, filed on May 23, 1997.
(60) Provisional application No. 60/047,597, filed on May 23, 1997.
(60) Provisional application No. 60/047,502, filed on May 23, 1997.
(60) Provisional application No. 60/047,633, filed on May 23, 1997.
(60) Provisional application No. 60/047,583, filed on May 23, 1997.
(60) Provisional application No. 60/047,617, filed on May 23, 1997.
(60) Provisional application No. 60/047,618, filed on May 23, 1997.
(60) Provisional application No. 60/047,503, filed on May 23, 1997.
(60) Provisional application No. 60/047,592, filed on May 23, 1997.
(60) Provisional application No. 60/047,581, filed on May 23, 1997.
(60) Provisional application No. 60/047,584, filed on May 23, 1997.
(60) Provisional application No. 60/047,500, filed on May 23, 1997.
(60) Provisional application No. 60/047,587, filed on May 23, 1997.
(60) Provisional application No. 60/047,492, filed on May 23, 1997.
(60) Provisional application No. 60/047,598, filed on May 23, 1997.
(60) Provisional application No. 60/047,613, filed on May 23, 1997.
(60) Provisional application No. 60/047,582, filed on May 23, 1997.
(60) Provisional application No. 60/047,596, filed on May 23, 1997.
(60) Provisional application No. 60/047,612, filed on May 23, 1997.
(60) Provisional application No. 60/047,632, filed on May 23, 1997.
(60) Provisional application No. 60/047,601, filed on May 23, 1997.
(60) Provisional application No. 60/043,580, filed on Apr. 11, 1997.
(60) Provisional application No. 60/043,568, filed on Apr. 11, 1997.
(60) Provisional application No. 60/043,314, filed on Apr. 11, 1997.
(60) Provisional application No. 60/043,569, filed on Apr. 11, 1997.
(60) Provisional application No. 60/043,311, filed on Apr. 11, 1997.
(60) Provisional application No. 60/043,671, filed on Apr. 11, 1997.
(60) Provisional application No. 60/043,674, filed on Apr. 11, 1997.
(60) Provisional application No. 60/043,669, filed on Apr. 11, 1997.
(60) Provisional application No. 60/043,312, filed on Apr. 11, 1997.
(60) Provisional application No. 60/043,313, filed on Apr. 11, 1997.
(60) Provisional application No. 60/043,672, filed on Apr. 11, 1997.
(60) Provisional application No. 60/043,315, filed on Apr. 11, 1997.
(60) Provisional application No. 60/048,974, filed on Jun. 6, 1997.
(60) Provisional application No. 60/056,886, filed on Aug. 22, 1997.
(60) Provisional application No. 60/056,877, filed on Aug. 22, 1997.
(60) Provisional application No. 60/056,889, filed on Aug. 22, 1997.
(60) Provisional application No. 60/056,893, filed on Aug. 22, 1997.
(60) Provisional application No. 60/056,630, filed on Aug. 22, 1997.
(60) Provisional application No. 60/056,878, filed on Aug. 22, 1997.
(60) Provisional application No. 60/056,662, filed on Aug. 22, 1997.
(60) Provisional application No. 60/056,872, filed on Aug. 22, 1997.
(60) Provisional application No. 60/056,882, filed on Aug. 22, 1997.
(60) Provisional application No. 60/056,637, filed on Aug. 22, 1997.
(60) Provisional application No. 60/056,903, filed on Aug. 22, 1997.
(60) Provisional application No. 60/056,888, filed on Aug. 22, 1997.
(60) Provisional application No. 60/056,879, filed on Aug. 22, 1997.
(60) Provisional application No. 60/056,880, filed on Aug. 22, 1997.
(60) Provisional application No. 60/056,894, filed on Aug. 22, 1997.
(60) Provisional application No. 60/056,911, filed on Aug. 22, 1997.
(60) Provisional application No. 60/056,636, filed on Aug. 22, 1997.
(60) Provisional application No. 60/056,874, filed on Aug. 22, 1997.
(60) Provisional application No. 60/056,910, filed on Aug. 22, 1997.
(60) Provisional application No. 60/056,864, filed on Aug. 22, 1997.
(60) Provisional application No. 60/056,631, filed on Aug. 22, 1997.
(60) Provisional application No. 60/056,845, filed on Aug. 22, 1997.
(60) Provisional application No. 60/056,892, filed on Aug. 22, 1997.
(60) Provisional application No. 60/057,761, filed on Sep. 5, 1997.
(60) Provisional application No. 60/047,595, filed on May 23, 1997.
(60) Provisional application No. 60/047,599, filed on May 23, 1997.
(60) Provisional application No. 60/047,588, filed on May 23, 1997.
(60) Provisional application No. 60/047,585, filed on May 23, 1997.
(60) Provisional application No. 60/047,586, filed on May 23, 1997.
(60) Provisional application No. 60/047,590, filed on May 23, 1997.
(60) Provisional application No. 60/047,594, filed on May 23, 1997.
(60) Provisional application No. 60/047,589, filed on May 23, 1997.
(60) Provisional application No. 60/047,593, filed on May 23, 1997.
(60) Provisional application No. 60/047,614, filed on May 23, 1997.
(60) Provisional application No. 60/043,578, filed on Apr. 11, 1997.
(60) Provisional application No. 60/043,576, filed on Apr. 11, 1997.
(60) Provisional application No. 60/047,501, filed on May 23, 1997.
(60) Provisional application No. 60/043,670, filed on Apr. 11, 1997.
(60) Provisional application No. 60/056,632, filed on Aug. 22, 1997.
(60) Provisional application No. 60/056,664, filed on Aug. 22, 1997.
(60) Provisional application No. 60/056,876, filed on Aug. 22, 1997.
(60) Provisional application No. 60/056,881, filed on Aug. 22, 1997.
(60) Provisional application No. 60/056,909, filed on Aug. 22, 1997.
(60) Provisional application No. 60/056,875, filed on Aug. 22, 1997.
(60) Provisional application No. 60/056,862, filed on Aug. 22, 1997.
(60) Provisional application No. 60/056,887, filed on Aug. 22, 1997.
(60) Provisional application No. 60/056,908, filed on Aug. 22, 1997.
(60) Provisional application No. 60/048,964, filed on Jun. 6, 1997.
(60) Provisional application No. 60/057,650, filed on Sep. 5, 1997.
(60) Provisional application No. 60/056,884, filed on Aug. 22, 1997.
(60) Provisional application No. 60/057,669, filed on Sep. 5, 1997.
(60) Provisional application No. 60/049,610, filed on Jun. 13, 1997.
(60) Provisional application No. 60/061,060, filed on Oct. 2, 1997.
(60) Provisional application No. 60/051,926, filed on Jul. 8, 1997.
(60) Provisional application No. 60/052,874, filed on Jul. 16, 1997.
(60) Provisional application No. 60/058,785, filed on Sep. 12, 1997.
(60) Provisional application No. 60/055,724, filed on Aug. 18, 1997.
(60) Provisional application No. 60/265,583, filed on Feb. 2, 2001.
(60) Provisional application No. 60/265,583, filed on Feb. 2, 2001.
(60) Provisional application No. 60/265,583, filed on Feb. 2, 2001.
(60) Provisional application No. 60/265,583, filed on Feb. 2, 2001.
(60) Provisional application No. 60/040,762, filed on Mar. 14, 1997.
(60) Provisional application No. 60/040,710, filed on Mar. 14, 1997.
(60) Provisional application No. 60/050,934, filed on May 30, 1997.
(60) Provisional application No. 60/048,100, filed on May 30, 1997.
(60) Provisional application No. 60/048,357, filed on May 30, 1997.
(60) Provisional application No. 60/048,189, filed on May 30, 1997.
(60) Provisional application No. 60/057,765, filed on Sep. 5, 1997.
(60) Provisional application No. 60/048,970, filed on Jun. 6, 1997.
(60) Provisional application No. 60/068,368, filed on Dec. 19, 1997.
(60) Provisional application No. 60/041,277, filed on Mar. 21, 1997.
(60) Provisional application No. 60/042,344, filed on Mar. 21, 1997.
(60) Provisional application No. 60/041,276, filed on Mar. 21, 1997.
(60) Provisional application No. 60/041,281, filed on Mar. 21, 1997.
(60) Provisional application No. 60/048,094, filed on May 30, 1997.
(60) Provisional application No. 60/048,350, filed on May 30, 1997.
(60) Provisional application No. 60/048,188, filed on May 30, 1997.
(60) Provisional application No. 60/048,135, filed on May 30, 1997.
(60) Provisional application No. 60/050,937, filed on May 30, 1997.
(60) Provisional application No. 60/048,187, filed on May 30, 1997.
(60) Provisional application No. 60/048,099, filed on May 30, 1997.
(60) Provisional application No. 60/048,352, filed on May 30, 1997.
(60) Provisional application No. 60/048,186, filed on May 30, 1997.
(60) Provisional application No. 60/048,069, filed on May 30, 1997.
(60) Provisional application No. 60/048,095, filed on May 30, 1997.
(60) Provisional application No. 60/048,131, filed on May 30, 1997.
(60) Provisional application No. 60/048,096, filed on May 30, 1997.
(60) Provisional application No. 60/048,355, filed on May 30, 1997.
(60) Provisional application No. 60/048,160, filed on May 30, 1997.
(60) Provisional application No. 60/048,351, filed on May 30, 1997.
(60) Provisional application No. 60/048,154, filed on May 30, 1997.
(60) Provisional application No. 60/054,804, filed on Aug. 5, 1997.
(60) Provisional application No. 60/056,370, filed on Aug. 19, 1997.
(60) Provisional application No. 60/060,862, filed on Oct. 2, 1997.
(60) Provisional application No. 60/042,726, filed on Apr. 8, 1997.
(60) Provisional application No. 60/042,727, filed on Apr. 8, 1997.
(60) Provisional application No. 60/042,728, filed on Apr. 8, 1997.
(60) Provisional application No. 60/042,754, filed on Apr. 8, 1997.
(60) Provisional application No. 60/042,825, filed on Apr. 8, 1997.
(60) Provisional application No. 60/048,068, filed on May 30, 1997.
(60) Provisional application No. 60/048,070, filed on May 30, 1997.
(60) Provisional application No. 60/048,184, filed on May 30, 1997.
(60) Provisional application No. 60/042,726, filed on Apr. 8, 1997.
(60) Provisional application No. 60/042,727, filed on Apr. 8, 1997.
(60) Provisional application No. 60/042,728, filed on Apr. 8, 1997.
(60) Provisional application No. 60/042,754, filed on Apr. 8, 1997.
(60) Provisional application No. 60/042,825, filed on Apr. 8, 1997.
(60) Provisional application No. 60/048,068, filed on May 30, 1997.
(60) Provisional application No. 60/048,070, filed on May 30, 1997.
(60) Provisional application No. 60/048,184, filed on May 30, 1997.
(60) Provisional application No. 60/044,039, filed on May 30, 1997.
(60) Provisional application No. 60/048,093, filed on May 30, 1997.
(60) Provisional application No. 60/048,190, filed on May 30, 1997.
(60) Provisional application No. 60/050,935, filed on May 30, 1997.
(60) Provisional application No. 60/048,101, filed on May 30, 1997.
(60) Provisional application No. 60/048,356, filed on May 30, 1997.
(60) Provisional application No. 60/056,250, filed on Aug. 29, 1997.
(60) Provisional application No. 60/056,296, filed on Aug. 29, 1997.
(60) Provisional application No. 60/056,293, filed on Aug. 29, 1997.
(60) Provisional application No. 60/048,885, filed on Jun. 6, 1997.
(60) Provisional application No. 60/049,375, filed on Jun. 6, 1997.
(60) Provisional application No. 60/048,881, filed on Jun. 6, 1997.
(60) Provisional application No. 60/048,880, filed on Jun. 6, 1997.
(60) Provisional application No. 60/048,896, filed on Jun. 6, 1997.
(60) Provisional application No. 60/049,020, filed on Jun. 6, 1997.
(60) Provisional application No. 60/048,876, filed on Jun. 6, 1997.
(60) Provisional application No. 60/048,895, filed on Jun. 6, 1997.
(60) Provisional application No. 60/048,884, filed on Jun. 6, 1997.
(60) Provisional application No. 60/048,894, filed on Jun. 6, 1997.
(60) Provisional application No. 60/048,971, filed on Jun. 6, 1997.
(60) Provisional application No. 60/048,964, filed on Jun. 6, 1997.
(60) Provisional application No. 60/048,882, filed on Jun. 6, 1997.
(60) Provisional application No. 60/048,899, filed on Jun. 6, 1997.
(60) Provisional application No. 60/048,893, filed on Jun. 6, 1997.
(60) Provisional application No. 60/048,900, filed on Jun. 6, 1997.
(60) Provisional application No. 60/048,901, filed on Jun. 6, 1997.
(60) Provisional application No. 60/048,892, filed on Jun. 6, 1997.
(60) Provisional application No. 60/048,915, filed on Jun. 6, 1997.
(60) Provisional application No. 60/049,019, filed on Jun. 6, 1997.
(60) Provisional application No. 60/048,970, filed on Jun. 6, 1997.
(60) Provisional application No. 60/048,972, filed on Jun. 6, 1997.
(60) Provisional application No. 60/048,916, filed on Jun. 6, 1997.
(60) Provisional application No. 60/049,373, filed on Jun. 6, 1997.
(60) Provisional application No. 60/048,875, filed on Jun. 6, 1997.
(60) Provisional application No. 60/049,374, filed on Jun. 6, 1997.
(60) Provisional application No. 60/048,917, filed on Jun. 6, 1997.
(60) Provisional application No. 60/048,949, filed on Jun. 6, 1997.
(60) Provisional application No. 60/048,974, filed on Jun. 6, 1997.
(60) Provisional application No. 60/048,883, filed on Jun. 6, 1997.
(60) Provisional application No. 60/048,897, filed on Jun. 6, 1997.
(60) Provisional application No. 60/048,898, filed on Jun. 6, 1997.
(60) Provisional application No. 60/048,962, filed on Jun. 6, 1997.
(60) Provisional application No. 60/048,963, filed on Jun. 6, 1997.
(60) Provisional application No. 60/048,877, filed on Jun. 6, 1997.
(60) Provisional application No. 60/048,878, filed on Jun. 6, 1997.
(60) Provisional application No. 60/057,645, filed on Sep. 5, 1997.
(60) Provisional application No. 60/057,642, filed on Sep. 5, 1997.
(60) Provisional application No. 60/057,668, filed on Sep. 5, 1997.
(60) Provisional application No. 60/057,635, filed on Sep. 5, 1997.
(60) Provisional application No. 60/057,627, filed on Sep. 5, 1997.
(60) Provisional application No. 60/057,667, filed on Sep. 5, 1997.
(60) Provisional application No. 60/057,666, filed on Sep. 5, 1997.
(60) Provisional application No. 60/057,764, filed on Sep. 5, 1997.
(60) Provisional application No. 60/057,643, filed on Sep. 5, 1997.
(60) Provisional application No. 60/057,769, filed on Sep. 5, 1997.
(60) Provisional application No. 60/057,763, filed on Sep. 5, 1997.
(60) Provisional application No. 60/057,650, filed on Sep. 5, 1997.
(60) Provisional application No. 60/057,584, filed on Sep. 5, 1997.
(60) Provisional application No. 60/057,647, filed on Sep. 5, 1997.
(60) Provisional application No. 60/057,661, filed on Sep. 5, 1997.
(60) Provisional application No. 60/057,662, filed on Sep. 5, 1997.
(60) Provisional application No. 60/057,646, filed on Sep. 5, 1997.
(60) Provisional application No. 60/057,654, filed on Sep. 5, 1997.
(60) Provisional application No. 60/057,651, filed on Sep. 5, 1997.
(60) Provisional application No. 60/057,644, filed on Sep. 5, 1997.
(60) Provisional application No. 60/057,765, filed on Sep. 5, 1997.
(60) Provisional application No. 60/057,762, filed on Sep. 5, 1997.
(60) Provisional application No. 60/057,775, filed on Sep. 5, 1997.
(60) Provisional application No. 60/057,648, filed on Sep. 5, 1997.
(60) Provisional application No. 60/057,774, filed on Sep. 5, 1997.
(60) Provisional application No. 60/057,649, filed on Sep. 5, 1997.
(60) Provisional application No. 60/057,770, filed on Sep. 5, 1997.
(60) Provisional application No. 60/057,771, filed on Sep. 5, 1997.
(60) Provisional application No. 60/057,761, filed on Sep. 5, 1997.
(60) Provisional application No. 60/057,760, filed on Sep. 5, 1997.
(60) Provisional application No. 60/057,776, filed on Sep. 5, 1997.
(60) Provisional application No. 60/057,778, filed on Sep. 5, 1997.
(60) Provisional application No. 60/057,629, filed on Sep. 5, 1997.
(60) Provisional application No. 60/057,628, filed on Sep. 5, 1997.
(60) Provisional application No. 60/057,777, filed on Sep. 5, 1997.
(60) Provisional application No. 60/057,634, filed on Sep. 5, 1997.
(60) Provisional application No. 60/070,923, filed on Dec. 18, 1997.

(51) Int. Cl. C12Q 1/68; C07H 21/04; C07K 14/705; A61K 38/17

(52) U.S. Cl. 514/12; 435/6; 435/69.1; 435/320.1; 435/325; 530/350; 536/23.2

(57) ABSTRACT

The present invention relates to human secreted polypeptides, and isolated nucleic acid molecules encoding said polypeptides, useful for diagnosing and treating cancer and other hyperproliferative diseases and disorders. Antibodies that bind these polypeptides are also encompassed by the present invention. Also encompassed by the invention are vectors, host cells, and recombinant and synthetic methods for producing said polynucleotides, polypeptides, and/or antibodies. The invention further encompasses screening methods for identifying agonists and antagonists of polynucleotides and polypeptides of the invention. The present invention further encompasses methods and compositions for inhibiting or enhancing the production and function of the polypeptides of the present invention.

### RELATED APPLICATIONS

[0001] This application is a continuation-in-part of PCT/US02/08123, filed Mar. 19, 2002, which in turn claims benefit of the following:

| Application:: | Continuity Type:: | Parent Application:: | Parent Filing Date:: |
|---|---|---|---|
| PCT/US02/08123 | Continuation-in-part of | 10/100,683 | Mar. 19, 2002 |
| 10/100,683 | Non-provisional of | 60/277,340 | Mar. 21, 2001 |
| 10/100,683 | Non-provisional of | 60/306,171 | Jul. 19, 2001 |
| 10/100,683 | Non-provisional of | 60/331,287 | Nov. 13, 2001 |
| 10/100,683 | Continuation-in-part of | 09/981,876 | Oct. 19, 2001 |
| 09/981,876 | Divisional of | 09/621,011 | Jul. 20, 2000 |
| 09/621,011 | Continuation of | 09/148,545 | Sep. 04, 1998 |
| 09/148,545 | Continuation-in-part of | PCT/US98/04482 | Mar. 06, 1998 |
| 10/100,683 | Continuation-in-part of | 09/621,011 | Jul. 20, 2000 |
| 09/621,011 | Continuation of | 09/148,545 | Sep. 04, 1998 |
| 09/148,545 | Continuation-in-part of | PCT/US98/04482 | Mar. 06, 1998 |
| 10/100,683 | Continuation-in-part of | 09/148,545 | Sep. 04, 1998 |
| 09/148,545 | Continuation-in-part of | PCT/US98/04482 | Mar. 06, 1998 |
| 10/100,683 | Continuation-in-part of | PCT/US98/04482 | Mar. 06, 1998 |
| PCT/US98/04482 | Non-provisional of | 60/040,162 | Mar. 07, 1997 |
| PCT/US98/04482 | Non-provisional of | 60/040,333 | Mar. 07, 1997 |
| PCT/US98/04482 | Non-provisional of | 60/038,621 | Mar. 07, 1997 |
| PCT/US98/04482 | Non-provisional of | 60/040,161 | Mar. 07, 1997 |
| PCT/US98/04482 | Non-provisional of | 60/040,626 | Mar. 07, 1997 |
| PCT/US98/04482 | Non-provisional of | 60/040,334 | Mar. 07, 1997 |
| PCT/US98/04482 | Non-provisional of | 60/040,336 | Mar. 07, 1997 |
| PCT/US98/04482 | Non-provisional of | 60/040,163 | Mar. 07, 1997 |
| PCT/US98/04482 | Non-provisional of | 60/047,615 | May 23, 1997 |
| PCT/US98/04482 | Non-provisional of | 60/047,600 | May 23, 1997 |
| PCT/US98/04482 | Non-provisional of | 60/047,597 | May 23, 1997 |
| PCT/US98/04482 | Non-provisional of | 60/047,502 | May 23, 1997 |
| PCT/US98/04482 | Non-provisional of | 60/047,633 | May 23, 1997 |
| PCT/US98/04482 | Non-provisional of | 60/047,583 | May 23, 1997 |
| PCT/US98/04482 | Non-provisional of | 60/047,617 | May 23, 1997 |
| PCT/US98/04482 | Non-provisional of | 60/047,618 | May 23, 1997 |
| PCT/US98/04482 | Non-provisional of | 60/047,503 | May 23, 1997 |
| PCT/US98/04482 | Non-provisional of | 60/047,592 | May 23, 1997 |
| PCT/US98/04482 | Non-provisional of | 60/047,581 | May 23, 1997 |
| PCT/US98/04482 | Non-provisional of | 60/047,584 | May 23, 1997 |
| PCT/US98/04482 | Non-provisional of | 60/047,500 | May 23, 1997 |
| PCT/US98/04482 | Non-provisional of | 60/047,587 | May 23, 1997 |
| PCT/US98/04482 | Non-provisional of | 60/047,492 | May 23, 1997 |
| PCT/US98/04482 | Non-provisional of | 60/047,598 | May 23, 1997 |
| PCT/US98/04482 | Non-provisional of | 60/047,613 | May 23, 1997 |
| PCT/US98/04482 | Non-provisional of | 60/047,582 | May 23, 1997 |
| PCT/US98/04482 | Non-provisional of | 60/047,596 | May 23, 1997 |
| PCT/US98/04482 | Non-provisional of | 60/047,612 | May 23, 1997 |
| PCT/US98/04482 | Non-provisional of | 60/047,632 | May 23, 1997 |
| PCT/US98/04482 | Non-provisional of | 60/047,601 | May 23, 1997 |
| PCT/US98/04482 | Non-provisional of | 60/043,580 | Apr. 11, 1997 |
| PCT/US98/04482 | Non-provisional of | 60/043,568 | Apr. 11, 1997 |
| PCT/US98/04482 | Non-provisional of | 60/043,314 | Apr. 11, 1997 |
| PCT/US98/04482 | Non-provisional of | 60/043,569 | Apr. 11, 1997 |
| PCT/US98/04482 | Non-provisional of | 60/043,311 | Apr. 11, 1997 |
| PCT/US98/04482 | Non-provisional of | 60/043,671 | Apr. 11, 1997 |
| PCT/US98/04482 | Non-provisional of | 60/043,674 | Apr. 11, 1997 |
| PCT/US98/04482 | Non-provisional of | 60/043,669 | Apr. 11, 1997 |
| PCT/US98/04482 | Non-provisional of | 60/043,312 | Apr. 11, 1997 |
| PCT/US98/04482 | Non-provisional of | 60/043,313 | Apr. 11, 1997 |
| PCT/US98/04482 | Non-provisional of | 60/043,672 | Apr. 11, 1997 |
| PCT/US98/04482 | Non-provisional of | 60/043,315 | Apr. 11, 1997 |
| PCT/US98/04482 | Non-provisional of | 60/048,974 | Jun. 06, 1997 |
| PCT/US98/04482 | Non-provisional of | 60/056,886 | Aug. 22, 1997 |
| PCT/US98/04482 | Non-provisional of | 60/056,877 | Aug. 22, 1997 |
| PCT/US98/04482 | Non-provisional of | 60/056,889 | Aug. 22, 1997 |
| PCT/US98/04482 | Non-provisional of | 60/056,893 | Aug. 22, 1997 |
| PCT/US98/04482 | Non-provisional of | 60/056,630 | Aug. 22, 1997 |
| PCT/US98/04482 | Non-provisional of | 60/056,878 | Aug. 22, 1997 |
| PCT/US98/04482 | Non-provisional of | 60/056,662 | Aug. 22, 1997 |
| PCT/US98/04482 | Non-provisional of | 60/056,872 | Aug. 22, 1997 |
| PCT/US98/04482 | Non-provisional of | 60/056,882 | Aug. 22, 1997 |
| PCT/US98/04482 | Non-provisional of | 60/056,637 | Aug. 22, 1997 |
| PCT/US98/04482 | Non-provisional of | 60/056,903 | Aug. 22, 1997 |
| PCT/US98/04482 | Non-provisional of | 60/056,888 | Aug. 22, 1997 |
| PCT/US98/04482 | Non-provisional of | 60/056,879 | Aug. 22, 1997 |
| PCT/US98/04482 | Non-provisional of | 60/056,880 | Aug. 22, 1997 |
| PCT/US98/04482 | Non-provisional of | 60/056,894 | Aug. 22, 1997 |
| PCT/US98/04482 | Non-provisional of | 60/056,911 | Aug. 22, 1997 |
| PCT/US98/04482 | Non-provisional of | 60/056,636 | Aug. 22, 1997 |
| PCT/US98/04482 | Non-provisional of | 60/056,874 | Aug. 22, 1997 |
| PCT/US98/04482 | Non-provisional of | 60/056,910 | Aug. 22, 1997 |
| PCT/US98/04482 | Non-provisional of | 60/056,864 | Aug. 22, 1997 |
| PCT/US98/04482 | Non-provisional of | 60/056,631 | Aug. 22, 1997 |
| PCT/US98/04482 | Non-provisional of | 60/056,845 | Aug. 22, 1997 |
| PCT/US98/04482 | Non-provisional of | 60/056,892 | Aug. 22, 1997 |
| PCT/US98/04482 | Non-provisional of | 60/047,595 | May 23, 1997 |
| PCT/US98/04482 | Non-provisional of | 60/057,761 | Sep. 05, 1997 |
| PCT/US98/04482 | Non-provisional of | 60/047,599 | May 23, 1997 |
| PCT/US98/04482 | Non-provisional of | 60/047,588 | May 23, 1997 |
| PCT/US98/04482 | Non-provisional of | 60/047,585 | May 23, 1997 |
| PCT/US98/04482 | Non-provisional of | 60/047,586 | May 23, 1997 |
| PCT/US98/04482 | Non-provisional of | 60/047,590 | May 23, 1997 |
| PCT/US98/04482 | Non-provisional of | 60/047,594 | May 23, 1997 |
| PCT/US98/04482 | Non-provisional of | 60/047,589 | May 23, 1997 |
| PCT/US98/04482 | Non-provisional of | 60/047,593 | May 23, 1997 |
| PCT/US98/04482 | Non-provisional of | 60/047,614 | May 23, 1997 |
| PCT/US98/04482 | Non-provisional of | 60/043,578 | Apr. 11, 1997 |
| PCT/US98/04482 | Non-provisional of | 60/043,576 | Apr. 11, 1997 |
| PCT/US98/04482 | Non-provisional of | 60/047,501 | May 23, 1997 |
| PCT/US98/04482 | Non-provisional of | 60/043,670 | Apr. 11, 1997 |
| PCT/US98/04482 | Non-provisional of | 60/056,632 | Aug. 22, 1997 |
| PCT/US98/04482 | Non-provisional of | 60/056,664 | Aug. 22, 1997 |
| PCT/US98/04482 | Non-provisional of | 60/056,876 | Aug. 22, 1997 |
| PCT/US98/04482 | Non-provisional of | 60/056,881 | Aug. 22, 1997 |
| PCT/US98/04482 | Non-provisional of | 60/056,909 | Aug. 22, 1997 |
| PCT/US98/04482 | Non-provisional of | 60/056,875 | Aug. 22, 1997 |
| PCT/US98/04482 | Non-provisional of | 60/056,862 | Aug. 22, 1997 |
| PCT/US98/04482 | Non-provisional of | 60/056,887 | Aug. 22, 1997 |
| PCT/US98/04482 | Non-provisional of | 60/056,908 | Aug. 22, 1997 |
| PCT/US98/04482 | Non-provisional of | 60/048,964 | Jun. 06, 1997 |
| PCT/US98/04482 | Non-provisional of | 60/057,650 | Sep. 05, 1997 |
| PCT/US98/04482 | Non-provisional of | 60/056,884 | Aug. 22, 1997 |
| 10/100,683 | Continuation-in-part of | 09/882,171 | Jun. 18, 2001 |
| 09/882,171 | Non-provisional of | 60/190,068 | Mar. 17, 2000 |
| 09/882,171 | Continuation of | 09/809,391 | Mar. 16, 2001 |
| 09/809,391 | Continuation-in-part of | 09/149,476 | Sep. 08, 1998 |
| 09/149,476 | Continuation-in-part of | PCT/US98/04493 | Mar. 06, 1998 |
| 10/100,683 | Continuation-in-part of | 09/809,391 | Mar. 16, 2001 |
| 09/809,391 | Non-provisional of | 60/190,068 | Mar. 17, 2000 |
| 09/809,391 | Continuation-in-part of | 09/149,476 | Sep. 08, 1998 |
| 09/149,476 | Continuation-in-part of | PCT/US98/04493 | Mar. 06, 1998 |
| 10/100,683 | Continuation-in-part of | 09/149,476 | Sep. 08, 1998 |
| 09/149,476 | Continuation-in-part of | PCT/US98/04493 | Mar. 06, 1998 |
| 10/100,683 | Continuation-in-part of | PCT/US98/04493 | Mar. 06, 1998 |
| PCT/US98/04493 | Non-provisional of | 60/040,161 | Mar. 07, 1997 |
| PCT/US98/04493 | Non-provisional of | 60/040,162 | Mar. 07, 1997 |
| PCT/US98/04493 | Non-provisional of | 60/040,333 | Mar. 07, 1997 |
| PCT/US98/04493 | Non-provisional of | 60/038,621 | Mar. 07, 1997 |
| PCT/US98/04493 | Non-provisional of | 60/040,626 | Mar. 07, 1997 |
| PCT/US98/04493 | Non-provisional of | 60/040,334 | Mar. 07, 1997 |
| PCT/US98/04493 | Non-provisional of | 60/040,336 | Mar. 07, 1997 |
| PCT/US98/04493 | Non-provisional of | 60/040,163 | Mar. 07, 1997 |
| PCT/US98/04493 | Non-provisional of | 60/047,600 | May 23, 1997 |
| PCT/US98/04493 | Non-provisional of | 60/047,615 | May 23, 1997 |
| PCT/US98/04493 | Non-provisional of | 60/047,597 | May 23, 1997 |
| PCT/US98/04493 | Non-provisional of | 60/047,502 | May 23, 1997 |
| PCT/US98/04493 | Non-provisional of | 60/047,633 | May 23, 1997 |
| PCT/US98/04493 | Non-provisional of | 60/047,583 | May 23, 1997 |
| PCT/US98/04493 | Non-provisional of | 60/047,617 | May 23, 1997 |
| PCT/US98/04493 | Non-provisional of | 60/047,618 | May 23, 1997 |
| PCT/US98/04493 | Non-provisional of | 60/047,503 | May 23, 1997 |
| PCT/US98/04493 | Non-provisional of | 60/047,592 | May 23, 1997 |
| PCT/US98/04493 | Non-provisional of | 60/047,581 | May 23, 1997 |
| PCT/US98/04493 | Non-provisional of | 60/047,584 | May 23, 1997 |
| PCT/US98/04493 | Non-provisional of | 60/047,500 | May 23, 1997 |
| PCT/US98/04493 | Non-provisional of | 60/047,587 | May 23, 1997 |
| PCT/US98/04493 | Non-provisional of | 60/047,492 | May 23, 1997 |
| PCT/US98/04493 | Non-provisional of | 60/047,598 | May 23, 1997 |
| PCT/US98/04493 | Non-provisional of | 60/047,613 | May 23, 1997 |
| PCT/US98/04493 | Non-provisional of | 60/047,582 | May 23, 1997 |
| PCT/US98/04493 | Non-provisional of | 60/047,596 | May 23, 1997 |
| PCT/US98/04493 | Non-provisional of | 60/047,612 | May 23, 1997 |
| PCT/US98/04493 | Non-provisional of | 60/047,632 | May 23, 1997 |
| PCT/US98/04493 | Non-provisional of | 60/047,601 | May 23, 1997 |
| PCT/US98/04493 | Non-provisional of | 60/043,580 | Apr. 11, 1997 |
| PCT/US98/04493 | Non-provisional of | 60/043,568 | Apr. 11, 1997 |
| PCT/US98/04493 | Non-provisional of | 60/043,314 | Apr. 11, 1997 |
| PCT/US98/04493 | Non-provisional of | 60/043,569 | Apr. 11, 1997 |
| PCT/US98/04493 | Non-provisional of | 60/043,311 | Apr. 11, 1997 |
| PCT/US98/04493 | Non-provisional of | 60/043,671 | Apr. 11, 1997 |
| PCT/US98/04493 | Non-provisional of | 60/043,674 | Apr. 11, 1997 |
| PCT/US98/04493 | Non-provisional of | 60/043,669 | Apr. 11, 1997 |
| PCT/US98/04493 | Non-provisional of | 60/043,312 | Apr. 11, 1997 |
| PCT/US98/04493 | Non-provisional of | 60/043,313 | Apr. 11, 1997 |
| PCT/US98/04493 | Non-provisional of | 60/043,672 | Apr. 11, 1997 |
| PCT/US98/04493 | Non-provisional of | 60/043,315 | Apr. 11, 1997 |
| PCT/US98/04493 | Non-provisional of | 60/048,974 | Jun. 06, 1997 |
| PCT/US98/04493 | Non-provisional of | 60/056,886 | Aug. 22, 1997 |
| PCT/US98/04493 | Non-provisional of | 60/056,877 | Aug. 22, 1997 |
| PCT/US98/04493 | Non-provisional of | 60/056,889 | Aug. 22, 1997 |
| PCT/US98/04493 | Non-provisional of | 60/056,893 | Aug. 22, 1997 |
| PCT/US98/04493 | Non-provisional of | 60/056,630 | Aug. 22, 1997 |
| PCT/US98/04493 | Non-provisional of | 60/056,878 | Aug. 22, 1997 |
| PCT/US98/04493 | Non-provisional of | 60/056,662 | Aug. 22, 1997 |
| PCT/US98/04493 | Non-provisional of | 60/056,872 | Aug. 22, 1997 |
| PCT/US98/04493 | Non-provisional of | 60/056,882 | Aug. 22, 1997 |
| PCT/US98/04493 | Non-provisional of | 60/056,637 | Aug. 22, 1997 |
| PCT/US98/04493 | Non-provisional of | 60/056,903 | Aug. 22, 1997 |
| PCT/US98/04493 | Non-provisional of | 60/056,888 | Aug. 22, 1997 |
| PCT/US98/04493 | Non-provisional of | 60/056,879 | Aug. 22, 1997 |
| PCT/US98/04493 | Non-provisional of | 60/056,880 | Aug. 22, 1997 |
| PCT/US98/04493 | Non-provisional of | 60/056,894 | Aug. 22, 1997 |
| PCT/US98/04493 | Non-provisional of | 60/056,911 | Aug. 22, 1997 |
| PCT/US98/04493 | Non-provisional of | 60/056,636 | Aug. 22, 1997 |
| PCT/US98/04493 | Non-provisional of | 60/056,874 | Aug. 22, 1997 |
| PCT/US98/04493 | Non-provisional of | 60/056,910 | Aug. 22, 1997 |
| PCT/US98/04493 | Non-provisional of | 60/056,864 | Aug. 22, 1997 |
| PCT/US98/04493 | Non-provisional of | 60/056,631 | Aug. 22, 1997 |
| PCT/US98/04493 | Non-provisional of | 60/056,845 | Aug. 22, 1997 |
| PCT/US98/04493 | Non-provisional of | 60/056,892 | Aug. 22, 1997 |
| PCT/US98/04493 | Non-provisional of | 60/057,761 | Sep. 05, 1997 |
| PCT/US98/04493 | Non-provisional of | 60/047,595 | May 23, 1997 |
| PCT/US98/04493 | Non-provisional of | 60/047,599 | May 23, 1997 |
| PCT/US98/04493 | Non-provisional of | 60/047,588 | May 23, 1997 |
| PCT/US98/04493 | Non-provisional of | 60/047,585 | May 23, 1997 |
| PCT/US98/04493 | Non-provisional of | 60/047,586 | May 23, 1997 |
| PCT/US98/04493 | Non-provisional of | 60/047,590 | May 23, 1997 |
| PCT/US98/04493 | Non-provisional of | 60/047,594 | May 23, 1997 |
| PCT/US98/04493 | Non-provisional of | 60/047,589 | May 23, 1997 |
| PCT/US98/04493 | Non-provisional of | 60/047,593 | May 23, 1997 |
| PCT/US98/04493 | Non-provisional of | 60/047,614 | May 23, 1997 |
| PCT/US98/04493 | Non-provisional of | 60/043,578 | Apr. 11, 1997 |
| PCT/US98/04493 | Non-provisional of | 60/043,576 | Apr. 11, 1997 |
| PCT/US98/04493 | Non-provisional of | 60/047,501 | May 23, 1997 |
| PCT/US98/04493 | Non-provisional of | 60/043,670 | Apr. 11, 1997 |
| PCT/US98/04493 | Non-provisional of | 60/056,632 | Aug. 22, 1997 |
| PCT/US98/04493 | Non-provisional of | 60/056,664 | Aug. 22, 1997 |
| PCT/US98/04493 | Non-provisional of | 60/056,876 | Aug. 22, 1997 |
| PCT/US98/04493 | Non-provisional of | 60/056,881 | Aug. 22, 1997 |
| PCT/US98/04493 | Non-provisional of | 60/056,909 | Aug. 22, 1997 |
| PCT/US98/04493 | Non-provisional of | 60/056,875 | Aug. 22, 1997 |
| PCT/US98/04493 | Non-provisional of | 60/056,862 | Aug. 22, 1997 |
| PCT/US98/04493 | Non-provisional of | 60/056,887 | Aug. 22, 1997 |
| PCT/US98/04493 | Non-provisional of | 60/056,908 | Aug. 22, 1997 |
| PCT/US98/04493 | Non-provisional of | 60/048,964 | Jun. 06, 1997 |
| PCT/US98/04493 | Non-provisional of | 60/057,650 | Sep. 05, 1997 |
| PCT/US98/04493 | Non-provisional of | 60/056,884 | Aug. 22, 1997 |
| PCT/US98/04493 | Non-provisional of | 60/057,669 | Sep. 05, 1997 |
| PCT/US98/04493 | Non-provisional of | 60/049,610 | Jun. 13, 1997 |
| PCT/US98/04493 | Non-provisional of | 60/061,060 | Oct. 02, 1997 |
| PCT/US98/04493 | Non-provisional of | 60/051,926 | Jul. 08, 1997 |
| PCT/US98/04493 | Non-provisional of | 60/052,874 | Jul. 16, 1997 |
| PCT/US98/04493 | Non-provisional of | 60/058,785 | Sep. 12, 1997 |
| PCT/US98/04493 | Non-provisional of | 60/055,724 | Aug. 18, 1997 |
| 10/100,683 | Continuation-in-part of | 10/058,993 | Jan. 30, 2002 |
| 10/058,993 | Non-provisional of | 60/265,583 | Feb. 02, 2001 |
| 10/058,993 | Continuation-in-part of | 09/852,659 | May 11, 2001 |
| 09/852,659 | Continuation-in-part of | 09/152,060 | Sep. 11, 1998 |
| 09/152,060 | Continuation-in-part of | PCT/US98/04858 | Mar. 12, 1998 |
| 10/058,993 | Continuation-in-part of | 09/853,161 | May 11, 2001 |
| 09/853,161 | Continuation-in-part of | 09/152,060 | Sep. 11, 1998 |
| 09/152,060 | Continuation-in-part of | PCT/US98/04858 | Mar. 12, 1998 |
| 10/058,993 | Continuation-in-part of | 09/852,797 | May 11, 2001 |
| 09/852,797 | Continuation-in-part of | 09/152,060 | Sep. 11, 1998 |
| 09/152,060 | Continuation-in-part of | PCT/US98/04858 | Mar. 12, 1998 |
| 10/100,683 | Continuation-in-part of | 09/852,659 | May 11, 2001 |
| 09/852,659 | Non-provisional of | 60/265,583 | Feb. 02, 2001 |
| 09/852,659 | Continuation-in-part of | 09/152,060 | Sep. 11, 1998 |
| 09/152,060 | Continuation-in-part of | PCT/US98/04858 | Mar. 12, 1998 |
| 10/100,683 | Continuation-in-part of | 09/853,161 | May 11, 2001 |
| 09/853,161 | Non-provisional of | 60/265,583 | Feb. 02, 2001 |
| 09/853,161 | Continuation-in-part of | 09/152,060 | Sep. 11, 1998 |
| 09/152,060 | Continuation-in-part of | PCT/US98/04858 | Mar. 12, 1998 |
| 10/100,683 | Continuation-in-part of | 09/852,797 | May 11, 2001 |
| 09/852,797 | Non-provisional of | 60/265,583 | Feb. 02, 2001 |
| 09/852,797 | Continuation-in-part of | 09/152,060 | Sep. 11, 1998 |
| 09/152,060 | Continuation-in-part of | PCT/US98/04858 | Mar. 12, 1998 |
| 10/100,683 | Continuation-in-part of | 09/152,060 | Sep. 11, 1998 |
| 09/152,060 | Continuation-in-part of | PCT/US98/04858 | Mar. 12, 1998 |
| 10/100,683 | Continuation-in-part of | PCT/US98/04858 | Mar. 12, 1998 |
| PCT/US98/04858 | Non-provisional of | 60/040,762 | Mar. 14, 1997 |
| PCT/US98/04858 | Non-provisional of | 60/040,710 | Mar. 14, 1997 |
| PCT/US98/04858 | Non-provisional of | 60/050,934 | May 30, 1997 |
| PCT/US98/04858 | Non-provisional of | 60/048,100 | May 30, 1997 |
| PCT/US98/04858 | Non-provisional of | 60/048,357 | May 30, 1997 |
| PCT/US98/04858 | Non-provisional of | 60/048,189 | May 30, 1997 |
| PCT/US98/04858 | Non-provisional of | 60/057,765 | Sep. 05, 1997 |
| PCT/US98/04858 | Non-provisional of | 60/048,970 | Jun. 06, 1997 |
| PCT/US98/04858 | Non-provisional of | 60/068,368 | Dec. 19, 1997 |
| 10/100,683 | Continuation-in-part of | 10/059,395 | Jan. 31, 2002 |
| 10/059,395 | Divisional of | 09/966,262 | Oct. 01, 2001 |
| 09/966,262 | Continuation of | 09/154,707 | Sep. 17, 1998 |
| 09/154,707 | Continuation-in-part of | PCT/US98/05311 | Mar. 19, 1998 |
| 10/100,683 | Continuation-in-part of | 09/984,245 | Oct. 29, 2001 |
| 09/984,245 | Divisional of | 09/154,707 | Sep. 17, 1998 |
| 09/154,707 | Continuation-in-part of | PCT/US98/05311 | Mar. 19, 1998 |
| 10/100,683 | Continuation-in-part of | 09/983,966 | Oct. 26, 2001 |
| 09/983,966 | Divisional of | 09/154,707 | Sep. 17, 1998 |
| 09/154,707 | Continuation-in-part of | PCT/US98/05311 | Mar. 19, 1998 |
| 10/100,683 | Continuation-in-part of | 09/966,262 | Oct. 01, 2001 |
| 09/966,262 | Continuation of of | 09/154,707 | Sep. 17, 1998 |
| 09/154,707 | Continuation-in-part of | PCT/US98/05311 | Mar. 19, 1998 |
| 10/100,683 | Continuation-in-part of | 09/154,707 | Sep. 17, 1998 |
| 09/154,707 | Continuation-in-part of | PCT/US98/05311 | Mar. 19, 1998 |
| 10/100,683 | Continuation-in-part of | PCT/US98/05311 | Mar. 03, 1998 |
| PCT/US98/05311 | Non-provisional of | 60/041,277 | Mar. 21, 1997 |
| PCT/US98/05311 | Non-provisional of | 60/042,344 | Mar. 21, 1997 |
| PCT/US98/05311 | Non-provisional of | 60/041,276 | Mar. 21, 1997 |
| PCT/US98/05311 | Non-provisional of | 60/041,281 | Mar. 21, 1997 |
| PCT/US98/05311 | Non-provisional of | 60/048,094 | May 30, 1997 |
| PCT/US98/05311 | Non-provisional of | 60/048,350 | May 30, 1997 |
| PCT/US98/05311 | Non-provisional of | 60/048,188 | May 30, 1997 |
| PCT/US98/05311 | Non-provisional of | 60/048,135 | May 30, 1997 |
| PCT/US98/05311 | Non-provisional of | 60/050,937 | May 30, 1997 |
| PCT/US98/05311 | Non-provisional of | 60/048,187 | May 30, 1997 |
| PCT/US98/05311 | Non-provisional of | 60/048,099 | May 30, 1997 |
| PCT/US98/05311 | Non-provisional of | 60/048,352 | May 30, 1997 |
| PCT/US98/05311 | Non-provisional of | 60/048,186 | May 30, 1997 |
| PCT/US98/05311 | Non-provisional of | 60/048,069 | May 30, 1997 |
| PCT/US98/05311 | Non-provisional of | 60/048,095 | May 30, 1997 |
| PCT/US98/05311 | Non-provisional of | 60/048,131 | May 30, 1997 |
| PCT/US98/05311 | Non-provisional of | 60/048,096 | May 30, 1997 |
| PCT/US98/05311 | Non-provisional of | 60/048,355 | May 30, 1997 |
| PCT/US98/05311 | Non-provisional of | 60/048,160 | May 30, 1997 |
| PCT/US98/05311 | Non-provisional of | 60/048,351 | May 30, 1997 |
| PCT/US98/05311 | Non-provisional of | 60/048,154 | May 30, 1997 |
| PCT/US98/05311 | Non-provisional of | 60/054,804 | Aug. 05, 1997 |
| PCT/US98/05311 | Non-provisional of | 60/056,370 | Aug. 19, 1997 |
| PCT/US98/05311 | Non-provisional of | 60/060,862 | Oct. 02, 1997 |
| 10/100,683 | Continuation-in-part of | 09/814,122 | Mar. 22, 2001 |
| 09/814,122 | Continuation of | 09/577,145 | May 24, 2000 |
| 09/577,145 | Continuation of | 09/166,780 | Oct. 06, 1998 |
| 09/166,780 | Continuation-in-part of | PCT/US98/06801 | Apr. 07, 1998 |
| 10/100,683 | Continuation-in-part of | PCT/US98/06801 | Apr. 07, 1998 |
| PCT/US98/06801 | Non-provisional of | 60/042,726 | Apr. 08, 1997 |
| PCT/US98/06801 | Non-provisional of | 60/042,727 | Apr. 08, 1997 |
| PCT/US98/06801 | Non-provisional of | 60/042,728 | Apr. 08, 1997 |
| PCT/US98/06801 | Non-provisional of | 60/042,754 | Apr. 08, 1997 |
| PCT/US98/06801 | Non-provisional of | 60/042,825 | Apr. 08, 1997 |
| PCT/US98/06801 | Non-provisional of | 60/048,068 | May 30, 1997 |
| PCT/US98/06801 | Non-provisional of | 60/048,070 | May 30, 1997 |
| PCT/US98/06801 | Non-provisional of | 60/048,184 | May 30, 1997 |
| 10/100,683 | Continuation-in-part of | PCT/US98/06801 | Apr. 07, 1997 |
| PCT/US98/06801 | Non-provisional of | 60/042,726 | Apr. 08, 1997 |
| PCT/US98/06801 | Non-provisional of | 60/042,727 | Apr. 08, 1997 |
| PCT/US98/06801 | Non-provisional of | 60/042,728 | Apr. 08, 1997 |
| PCT/US98/06801 | Non-provisional of | 60/042,754 | Apr. 08, 1997 |
| PCT/US98/06801 | Non-provisional of | 60/042,825 | Apr. 08, 1997 |
| PCT/US98/06801 | Non-provisional of | 60/048,068 | May 30, 1997 |
| PCT/US98/06801 | Non-provisional of | 60/048,070 | May 30, 1997 |
| PCT/US98/06801 | Non-provisional of | 60/048,184 | May 30, 1997 |
| 10/100,683 | Continuation-in-part of | PCT/US98/10868 | May 28, 1998 |
| PCT/US98/10868 | Non-provisional of | 60/044,039 | May 30, 1997 |
| PCT/US98/10868 | Non-provisional of | 60/048,093 | May 30, 1997 |
| PCT/US98/10868 | Non-provisional of | 60/048,190 | May 30, 1997 |
| PCT/US98/10868 | Non-provisional of | 60/050,935 | May 30, 1997 |
| PCT/US98/10868 | Non-provisional of | 60/048,101 | May 30, 1997 |
| PCT/US98/10868 | Non-provisional of | 60/048,356 | May 30, 1997 |
| PCT/US98/10868 | Non-provisional of | 60/056,250 | Aug. 29, 1997 |
| PCT/US98/10868 | Non-provisional of | 60/056,296 | Aug. 29, 1997 |
| PCT/US98/10868 | Non-provisional of | 60/056,293 | Aug. 29, 1997 |
| 10/100,683 | Continuation-in-part of | PCT/US98/11422 | Jun. 04, 1998 |
| PCT/US98/11422 | Non-provisional of | 60/048,885 | Jun. 06, 1997 |
| PCT/US98/11422 | Non-provisional of | 60/049,375 | Jun. 06, 1997 |
| PCT/US98/11422 | Non-provisional of | 60/048,881 | Jun. 06, 1997 |
| PCT/US98/11422 | Non-provisional of | 60/048,880 | Jun. 06, 1997 |
| PCT/US98/11422 | Non-provisional of | 60/048,896 | Jun. 06, 1997 |
| PCT/US98/11422 | Non-provisional of | 60/049,020 | Jun. 06, 1997 |
| PCT/US98/11422 | Non-provisional of | 60/048,876 | Jun. 06, 1997 |
| PCT/US98/11422 | Non-provisional of | 60/048,895 | Jun. 06, 1997 |
| PCT/US98/11422 | Non-provisional of | 60/048,884 | Jun. 06, 1997 |
| PCT/US98/11422 | Non-provisional of | 60/048,894 | Jun. 06, 1997 |
| PCT/US98/11422 | Non-provisional of | 60/048,971 | Jun. 06, 1997 |
| PCT/US98/11422 | Non-provisional of | 60/048,964 | Jun. 06, 1997 |
| PCT/US98/11422 | Non-provisional of | 60/048,882 | Jun. 06, 1997 |
| PCT/US98/11422 | Non-provisional of | 60/048,899 | Jun. 06, 1997 |
| PCT/US98/11422 | Non-provisional of | 60/048,893 | Jun. 06, 1997 |
| PCT/US98/11422 | Non-provisional of | 60/048,900 | Jun. 06, 1997 |
| PCT/US98/11422 | Non-provisional of | 60/048,901 | Jun. 06, 1997 |
| PCT/US98/11422 | Non-provisional of | 60/048,892 | Jun. 06, 1997 |
| PCT/US98/11422 | Non-provisional of | 60/048,915 | Jun. 06, 1997 |
| PCT/US98/11422 | Non-provisional of | 60/049,019 | Jun. 06, 1997 |
| PCT/US98/11422 | Non-provisional of | 60/048,970 | Jun. 06, 1997 |
| PCT/US98/11422 | Non-provisional of | 60/048,972 | Jun. 06, 1997 |
| PCT/US98/11422 | Non-provisional of | 60/048,916 | Jun. 06, 1997 |
| PCT/US98/11422 | Non-provisional of | 60/049,373 | Jun. 06, 1997 |
| PCT/US98/11422 | Non-provisional of | 60/048,875 | Jun. 06, 1997 |
| PCT/US98/11422 | Non-provisional of | 60/049,374 | Jun. 06, 1997 |
| PCT/US98/11422 | Non-provisional of | 60/048,917 | Jun. 06, 1997 |
| PCT/US98/11422 | Non-provisional of | 60/048,949 | Jun. 06, 1997 |
| PCT/US98/11422 | Non-provisional of | 60/048,974 | Jun. 06, 1997 |
| PCT/US98/11422 | Non-provisional of | 60/048,883 | Jun. 06, 1997 |
| PCT/US98/11422 | Non-provisional of | 60/048,897 | Jun. 06, 1997 |
| PCT/US98/11422 | Non-provisional of | 60/048,898 | Jun. 06, 1997 |
| PCT/US98/11422 | Non-provisional of | 60/048,962 | Jun. 06, 1997 |
| PCT/US98/11422 | Non-provisional of | 60/048,963 | Jun. 06, 1997 |
| PCT/US98/11422 | Non-provisional of | 60/048,877 | Jun. 06, 1997 |
| PCT/US98/11422 | Non-provisional of | 60/048,878 | Jun. 06, 1997 |
| PCT/US98/11422 | Non-provisional of | 60/057,645 | Sep. 05, 1997 |
| PCT/US98/11422 | Non-provisional of | 60/057,642 | Sep. 05, 1997 |
| PCT/US98/11422 | Non-provisional of | 60/057,668 | Sep. 05, 1997 |
| PCT/US98/11422 | Non-provisional of | 60/057,635 | Sep. 05, 1997 |
| PCT/US98/11422 | Non-provisional of | 60/057,627 | Sep. 05, 1997 |
| PCT/US98/11422 | Non-provisional of | 60/057,667 | Sep. 05, 1997 |
| PCT/US98/11422 | Non-provisional of | 60/057,666 | Sep. 05, 1997 |
| PCT/US98/11422 | Non-provisional of | 60/057,764 | Sep. 05, 1997 |
| PCT/US98/11422 | Non-provisional of | 60/057,643 | Sep. 05, 1997 |
| PCT/US98/11422 | Non-provisional of | 60/057,769 | Sep. 05, 1997 |
| PCT/US98/11422 | Non-provisional of | 60/057,763 | Sep. 05, 1997 |
| PCT/US98/11422 | Non-provisional of | 60/057,650 | Sep. 05, 1997 |
| PCT/US98/11422 | Non-provisional of | 60/057,584 | Sep. 05, 1997 |
| PCT/US98/11422 | Non-provisional of | 60/057,647 | Sep. 05, 1997 |
| PCT/US98/11422 | Non-provisional of | 60/057,661 | Sep. 05, 1997 |
| PCT/US98/11422 | Non-provisional of | 60/057,662 | Sep. 05, 1997 |
| PCT/US98/11422 | Non-provisional of | 60/057,646 | Sep. 05, 1997 |
| PCT/US98/11422 | Non-provisional of | 60/057,654 | Sep. 05, 1997 |
| PCT/US98/11422 | Non-provisional of | 60/057,651 | Sep. 05, 1997 |
| PCT/US98/11422 | Non-provisional of | 60/057,644 | Sep. 05, 1997 |
| PCT/US98/11422 | Non-provisional of | 60/057,765 | Sep. 05, 1997 |
| PCT/US98/11422 | Non-provisional of | 60/057,762 | Sep. 05, 1997 |
| PCT/US98/11422 | Non-provisional of | 60/057,775 | Sep. 05, 1997 |
| PCT/US98/11422 | Non-provisional of | 60/057,648 | Sep. 05, 1997 |
| PCT/US98/11422 | Non-provisional of | 60/057,774 | Sep. 05, 1997 |
| PCT/US98/11422 | Non-provisional of | 60/057,649 | Sep. 05, 1997 |
| PCT/US98/11422 | Non-provisional of | 60/057,770 | Sep. 05, 1997 |
| PCT/US98/11422 | Non-provisional of | 60/057,771 | Sep. 05, 1997 |
| PCT/US98/11422 | Non-provisional of | 60/057,761 | Sep. 05, 1997 |
| PCT/US98/11422 | Non-provisional of | 60/057,760 | Sep. 05, 1997 |
| PCT/US98/11422 | Non-provisional of | 60/057,776 | Sep. 05, 1997 |
| PCT/US98/11422 | Non-provisional of | 60/057,778 | Sep. 05, 1997 |
| PCT/US98/11422 | Non-provisional of | 60/057,629 | Sep. 05, 1997 |
| PCT/US98/11422 | Non-provisional of | 60/057,628 | Sep. 05, 1997 |
| PCT/US98/11422 | Non-provisional of | 60/057,777 | Sep. 05, 1997 |
| PCT/US98/11422 | Non-provisional of | 60/057,634 | Sep. 05, 1997 |
| PCT/US98/11422 | Non-provisional of | 60/070,923 | Dec. 18, 1997 |
| 10/100,683 | Continuation-in-part of | PCT/US01/05614 | Feb. 21, 2001 |
| PCT/US01/05614 | Non-provisional of | 60/184,836 | Feb. 24, 2000 |
| PCT/US01/05614 | Non-provisional of | 60/193,170 | Mar. 29, 2000 |
| 10/100,683 | Continuation-in-part of | PCT/US98/12125 | Jun. 11, 1998 |
| PCT/US98/12125 | Non-provisional of | 60/049,547 | Jun. 13, 1997 |
| PCT/US98/12125 | Non-provisional of | 60/049,548 | Jun. 13, 1997 |
| PCT/US98/12125 | Non-provisional of | 60/049,549 | Jun. 13, 1997 |
| PCT/US98/12125 | Non-provisional of | 60/049,550 | Jun. 13, 1997 |
| PCT/US98/12125 | Non-provisional of | 60/049,566 | Jun. 13, 1997 |
| PCT/US98/12125 | Non-provisional of | 60/049,606 | Jun. 13, 1997 |
| PCT/US98/12125 | Non-provisional of | 60/049,607 | Jun. 13, 1997 |
| PCT/US98/12125 | Non-provisional of | 60/049,608 | Jun. 13, 1997 |
| PCT/US98/12125 | Non-provisional of | 60/049,609 | Jun. 13, 1997 |
| PCT/US98/12125 | Non-provisional of | 60/049,610 | Jun. 13, 1997 |
| PCT/US98/12125 | Non-provisional of | 60/049,611 | Jun. 13, 1997 |
| PCT/US98/12125 | Non-provisional of | 60/050,901 | Jun. 13, 1997 |
| PCT/US98/12125 | Non-provisional of | 60/052,989 | Jun. 13, 1997 |
| PCT/US98/12125 | Non-provisional of | 60/051,919 | Jul. 08, 1997 |
| PCT/US98/12125 | Non-provisional of | 60/055,984 | Aug. 18, 1997 |
| PCT/US98/12125 | Non-provisional of | 60/058,665 | Sep. 12, 1997 |
| PCT/US98/12125 | Non-provisional of | 60/058,668 | Sep. 12, 1997 |
| PCT/US98/12125 | Non-provisional of | 60/058,669 | Sep. 12, 1997 |
| PCT/US98/12125 | Non-provisional of | 60/058,750 | Sep. 12, 1997 |
| PCT/US98/12125 | Non-provisional of | 60/058,971 | Sep. 12, 1997 |
| PCT/US98/12125 | Non-provisional of | 60/058,972 | Sep. 12, 1997 |
| PCT/US98/12125 | Non-provisional of | 60/058,975 | Sep. 12, 1997 |
| PCT/US98/12125 | Non-provisional of | 60/060,834 | Oct. 02, 1997 |
| PCT/US98/12125 | Non-provisional of | 60/060,841 | Oct. 02, 1997 |
| PCT/US98/12125 | Non-provisional of | 60/060,844 | Oct. 02, 1997 |
| PCT/US98/12125 | Non-provisional of | 60/060,865 | Oct. 02, 1997 |
| PCT/US98/12125 | Non-provisional of | 60/061,059 | Oct. 02, 1997 |
| PCT/US98/12125 | Non-provisional of | 60/061,060 | Oct. 02, 1997 |
| 10/100,683 | Continuation-in-part of | 09/627,081 | Jul. 27, 2000 |
| 09/627,081 | Continuation of | 09/213,365 | Dec. 17, 1998 |
| 09/213,365 | Continuation-in-part of | PCT/US98/13608 | Jun. 30, 1998 |
| 10/100,683 | Continuation-in-part of | PCT/US98/13608 | Jun. 30, 1998 |
| PCT/US98/13608 | Non-provisional of | 60/051,480 | Jul. 01, 1997 |
| PCT/US98/13608 | Non-provisional of | 60/051,381 | Jul. 01, 1997 |
| PCT/US98/13608 | Non-provisional of | 60/058,663 | Sep. 12, 1997 |
| PCT/US98/13608 | Non-provisional of | 60/058,598 | Sep. 12, 1997 |
| 10/100,683 | Continuation-in-part of | 09/984,490 | Oct. 30, 2001 |
| 09/984,490 | Divisional of | 09/227,357 | Jan. 08, 1999 |
| 09/227,357 | Continuation-in-part of | PCT/US98/13684 | Jul. 07, 1998 |
| 10/100,683 | Continuation-in-part of | 09/983,802 | Oct. 25, 2001 |
| 09/983,802 | Continuation of | 09/227,357 | Oct. 10, 2001 |
| 09/227,357 | Continuation-in-part of | PCT/US98/13684 | Jul. 07, 1998 |
| 10/100,683 | Continuation-in-part of | 09/973,278 | Oct. 10, 2001 |
| 09/973,278 | Non-provisional of | 60/239,899 | Oct. 13, 2000 |
| 09/973,278 | Continuation-in-part of | 09/227,357 | Jan. 08, 1999 |
| 09/227,357 | Continuation-in-part of | PCT/US98/13684 | Jul. 07, 1998 |
| 10/100,683 | Continuation-in-part of | PCT/US98/13684 | Jul. 07, 1998 |
| PCT/US98/13684 | Non-provisional of | 60/051,926 | Jul. 08, 1997 |
| PCT/US98/13684 | Non-provisional of | 60/052,793 | Jul. 08, 1997 |
| PCT/US98/13684 | Non-provisional of | 60/051,925 | Jul. 08, 1997 |
| PCT/US98/13684 | Non-provisional of | 60/051,929 | Jul. 08, 1997 |
| PCT/US98/13684 | Non-provisional of | 60/052,803 | Jul. 08, 1997 |
| PCT/US98/13684 | Non-provisional of | 60/052,732 | Jul. 08, 1997 |
| PCT/US98/13684 | Non-provisional of | 60/051,931 | Jul. 08, 1997 |
| PCT/US98/13684 | Non-provisional of | 60/051,932 | Jul. 08, 1997 |
| PCT/US98/13684 | Non-provisional of | 60/051,916 | Jul. 08, 1997 |
| PCT/US98/13684 | Non-provisional of | 60/051,930 | Jul. 08, 1997 |
| PCT/US98/13684 | Non-provisional of | 60/051,918 | Jul. 08, 1997 |
| PCT/US98/13684 | Non-provisional of | 60/051,920 | Jul. 08, 1997 |
| PCT/US98/13684 | Non-provisional of | 60/052,733 | Jul. 08, 1997 |
| PCT/US98/13684 | Non-provisional of | 60/052,795 | Jul. 08, 1997 |
| PCT/US98/13684 | Non-provisional of | 60/051,919 | Jul. 08, 1997 |
| PCT/US98/13684 | Non-provisional of | 60/051,928 | Jul. 08, 1997 |
| PCT/US98/13684 | Non-provisional of | 60/055,722 | Aug. 18, 1997 |
| PCT/US98/13684 | Non-provisional of | 60/055,723 | Aug. 18, 1997 |
| PCT/US98/13684 | Non-provisional of | 60/055,948 | Aug. 18, 1997 |
| PCT/US98/13684 | Non-provisional of | 60/055,949 | Aug. 18, 1997 |
| PCT/US98/13684 | Non-provisional of | 60/055,953 | Aug. 18, 1997 |
| PCT/US98/13684 | Non-provisional of | 60/055,950 | Aug. 18, 1997 |
| PCT/US98/13684 | Non-provisional of | 60/055,947 | Aug. 18, 1997 |
| PCT/US98/13684 | Non-provisional of | 60/055,964 | Aug. 18, 1997 |
| PCT/US98/13684 | Non-provisional of | 60/056,360 | Aug. 18, 1997 |
| PCT/US98/13684 | Non-provisional of | 60/055,684 | Aug. 18, 1997 |
| PCT/US98/13684 | Non-provisional of | 60/055,984 | Aug. 18, 1997 |
| PCT/US98/13684 | Non-provisional of | 60/055,954 | Aug. 18, 1997 |
| PCT/US98/13684 | Non-provisional of | 60/058,785 | Sep. 12, 1997 |
| PCT/US98/13684 | Non-provisional of | 60/058,664 | Sep. 12, 1997 |
| PCT/US98/13684 | Non-provisional of | 60/058,660 | Sep. 12, 1997 |
| PCT/US98/13684 | Non-provisional of | 60/058,661 | Sep. 12, 1997 |
| 10/100,683 | Continuation-in-part of | 09/776,724 | Feb. 06, 2001 |
| 09/776,724 | Non-provisional of | 60/180,909 | Feb. 08, 2000 |
| 09/776,724 | Continuation-in-part of | 09/669,688 | Sep. 26, 2000 |
| 09/669,688 | Continuation of | 09/229,982 | Jan. 14, 1999 |
| 09/229,982 | Continuation-in-part of | PCT/US98/14613 | Jul. 15, 1998 |
| 10/100,683 | Continuation-in-part of | 09/669,688 | Sep. 26, 2000 |
| 09/669,688 | Continuation of | 09/229,982 | Jan. 14, 1999 |
| 09/229,982 | Continuation-in-part of | PCT/US98/14613 | Jul. 15, 1998 |
| 10/100,683 | Continuation-in-part of | 09/229,982 | Jan. 14, 1999 |
| 09/229,982 | Continuation-in-part of | PCT/US98/14613 | Jul. 15, 1998 |
| 10/100,683 | Continuation-in-part of | PCT/US98/14613 | Jul. 15, 1998 |
| PCT/US98/14613 | Non-provisional of | 60/052,661 | Jul. 16, 1997 |
| PCT/US98/14613 | Non-provisional of | 60/052,872 | Jul. 16, 1997 |
| PCT/US98/14613 | Non-provisional of | 60/052,871 | Jul. 16, 1997 |
| PCT/US98/14613 | Non-provisional of | 60/052,874 | Jul. 16, 1997 |
| PCT/US98/14613 | Non-provisional of | 60/052,873 | Jul. 16, 1997 |
| PCT/US98/14613 | Non-provisional of | 60/052,870 | Jul. 16, 1997 |
| PCT/US98/14613 | Non-provisional of | 60/052,875 | Jul. 16, 1997 |
| PCT/US98/14613 | Non-provisional of | 60/053,440 | Jul. 22, 1997 |
| PCT/US98/14613 | Non-provisional of | 60/053,441 | Jul. 22, 1997 |
| PCT/US98/14613 | Non-provisional of | 60/053,442 | Jul. 22, 1997 |
| PCT/US98/14613 | Non-provisional of | 60/056,359 | Aug. 18, 1997 |
| PCT/US98/14613 | Non-provisional of | 60/055,725 | Aug. 18, 1997 |
| PCT/US98/14613 | Non-provisional of | 60/055,985 | Aug. 18, 1997 |
| PCT/US98/14613 | Non-provisional of | 60/055,952 | Aug. 18, 1997 |
| PCT/US98/14613 | Non-provisional of | 60/055,989 | Aug. 18, 1997 |
| PCT/US98/14613 | Non-provisional of | 60/056,361 | Aug. 18, 1997 |
| PCT/US98/14613 | Non-provisional of | 60/055,726 | Aug. 18, 1997 |
| PCT/US98/14613 | Non-provisional of | 60/055,724 | Aug. 18, 1997 |
| PCT/US98/14613 | Non-provisional of | 60/055,946 | Aug. 18, 1997 |
| PCT/US98/14613 | Non-provisional of | 60/055,683 | Aug. 18, 1997 |
| 10/100,683 | Non-provisional of | 60/295,558 | Jun. 05, 2001 |
| 10/100,683 | Continuation-in-part of | 09/820,649 | Mar. 30, 2001 |
| 09/820,649 | Continuation of | 09/666,984 | Sep. 21, 2000 |
| 09/666,984 | Continuation of | 09/236,557 | Jan. 26, 1999 |
| 09/236,557 | Continuation-in-part of | PCT/US98/15949 | Jul. 29, 1998 |
| 10/100,683 | Continuation-in-part of | PCT/US98/15949 | Jul. 29, 1998 |
| PCT/US98/15949 | Non-provisional of | 60/054,212 | Jul. 30, 1997 |
| PCT/US98/15949 | Non-provisional of | 60/054,209 | Jul. 30, 1997 |
| PCT/US98/15949 | Non-provisional of | 60/054,234 | Jul. 30, 1997 |
| PCT/US98/15949 | Non-provisional of | 60/054,218 | Jul. 30, 1997 |
| PCT/US98/15949 | Non-provisional of | 60/054,214 | Jul. 30, 1997 |
| PCT/US98/15949 | Non-provisional of | 60/054,236 | Jul. 30, 1997 |
| PCT/US98/15949 | Non-provisional of | 60/054,215 | Jul. 30, 1997 |
| PCT/US98/15949 | Non-provisional of | 60/054,211 | Jul. 30, 1997 |
| PCT/US98/15949 | Non-provisional of | 60/054,217 | Jul. 30, 1997 |
| PCT/US98/15949 | Non-provisional of | 60/054,213 | Jul. 30, 1997 |
| PCT/US98/15949 | Non-provisional of | 60/055,968 | Aug. 18, 1997 |
| PCT/US98/15949 | Non-provisional of | 60/055,969 | Aug. 18, 1997 |
| PCT/US98/15949 | Non-provisional of | 60/055,972 | Aug. 18, 1997 |
| PCT/US98/15949 | Non-provisional of | 60/056,561 | Aug. 19, 1997 |
| PCT/US98/15949 | Non-provisional of | 60/056,534 | Aug. 19, 1997 |
| PCT/US98/15949 | Non-provisional of | 60/056,729 | Aug. 19, 1997 |
| PCT/US98/15949 | Non-provisional of | 60/056,543 | Aug. 19, 1997 |
| PCT/US98/15949 | Non-provisional of | 60/056,727 | Aug. 19, 1997 |
| PCT/US98/15949 | Non-provisional of | 60/056,554 | Aug. 19, 1997 |
| PCT/US98/15949 | Non-provisional of | 60/056,730 | Aug. 19, 1997 |
| 10/100,683 | Continuation-in-part of | 09/969,730 | Oct. 04, 2001 |
| 09/969,730 | Continuation-in-part of | 09/774,639 | Feb. 01, 2001 |
| 09/774,639 | Continuation of | 09/244,112 | Feb. 04, 1999 |
| 09/244,112 | Continuation-in-part of | PCT/US98/16235 | Aug. 04, 1998 |
| 10/100,683 | Continuation-in-part of | 09/774,639 | Feb. 01, 2001 |
| 09/774,639 | Continuation of | 09/244,112 | Feb. 04, 1999 |
| 09/244,112 | Continuation-in-part of | PCT/US98/16235 | Aug. 04, 1998 |
| 10/100,683 | Continuation-in-part of | 09/969,730 | Oct. 04, 2001 |
| 09/969,730 | Non-provisional of | 60/238,291 | Oct. 06, 2000 |
| 10/100,683 | Continuation-in-part of | PCT/US98/16235 | Aug. 04, 1998 |
| PCT/US98/16235 | Non-provisional of | 60/055,386 | Aug. 05, 1997 |
| PCT/US98/16235 | Non-provisional of | 60/054,807 | Aug. 05, 1997 |
| PCT/US98/16235 | Non-provisional of | 60/055,312 | Aug. 05, 1997 |
| PCT/US98/16235 | Non-provisional of | 60/055,309 | Aug. 05, 1997 |
| PCT/US98/16235 | Non-provisional of | 60/054,798 | Aug. 05, 1997 |
| PCT/US98/16235 | Non-provisional of | 60/055,310 | Aug. 05, 1997 |
| PCT/US98/16235 | Non-provisional of | 60/054,806 | Aug. 05, 1997 |
| PCT/US98/16235 | Non-provisional of | 60/054,809 | Aug. 05, 1997 |
| PCT/US98/16235 | Non-provisional of | 60/054,804 | Aug. 05, 1997 |
| PCT/US98/16235 | Non-provisional of | 60/054,803 | Aug. 05, 1997 |
| PCT/US98/16235 | Non-provisional of | 60/054,808 | Aug. 05, 1997 |
| PCT/US98/16235 | Non-provisional of | 60/055,311 | Aug. 05, 1997 |
| PCT/US98/16235 | Non-provisional of | 60/055,986 | Aug. 18, 1997 |
| PCT/US98/16235 | Non-provisional of | 60/055,970 | Aug. 18, 1997 |
| PCT/US98/16235 | Non-provisional of | 60/056,563 | Aug. 19, 1997 |
| PCT/US98/16235 | Non-provisional of | 60/056,557 | Aug. 19, 1997 |
| PCT/US98/16235 | Non-provisional of | 60/056,731 | Aug. 19, 1997 |
| PCT/US98/16235 | Non-provisional of | 60/056,365 | Aug. 19, 1997 |
| PCT/US98/16235 | Non-provisional of | 60/056,367 | Aug. 19, 1997 |
| PCT/US98/16235 | Non-provisional of | 60/056,370 | Aug. 19, 1997 |
| PCT/US98/16235 | Non-provisional of | 60/056,364 | Aug. 19, 1997 |
| PCT/US98/16235 | Non-provisional of | 60/056,366 | Aug. 19, 1997 |
| PCT/US98/16235 | Non-provisional of | 60/056,732 | Aug. 19, 1997 |
| PCT/US98/16235 | Non-provisional of | 60/056,371 | Aug. 19, 1997 |
| 10/100,683 | Continuation-in-part of | 09/716,128 | Nov. 17, 2000 |
| 09/716,128 | Continuation of | 09/251,329 | Feb. 17, 1999 |
| 09/251,329 | Continuation-in-part of | PCT/US98/17044 | Aug. 18, 1998 |
| 10/100,683 | Continuation-in-part of | PCT/US98/17044 | Aug. 18, 1998 |
| PCT/US98/17044 | Non-provisional of | 60/056,555 | Aug. 19, 1997 |
| PCT/US98/17044 | Non-provisional of | 60/056,556 | Aug. 19, 1997 |
| PCT/US98/17044 | Non-provisional of | 60/056,535 | Aug. 19, 1997 |
| PCT/US98/17044 | Non-provisional of | 60/056,629 | Aug. 19, 1997 |
| PCT/US98/17044 | Non-provisional of | 60/056,369 | Aug. 19, 1997 |
| PCT/US98/17044 | Non-provisional of | 60/056,628 | Aug. 19, 1997 |
| PCT/US98/17044 | Non-provisional of | 60/056,728 | Aug. 19, 1997 |
| PCT/US98/17044 | Non-provisional of | 60/056,368 | Aug. 19, 1997 |
| PCT/US98/17044 | Non-provisional of | 60/056,726 | Aug. 19, 1997 |
| PCT/US98/17044 | Non-provisional of | 60/089,510 | Jun. 16, 1998 |
| PCT/US98/17044 | Non-provisional of | 60/092,956 | Jul. 15, 1998 |
| 10/100,683 | Continuation-in-part of | 09/729,835 | Dec. 06, 2000 |
| 09/729,835 | Divisional of | 09/257,179 | Feb. 25, 1999 |
| 09/257,179 | Continuation-in-part of | PCT/US98/17709 | Aug. 27, 1998 |
| 10/100,683 | Continuation-in-part of | 09/257,179 | Feb. 25, 1999 |
| 09/257,179 | Continuation-in-part of | PCT/US98/17709 | Aug. 27, 1998 |
| 10/100,683 | Continuation-in-part of | PCT/US98/17709 | Aug. 27, 1998 |
| PCT/US98/17709 | Non-provisional of | 60/056,270 | Aug. 29, 1997 |
| PCT/US98/17709 | Non-provisional of | 60/056,271 | Aug. 29, 1997 |
| PCT/US98/17709 | Non-provisional of | 60/056,247 | Aug. 29, 1997 |
| PCT/US98/17709 | Non-provisional of | 60/056,073 | Aug. 29, 1997 |
| 10/100,683 | Continuation-in-part of | 10/047,021 | Jan. 17, 2002 |
| 10/047,021 | Continuation-in-part of | 09/722,329 | Nov. 28, 2000 |
| 09/722,329 | Continuation of | 09/262,109 | Mar. 04, 1999 |
| 09/262,109 | Continuation-in-part of | PCT/US98/18360 | Sep. 03, 1998 |
| 10/100,683 | Continuation-in-part of | 09/722,329 | Nov. 28, 2000 |
| 09/722,329 | Continuation of | 09/262,109 | Mar. 04, 1999 |
| 09/262,109 | Continuation-in-part of | PCT/US98/18360 | Sep. 03, 1998 |
| 10/100,683 | Continuation-in-part of | PZ016pct2 | Jan. 17, 2002 |
| PZ016pct2 | Non-provisional of | 60/262,066 | Jan. 18, 2001 |
| 10/100,683 | Continuation-in-part of | PCT/US98/18360 | Sep. 03, 1998 |
| PCT/US98/18360 | Non-provisional of | 60/057,626 | Sep. 05, 1997 |
| PCT/US98/18360 | Non-provisional of | 60/057,663 | Sep. 05, 1997 |
| PCT/US98/18360 | Non-provisional of | 60/057,669 | Sep. 05, 1997 |
| PCT/US98/18360 | Non-provisional of | 60/058,667 | Sep. 12, 1997 |
| PCT/US98/18360 | Non-provisional of | 60/058,974 | Sep. 12, 1997 |
| PCT/US98/18360 | Non-provisional of | 60/058,973 | Sep. 12, 1997 |
| PCT/US98/18360 | Non-provisional of | 60/058,666 | Sep. 12, 1997 |
| PCT/US98/18360 | Non-provisional of | 60/090,112 | Jun. 22, 1998 |
| 10/100,683 | Continuation-in-part of | 09/281,976 | Mar. 31, 1999 |
| 09/281,976 | Continuation-in-part of | PCT/US98/20775 | Oct. 01, 1998 |
| 10/100,683 | Continuation-in-part of | PCT/US98/20775 | Oct. 01, 1998 |
| PCT/US98/20775 | Non-provisional of | 60/060,837 | Oct. 02, 1997 |
| PCT/US98/20775 | Non-provisional of | 60/060,862 | Oct. 02, 1997 |
| PCT/US98/20775 | Non-provisional of | 60/060,839 | Oct. 02, 1997 |
| PCT/US98/20775 | Non-provisional of | 60/060,866 | Oct. 02, 1997 |
| PCT/US98/20775 | Non-provisional of | 60/060,843 | Oct. 02, 1997 |
| PCT/US98/20775 | Non-provisional of | 60/060,836 | Oct. 02, 1997 |
| PCT/US98/20775 | Non-provisional of | 60/060,838 | Oct. 02, 1997 |
| PCT/US98/20775 | Non-provisional of | 60/060,874 | Oct. 02, 1997 |
| PCT/US98/20775 | Non-provisional of | 60/060,833 | Oct. 02, 1997 |
| PCT/US98/20775 | Non-provisional of | 60/060,884 | Oct. 02, 1997 |
| PCT/US98/20775 | Non-provisional of | 60/060,880 | Oct. 02, 1997 |
| 10/100,683 | Continuation-in-part of | 09/984,429 | Oct. 30, 2001 |
| 09/984,429 | Non-provisional of | 60/244,591 | Nov. 01, 2000 |
| 09/984,429 | Continuation-in-part of | 09/288,143 | Apr. 08, 1999 |
| 09/288,143 | Continuation-in-part of | PCT/US98/21142 | Oct. 08, 1998 |
| 10/100,683 | Non-provisional of | 60/244,591 | Nov. 01, 2000 |
| 10/100,683 | Continuation-in-part of | 09/288,143 | Apr. 08, 1999 |
| 09/288,143 | Continuation-in-part of | PCT/US98/21142 | Oct. 08, 1998 |
| 10/100,683 | Continuation-in-part of | PCT/US98/21142 | Oct. 08, 1998 |
| PCT/US98/21142 | Non-provisional of | 60/061,463 | Oct. 09, 1997 |
| PCT/US98/21142 | Non-provisional of | 60/061,529 | Oct. 09, 1997 |
| PCT/US98/21142 | Non-provisional of | 60/071,498 | Oct. 09, 1997 |
| PCT/US98/21142 | Non-provisional of | 60/061,527 | Oct. 09, 1997 |
| PCT/US98/21142 | Non-provisional of | 60/061,536 | Oct. 09, 1997 |
| PCT/US98/21142 | Non-provisional of | 60/061,532 | Oct. 09, 1997 |
| 10/100,683 | Continuation-in-part of | 09/296,622 | Apr. 23, 1999 |
| 09/296,622 | Continuation-in-part of | PCT/US98/22376 | Oct. 23, 1998 |
| 10/100,683 | Continuation-in-part of | PCT/US98/22376 | Oct. 23, 1998 |
| PCT/US98/22376 | Non-provisional of | 60/063,099 | Oct. 24, 1997 |
| PCT/US98/22376 | Non-provisional of | 60/063,088 | Oct. 24, 1997 |
| PCT/US98/22376 | Non-provisional of | 60/063,100 | Oct. 24, 1997 |
| PCT/US98/22376 | Non-provisional of | 60/063,387 | Oct. 24, 1997 |
| PCT/US98/22376 | Non-provisional of | 60/063,148 | Oct. 24, 1997 |
| PCT/US98/22376 | Non-provisional of | 60/063,386 | Oct. 24, 1997 |
| PCT/US98/22376 | Non-provisional of | 60/062,784 | Oct. 24, 1997 |
| PCT/US98/22376 | Non-provisional of | 60/063,091 | Oct. 24, 1997 |
| PCT/US98/22376 | Non-provisional of | 60/063,090 | Oct. 24, 1997 |
| PCT/US98/22376 | Non-provisional of | 60/063,089 | Oct. 24, 1997 |
| PCT/US98/22376 | Non-provisional of | 60/063,092 | Oct. 24, 1997 |
| PCT/US98/22376 | Non-provisional of | 60/063,111 | Oct. 24, 1997 |
| PCT/US98/22376 | Non-provisional of | 60/063,101 | Oct. 24, 1997 |
| PCT/US98/22376 | Non-provisional of | 60/063,109 | Oct. 24, 1997 |
| PCT/US98/22376 | Non-provisional of | 60/063,110 | Oct. 24, 1997 |
| PCT/US98/22376 | Non-provisional of | 60/063,098 | Oct. 24, 1997 |
| PCT/US98/22376 | Non-provisional of | 60/063,097 | Oct. 24, 1997 |
| 10/100,683 | Continuation-in-part of | 09/974,879 | Oct. 12, 2001 |
| 09/974,879 | Non-provisional of | 60/239,893 | Oct. 13, 2000 |
| 09/974,879 | Continuation-in-part of | 09/818,683 | Mar. 28, 2001 |
| 09/818,683 | Continuation of | 09/305,736 | May 05, 1999 |
| 09/305,736 | Continuation-in-part of | PCT/US98/23435 | Nov. 04, 1998 |
| 10/100,683 | Continuation-in-part of | 09/818,683 | Mar. 28, 2001 |
| 09/818,683 | Continuation of | 09/305,736 | May 05, 1999 |
| 09/305,736 | Continuation-in-part of | PCT/US98/23435 | Nov. 04, 1998 |
| 10/100,683 | Continuation-in-part of | 09/305,736 | May 05, 1999 |
| 09/305,736 | Continuation-in-part of | PCT/US98/23435 | Nov. 04, 1998 |
| 10/100,683 | Continuation-in-part of | PCT/US98/23435 | Nov. 04, 1998 |
| PCT/US98/23435 | Non-provisional of | 60/064,911 | Nov. 07, 1997 |
| PCT/US98/23435 | Non-provisional of | 60/064,912 | Nov. 07, 1997 |
| PCT/US98/23435 | Non-provisional of | 60/064,983 | Nov. 07, 1997 |
| PCT/US98/23435 | Non-provisional of | 60/064,900 | Nov. 07, 1997 |
| PCT/US98/23435 | Non-provisional of | 60/064,988 | Nov. 07, 1997 |
| PCT/US98/23435 | Non-provisional of | 60/064,987 | Nov. 07, 1997 |
| PCT/US98/23435 | Non-provisional of | 60/064,908 | Nov. 07, 1997 |
| PCT/US98/23435 | Non-provisional of | 60/064,984 | Nov. 07, 1997 |
| PCT/US98/23435 | Non-provisional of | 60/064,985 | Nov. 07, 1997 |
| PCT/US98/23435 | Non-provisional of | 60/066,094 | Nov. 17, 1997 |
| PCT/US98/23435 | Non-provisional of | 60/066,100 | Nov. 17, 1997 |
| PCT/US98/23435 | Non-provisional of | 60/066,089 | Nov. 17, 1997 |
| PCT/US98/23435 | Non-provisional of | 60/066,095 | Nov. 17, 1997 |
| PCT/US98/23435 | Non-provisional of | 60/066,090 | Nov. 17, 1997 |
| 10/100,683 | Continuation-in-part of | 09/334,595 | Jun. 17, 1999 |
| 09/334,595 | Continuation-in-part of | PCT/US98/27059 | Dec. 17, 1998 |
| 10/100,683 | Continuation-in-part of | PCT/US98/27059 | Dec. 17, 1998 |
| PCT/US98/27059 | Non-provisional of | 60/070,923 | Dec. 18, 1997 |
| PCT/US98/27059 | Non-provisional of | 60/068,007 | Dec. 18, 1997 |
| PCT/US98/27059 | Non-provisional of | 60/068,057 | Dec. 18, 1997 |
| PCT/US98/27059 | Non-provisional of | 60/068,006 | Dec. 18, 1997 |
| PCT/US98/27059 | Non-provisional of | 60/068,369 | Dec. 19, 1997 |
| PCT/US98/27059 | Non-provisional of | 60/068,367 | Dec. 19, 1997 |
| PCT/US98/27059 | Non-provisional of | 60/068,368 | Dec. 19, 1997 |
| PCT/US98/27059 | Non-provisional of | 60/068,169 | Dec. 19, 1997 |
| PCT/US98/27059 | Non-provisional of | 60/068,053 | Dec. 18, 1997 |
| PCT/US98/27059 | Non-provisional of | 60/068,064 | Dec. 18, 1997 |
| PCT/US98/27059 | Non-provisional of | 60/068,054 | Dec. 18, 1997 |
| PCT/US98/27059 | Non-provisional of | 60/068,008 | Dec. 18, 1997 |
| PCT/US98/27059 | Non-provisional of | 60/068,365 | Dec. 19, 1997 |
| 10/100,683 | Continuation-in-part of | 09/938,671 | Aug. 27, 2001 |
| 09/938,671 | Continuation of | 09/739,907 | Dec. 20, 2000 |
| 09/739,907 | Continuation of | 09/348,457 | Jul. 07, 1999 |
| 09/348,457 | Continuation-in-part of | PCT/US99/00108 | Jan. 06, 1999 |
| 10/100,683 | Continuation-in-part of | 09/739,907 | Dec. 20, 2000 |
| 09/739,907 | Continuation of | 09/348,457 | Jul. 07, 1999 |
| 09/348,457 | Continuation-in-part of | PCT/US99/00108 | Jan. 06, 1999 |
| 10/100,683 | Continuation-in-part of | 09/348,457 | Jul. 07, 1999 |
| 09/348,457 | Continuation-in-part of | PCT/US99/00108 | Jan. 06, 1999 |
| 10/100,683 | Continuation-in-part of | PCT/US99/00108 | Jan. 06, 1999 |
| PCT/US99/00108 | Non-provisional of | 60/070,704 | Jan. 07, 1998 |
| PCT/US99/00108 | Non-provisional of | 60/070,658 | Jan. 07, 1998 |
| PCT/US99/00108 | Non-provisional of | 60/070,692 | Jan. 07, 1998 |
| PCT/US99/00108 | Non-provisional of | 60/070,657 | Jan. 07, 1998 |
| 10/100,683 | Continuation-in-part of | 09/949,925 | Sep. 12, 2001 |
| 09/949,925 | Non-provisional of | 60/232,150 | Sep. 12, 2000 |
| 09/949,925 | Continuation-in-part of | PCT/US99/01621 | Jan. 27, 1999 |
| 09/949,925 | Continuation-in-part of | 09/363,044 | Jul. 29, 1999 |
| 09/363,044 | Continuation-in-part of | PCT/US99/01621 | Jan. 27, 1999 |
| 10/100,683 | Continuation-in-part of | 09/813,153 | Mar. 21, 2001 |
| 09/813,153 | Continuation of | 09/363,044 | Jul. 29, 1999 |
| 09/363,044 | Continuation-in-part of | PCT/US99/01621 | Jan. 27, 1999 |
| 10/100,683 | Continuation-in-part of | 09/363,044 | Jul. 29, 1999 |
| 09/363,044 | Continuation-in-part of | PCT/US99/01621 | Jan. 27, 1999 |
| 10/100,683 | Continuation-in-part of | PCT/US99/01621 | Jan. 27, 1999 |
| PCT/US99/01621 | Non-provisional of | 60/073,170 | Jan. 30, 1998 |
| PCT/US99/01621 | Non-provisional of | 60/073,167 | Jan. 30, 1998 |
| PCT/US99/01621 | Non-provisional of | 60/073,165 | Jan. 30, 1998 |
| PCT/US99/01621 | Non-provisional of | 60/073,164 | Jan. 30, 1998 |
| PCT/US99/01621 | Non-provisional of | 60/073,162 | Jan. 30, 1998 |
| PCT/US99/01621 | Non-provisional of | 60/073,161 | Jan. 30, 1998 |
| PCT/US99/01621 | Non-provisional of | 60/073,160 | Jan. 30, 1998 |
| PCT/US99/01621 | Non-provisional of | 60/073,159 | Jan. 30, 1998 |
| 10/100,683 | Continuation-in-part of | 10/062,548 | Feb. 05, 2002 |
| 10/062,548 | Continuation of | 09/369,247 | Aug. 05, 1999 |
| 09/369,247 | Continuation-in-part of | PCT/US99/02293 | Feb. 04, 1999 |
| 10/100,683 | Continuation-in-part of | 09/369,247 | Aug. 05, 1999 |
| 09/369,247 | Continuation-in-part of | PCT/US99/02293 | Feb. 04, 1999 |
| 10/100,683 | Continuation-in-part of | PCT/US99/02293 | Feb. 04, 1999 |
| PCT/US99/02293 | Non-provisional of | 60/074,118 | Feb. 09, 1998 |
| PCT/US99/02293 | Non-provisional of | 60/074,157 | Feb. 09, 1998 |
| PCT/US99/02293 | Non-provisional of | 60/074,037 | Feb. 09, 1998 |
| PCT/US99/02293 | Non-provisional of | 60/074,141 | Feb. 09, 1998 |
| PCT/US99/02293 | Non-provisional of | 60/074,341 | Feb. 09, 1998 |
| 10/100,683 | Continuation-in-part of | 09/716,129 | Nov. 17, 2000 |
| 09/716,129 | Continuation-in-part of | PCT/US99/03939 | Feb. 24, 1999 |
| 09/716,129 | CON | 09/382,572 | Aug. 25, 1999 |
| 09/382,572 | Continuation-in-part of | PCT/US99/03939 | Feb. 24, 1999 |
| 10/100,683 | Continuation-in-part of | PCT/US99/03939 | Feb. 24, 1999 |
| PCT/US99/03939 | Non-provisional of | 60/076,053 | Feb. 26, 1998 |
| PCT/US99/03939 | Non-provisional of | 60/076,051 | Feb. 26, 1998 |
| PCT/US99/03939 | Non-provisional of | 60/076,054 | Feb. 26, 1998 |
| PCT/US99/03939 | Non-provisional of | 60/076,052 | Feb. 26, 1998 |
| PCT/US99/03939 | Non-provisional of | 60/076,057 | Feb. 26, 1998 |
| 10/100,683 | Continuation-in-part of | 09/798,889 | Mar. 06, 2001 |
| 09/798,889 | CON | 09/393,022 | Sep. 09, 1999 |
| 09/393,022 | Continuation-in-part of | PCT/US99/05721 | Mar. 11, 1999 |
| 10/100,683 | Continuation-in-part of | PCT/US99/05721 | Mar. 11, 1999 |
| PCT/US99/05721 | Non-provisional of | 60/077,714 | Mar. 12, 1998 |
| PCT/US99/05721 | Non-provisional of | 60/077,686 | Mar. 12, 1998 |
| PCT/US99/05721 | Non-provisional of | 60/077,687 | Mar. 12, 1998 |
| PCT/US99/05721 | Non-provisional of | 60/077,696 | Mar. 12, 1998 |
| 10/100,683 | Continuation-in-part of | 09/397,945 | Sep. 17, 1999 |
| 09/397,945 | Continuation-in-part of | PCT/US99/05804 | Mar. 18, 1999 |
| 10/100,683 | Continuation-in-part of | PCT/US99/05804 | Mar. 18, 1999 |
| PCT/US99/05804 | Non-provisional of | 60/078,566 | Mar. 19, 1998 |
| PCT/US99/05804 | Non-provisional of | 60/078,576 | Mar. 19, 1998 |
| PCT/US99/05804 | Non-provisional of | 60/078,573 | Mar. 19, 1998 |
| PCT/US99/05804 | Non-provisional of | 60/078,574 | Mar. 19, 1998 |
| PCT/US99/05804 | Non-provisional of | 60/078,579 | Mar. 19, 1998 |
| PCT/US99/05804 | Non-provisional of | 60/080,314 | Apr. 01, 1998 |
| PCT/US99/05804 | Non-provisional of | 60/080,312 | Apr. 01, 1998 |
| PCT/US99/05804 | Non-provisional of | 60/078,578 | Mar. 19, 1998 |
| PCT/US99/05804 | Non-provisional of | 60/078,581 | Mar. 19, 1998 |
| PCT/US99/05804 | Non-provisional of | 60/078,577 | Mar. 19, 1998 |
| PCT/US99/05804 | Non-provisional of | 60/078,563 | Mar. 19, 1998 |
| PCT/US99/05804 | Non-provisional of | 60/080,313 | Apr. 01, 1998 |
| 10/100,683 | Continuation-in-part of | 09/948,783 | Sep. 10, 2001 |
| 09/948,783 | Non-provisional of | 60/231,846 | Sep. 11, 2000 |
| 09/948,783 | Continuation-in-part of | 09/892,877 | Jun. 28, 2001 |
| 09/892,877 | Continuation of | 09/437,658 | Nov. 10, 1999 |
| 09/437,658 | Continuation-in-part of | PCT/US99/09847 | May 06, 1999 |
| 10/100,683 | Continuation-in-part of | 09/892,877 | Jun. 28, 2001 |
| 09/892,877 | Continuation of | 09/437,658 | Nov. 10, 1999 |
| 09/437,658 | Continuation-in-part of | PCT/US99/09847 | May 06, 1999 |
| 10/100,683 | Continuation-in-part of | PCT/US99/09847 | May 06, 1999 |
| PCT/US99/09847 | Non-provisional of | 60/085,093 | May 12, 1998 |
| PCT/US99/09847 | Non-provisional of | 60/085,094 | May 12, 1998 |
| PCT/US99/09847 | Non-provisional of | 60/085,105 | May 12, 1998 |
| PCT/US99/09847 | Non-provisional of | 60/085,180 | May 12, 1998 |
| PCT/US99/09847 | Non-provisional of | 60/085,927 | May 18, 1998 |
| PCT/US99/09847 | Non-provisional of | 60/085,906 | May 18, 1998 |
| PCT/US99/09847 | Non-provisional of | 60/085,920 | May 18, 1998 |
| PCT/US99/09847 | Non-provisional of | 60/085,924 | May 18, 1998 |
| PCT/US99/09847 | Non-provisional of | 60/085,922 | May 18, 1998 |
| PCT/US99/09847 | Non-provisional of | 60/085,923 | May 18, 1998 |
| PCT/US99/09847 | Non-provisional of | 60/085,921 | May 18, 1998 |
| PCT/US99/09847 | Non-provisional of | 60/085,925 | May 18, 1998 |
| PCT/US99/09847 | Non-provisional of | 60/085,928 | May 18, 1998 |
| 10/100,683 | Continuation-in-part of | 10/050,873 | Jan. 18, 2002 |
| 10/050,873 | Non-provisional of | 60/263,681 | Jan. 24, 2001 |
| 10/050,873 | Non-provisional of | 60/263,230 | Jan. 23, 2001 |
| 10/050,873 | Continuation-in-part of | 09/461,325 | Dec. 14, 1999 |
| 09/461,325 | Continuation-in-part of | PCT/US99/13418 | Jun. 15, 1999 |
| 10/100,683 | Continuation-in-part of | 10/012,542 | Dec. 12, 2001 |
| 10/012,542 | Divisional of | 09/461,325 | Dec. 14, 1999 |
| 09/461,325 | Continuation-in-part of | PCT/US99/13418 | Jun. 15, 1999 |
| 10/100,683 | Continuation-in-part of | 09/461,325 | Dec. 14, 1999 |
| 09/461,325 | Continuation-in-part of | PCT/US99/13418 | Jun. 15, 1999 |
| 10/100,683 | Continuation-in-part of | PCT/US99/13418 | Jun. 15, 1999 |
| PCT/US99/13418 | Non-provisional of | 60/089,507 | Jun. 16, 1998 |
| PCT/US99/13418 | Non-provisional of | 60/089,508 | Jun. 16, 1998 |
| PCT/US99/13418 | Non-provisional of | 60/089,509 | Jun. 16, 1998 |
| PCT/US99/13418 | Non-provisional of | 60/089,510 | Jun. 16, 1998 |
| PCT/US99/13418 | Non-provisional of | 60/090,112 | Jun. 22, 1998 |
| PCT/US99/13418 | Non-provisional of | 60/090,113 | Jun. 22, 1998 |
| 10/100,683 | Continuation-in-part of | 09/984,271 | Oct. 29, 2001 |
| 09/984,271 | Divisional of | 09/482,273 | Jan. 13, 2000 |
| 09/482,273 | Continuation-in-part of | PCT/US99/15849 | Jul. 14, 1999 |
| 10/100,683 | Continuation-in-part of | 09/984,276 | Oct. 29, 2001 |
| 09/984,276 | Divisional of | 09/482,273 | Jan. 13, 2000 |
| 09/482,273 | Continuation-in-part of | PCT/US99/15849 | Jul. 14, 1999 |
| 10/100,683 | Continuation-in-part of | 09/482,273 | Jan. 13, 2000 |
| 09/482,273 | Continuation-in-part of | PCT/US99/15849 | Jul. 14, 1999 |
| 10/100,683 | Continuation-in-part of | PCT/US99/15849 | Jul. 14, 1999 |
| PCT/US99/15849 | Non-provisional of | 60/092,921 | Jul. 15, 1998 |
| PCT/US99/15849 | Non-provisional of | 60/092,922 | Jul. 15, 1998 |
| PCT/US99/15849 | Non-provisional of | 60/092,956 | Jul. 15, 1998 |
| 10/100,683 | Continuation-in-part of | PCT/US01/29871 | Sep. 24, 2001 |
| PCT/US01/29871 | Non-provisional of | 60/234,925 | Sep. 25, 2000 |
| PCT/US01/29871 | Continuation-in-part of | PCT/US01/00911 | Jan. 12, 2001 |
| 10/100,683 | Continuation-in-part of | PCT/US01/00911 | Jan. 12, 2001 |
| PCT/US01/00911 | Continuation-in-part of | 09/482,273 | Jan. 13, 2000 |
| 10/100,683 | Non-provisional of | 60/350,898 | Jan. 25, 2002 |
| 10/100,683 | Continuation-in-part of | 09/489,847 | Jan. 24, 2000 |
| 09/489,847 | Continuation-in-part of | PCT/US99/17130 | Jul. 29, 1999 |
| 10/100,683 | Continuation-in-part of | PCT/US99/17130 | Jul. 29, 1999 |
| PCT/US99/17130 | Non-provisional of | 60/094,657 | Jul. 30, 1998 |
| PCT/US99/17130 | Non-provisional of | 60/095,486 | Aug. 05, 1998 |
| PCT/US99/17130 | Non-provisional of | 60/096,319 | Aug. 12, 1998 |
| PCT/US99/17130 | Non-provisional of | 60/095,454 | Aug. 06, 1998 |
| PCT/US99/17130 | Non-provisional of | 60/095,455 | Aug. 06, 1998 |
| 10/100,683 | Continuation-in-part of | 10/054,988 | Jan. 25, 2002 |
| 10/054,988 | Continuation of | 09/904,615 | Jul. 16, 2001 |
| 09/904,615 | Continuation of | 09/739,254 | Dec. 19, 2000 |
| 09/739,254 | Continuation of | 09/511,554 | Feb. 23, 2000 |
| 09/511,554 | Continuation-in-part of | PCT/US99/19330 | Aug. 24, 1999 |
| 10/100,683 | Continuation-in-part of | 09/904,615 | Jul. 16, 2001 |
| 09/904,615 | Continuation of | 09/739,254 | Dec. 19, 2000 |
| 09/739,254 | Continuation of | 09/511,554 | Feb. 23, 2000 |
| 09/511,554 | Continuation-in-part of | PCT/US99/19330 | Aug. 24, 1999 |
| 10/100,683 | Continuation-in-part of | PCT/US99/19330 | Aug. 24, 1999 |
| PCT/US99/19330 | Non-provisional of | 60/097,917 | Aug. 25, 1998 |
| PCT/US99/19330 | Non-provisional of | 60/098,634 | Aug. 31, 1998 |
| 10/100,683 | Continuation-in-part of | 09/820,893 | Mar. 30, 2001 |
| 09/820,893 | Continuation of | 09/531,119 | Mar. 20, 2000 |
| 09/531,119 | Continuation-in-part of | PCT/US99/22012 | Sep. 22, 1999 |
| 10/100,683 | Continuation-in-part of | PCT/US99/22012 | Sep. 22, 1999 |
| PCT/US99/22012 | Non-provisional of | 60/101,546 | Sep. 23, 1998 |
| PCT/US99/22012 | Non-provisional of | 60/102,895 | Oct. 02, 1998 |
| 10/100,683 | Continuation-in-part of | 09/948,820 | Sep. 10, 2001 |
| 09/948,820 | Continuation of | 09/565,391 | May 05, 2000 |
| 09/565,391 | Continuation-in-part of | PCT/US99/26409 | Nov. 09, 1999 |
| 10/100,683 | Continuation-in-part of | 09/565,391 | May 05, 2000 |
| 09/565,391 | Continuation-in-part of | PCT/US99/26409 | Nov. 09, 1999 |
| 10/100,683 | Continuation-in-part of | PCT/US99/26409 | Nov. 09, 1999 |
| PCT/US99/26409 | Non-provisional of | 60/108,207 | Nov. 12, 1998 |
| 10/100,683 | Continuation-in-part of | 09/895,298 | Jul. 02, 2001 |
| 09/895,298 | Continuation of | 09/591,316 | Jun. 09, 2000 |
| 09/591,316 | Continuation-in-part of | PCT/US99/29950 | Dec. 16, 1999 |
| 10/100,683 | Continuation-in-part of | PCT/US99/29950 | Dec. 16, 1999 |
| PCT/US99/29950 | Non-provisional of | 60/113,006 | Dec. 18, 1998 |
| PCT/US99/29950 | Non-provisional of | 60/112,809 | Dec. 17, 1998 |
| 10/100,683 | Continuation-in-part of | 09/985,153 | Nov. 01, 2001 |
| 09/985,153 | Continuation of | 09/618,150 | Jul. 17, 2000 |
| 09/618,150 | Continuation-in-part of | PCT/US00/00903 | Jan. 18, 2000 |
| 10/100,683 | Continuation-in-part of | PCT/US00/00903 | Jan. 18, 2000 |
| PCT/US00/00903 | Non-provisional of | 60/116,330 | Jan. 19, 1999 |
| 10/100,683 | Continuation-in-part of | 09/997,131 | Nov. 30, 2001 |
| 09/997,131 | Continuation of | 09/628,508 | Jul. 28, 2000 |
| 09/628,508 | Continuation-in-part of | PCT/US00/03062 | Feb. 08, 2000 |
| 10/100,683 | Continuation-in-part of | PCT/US00/03062 | Feb. 08, 2000 |
| PCT/US00/03062 | Non-provisional of | 60/119,468 | Feb. 10, 1999 |
| 10/100,683 | Continuation-in-part of | 10/050,882 | Jan. 18, 2002 |
| 10/050,882 | Continuation of | 09/661,453 | Sep. 13, 2000 |
| 09/661,453 | Continuation-in-part of | PCT/US00/06783 | Mar. 16, 2000 |
| 10/100,683 | Continuation-in-part of | 09/661,453 | Sep. 13, 2000 |
| 09/661,453 | Continuation-in-part of | PCT/US00/06783 | Mar. 16, 2000 |
| 10/100,683 | Continuation-in-part of | PCT/US00/06783 | Mar. 16, 2000 |
| PCT/US00/06783 | Non-provisional of | 60/125,055 | Mar. 18, 1999 |
| 10/100,683 | Continuation-in-part of | 10/050,704 | Jan. 18, 2002 |
| 10/050,704 | Continuation of | 09/684,524 | Oct. 10, 2000 |
| 09/684,524 | Continuation-in-part of | PCT/US00/08979 | Apr. 06, 2000 |
| 10/100,683 | Continuation-in-part of | 09/684,524 | Oct. 10, 2000 |
| 09/684,524 | Continuation-in-part of | PCT/US00/08979 | Apr. 06, 2000 |
| 10/100,683 | Continuation-in-part of | PCT/US00/08979 | Apr. 06, 2000 |
| PCT/US00/08979 | Non-provisional of | 60/128,693 | Apr. 09, 1999 |
| PCT/US00/08979 | Non-provisional of | 60/130,991 | Apr. 26, 1999 |
| 10/100,683 | Continuation-in-part of | 10/042,141 | Jan. 11, 2002 |
| 10/042,141 | Continuation of | 09/726,643 | Dec. 01, 2000 |
| 09/726,643 | Continuation-in-part of | PCT/US00/15187 | Jun. 02, 2000 |
| 10/100,683 | Continuation-in-part of | 09/726,643 | Dec. 01, 2000 |
| 09/726,643 | Continuation-in-part of | PCT/US00/15187 | Jun. 02, 2000 |
| 10/100,683 | Continuation-in-part of | PCT/US00/15187 | Jun. 02, 2000 |
| PCT/US00/15187 | Non-provisional of | 60/137,725 | Jun. 07, 1999 |
| 10/100,683 | Continuation-in-part of | 09/756,168 | Jan. 09, 2001 |
| 09/756,168 | Continuation-in-part of | PCT/US00/19735 | Jul. 23, 1999 |
| 10/100,683 | Continuation-in-part of | PCT/US00/19735 | Jul. 20, 2000 |
| PCT/US00/19735 | Non-provisional of | 60/145,220 | Jul. 23, 1999 |
| 10/100,683 | Continuation-in-part of | PZ042P1C1 | Feb. 01, 2002 |
| PZ042P1C1 | Continuation of | 09/781,417 | Feb. 13, 2001 |
| 09/781,417 | Continuation-in-part of | PCT/US00/22325 | Aug. 16, 2000 |
| 10/100,683 | Continuation-in-part of | 09/781,417 | Feb. 13, 2001 |
| 09/781,417 | Continuation-in-part of | PCT/US00/22325 | Aug. 16, 2000 |
| 10/100,683 | Continuation-in-part of | PCT/US00/22325 | Aug. 16, 2000 |
| PCT/US00/22325 | Non-provisional of | 60/149,182 | Aug. 17, 1999 |
| 10/100,683 | Continuation-in-part of | 09/789,561 | Feb. 22, 2001 |
| 09/789,561 | Continuation-in-part of | PCT/US00/24008 | Aug. 31, 2000 |
| 10/100,683 | Continuation-in-part of | PCT/US00/24008 | Aug. 31, 2000 |
| PCT/US00/24008 | Non-provisional of | 60/152,315 | Sep. 03, 1999 |
| PCT/US00/24008 | Non-provisional of | 60/152,317 | Sep. 03, 1999 |
| 10/100,683 | Continuation-in-part of | 09/800,729 | Mar. 08, 2001 |
| 09/800,729 | Continuation-in-part of | PCT/US00/26013 | Sep. 22, 2000 |
| 10/100,683 | Continuation-in-part of | PCT/US00/26013 | Sep. 22, 2000 |
| PCT/US00/26013 | Non-provisional of | 60/155,709 | Sep. 24, 1999 |
| 10/100,683 | Continuation-in-part of | 09/832,129 | Apr. 11, 2001 |
| 09/832,129 | Continuation-in-part of | PCT/US00/28664 | Oct. 17, 2000 |
| 10/100,683 | Continuation-in-part of | PCT/US00/28664 | Oct. 17, 2000 |
| PCT/US00/28664 | Non-provisional of | 60/163,085 | Nov. 02, 1999 |
| PCT/US00/28664 | Non-provisional of | 60/172,411 | Dec. 17, 1999 |
| 10/100,683 | Continuation-in-part of | PCT/US00/29363 | Oct. 25, 2000 |
| PCT/US00/29363 | Non-provisional of | 60/215,139 | Jun. 30, 2000 |
| PCT/US00/29363 | Non-provisional of | 60/162,239 | Oct. 29, 1999 |
| 10/100,683 | Continuation-in-part of | PCT/US00/29360 | Oct. 25, 2000 |
| PCT/US00/29360 | Non-provisional of | 60/215,138 | Jun. 30, 2000 |
| PCT/US00/29360 | Non-provisional of | 60/162,211 | Oct. 29, 1999 |
| 10/100,683 | Continuation-in-part of | PCT/US00/29362 | Oct. 25, 2000 |
| PCT/US00/29362 | Non-provisional of | 60/215,131 | Jun. 30, 2000 |
| PCT/US00/29362 | Non-provisional of | 60/162,240 | Oct. 29, 1999 |
| 10/100,683 | Continuation-in-part of | PCT/US00/29365 | Oct. 25, 2000 |
| PCT/US00/29365 | Non-provisional of | 60/219,666 | Jul. 21, 2000 |
| PCT/US00/29365 | Non-provisional of | 60/162,237 | Oct. 29, 1999 |
| 10/100,683 | Continuation-in-part of | PCT/US00/29364 | Oct. 25, 2000 |
| PCT/US00/29364 | Non-provisional of | 60/215,134 | Jun. 30, 2000 |
| PCT/US00/29364 | Non-provisional of | 60/162,238 | Oct. 29, 1999 |
| 10/100,683 | Continuation-in-part of | PCT/US00/30040 | Nov. 01, 2000 |
| PCT/US00/30040 | Non-provisional of | 60/215,130 | Jun. 30, 2000 |
| PCT/US00/30040 | Non-provisional of | 60/163,580 | Nov. 05, 1999 |
| 10/100,683 | Continuation-in-part of | PCT/US00/30037 | Nov. 01, 2000 |
| PCT/US00/30037 | Non-provisional of | 60/215,137 | Jun. 30, 2000 |
| PCT/US00/30037 | Non-provisional of | 60/163,577 | Nov. 05, 1999 |
| 10/100,683 | Continuation-in-part of | PCT/US00/30045 | Nov. 01, 2000 |
| PCT/US00/30045 | Non-provisional of | 60/215,133 | Jun. 30, 2000 |
| PCT/US00/30045 | Non-provisional of | 60/163,581 | Nov. 05, 1999 |
| 10/100,683 | Continuation-in-part of | PCT/US00/30036 | Nov. 01, 2000 |
| PCT/US00/30036 | Non-provisional of | 60/221,366 | Jul. 27, 2000 |
| PCT/US00/30036 | Non-provisional of | 60/163,576 | Nov. 05, 1999 |
| 10/100,683 | Continuation-in-part of | PCT/US00/30039 | Nov. 01, 2000 |
| PCT/US00/30039 | Non-provisional of | 60/221,367 | Jul. 27, 2000 |
| PCT/US00/30039 | Non-provisional of | 60/195,296 | Apr. 07, 2000 |
| PCT/US00/30039 | Non-provisional of | 60/164,344 | Nov. 09, 1999 |
| 10/100,683 | Continuation-in-part of | PCT/US00/30654 | Nov. 08, 2000 |
| PCT/US00/30654 | Non-provisional of | 60/221,142 | Jul. 27, 2000 |
| PCT/US00/30654 | Non-provisional of | 60/164,835 | Nov. 12, 1999 |
| 10/100,683 | Continuation-in-part of | PCT/US00/30628 | Nov. 08, 2000 |
| PCT/US00/30628 | Non-provisional of | 60/215,140 | Jun. 30, 2000 |
| PCT/US00/30628 | Non-provisional of | 60/164,744 | Nov. 12, 1999 |
| 10/100,683 | Continuation-in-part of | PCT/US00/30653 | Nov. 08, 2000 |
| PCT/US00/30653 | Non-provisional of | 60/221,193 | Jul. 27, 2000 |
| PCT/US00/30653 | Non-provisional of | 60/164,735 | Nov. 12, 1999 |
| 10/100,683 | Continuation-in-part of | PCT/US00/30629 | Nov. 08, 2000 |
| PCT/US00/30629 | Non-provisional of | 60/222,904 | Aug. 03, 2000 |
| PCT/US00/30629 | Non-provisional of | 60/164,825 | Nov. 12, 1999 |
| 10/100,683 | Continuation-in-part of | PCT/US00/30679 | Nov. 08, 2000 |
| PCT/US00/30679 | Non-provisional of | 60/224,007 | Aug. 04, 2000 |
| PCT/US00/30679 | Non-provisional of | 60/164,834 | Nov. 12, 1999 |
| 10/100,683 | Continuation-in-part of | PCT/US00/30674 | Nov. 08, 2000 |
| PCT/US00/30674 | Non-provisional of | 60/215,128 | Jun. 30, 2000 |
| PCT/US00/30674 | Non-provisional of | 60/164,750 | Nov. 12, 1999 |
| 10/100,683 | Continuation-in-part of | PCT/US00/31162 | Nov. 15, 2000 |
| 60/215,136 | Non-provisional of | 60/215,136 | Jun. 30, 2000 |
| 60/215,136 | Non-provisional of | 60/166,415 | Nov. 19, 1999 |
| 10/100,683 | Continuation-in-part of | PCT/US00/31282 | Nov. 15, 2000 |
| PCT/US00/31282 | Non-provisional of | 60/219,665 | Jul. 21, 2000 |
| PCT/US00/31282 | Non-provisional of | 60/166,414 | Nov. 19, 1999 |
| 10/100,683 | Continuation-in-part of | PCT/US00/30657 | Nov. 08, 2000 |
| PCT/US00/30657 | Non-provisional of | 60/215,132 | Jun. 30, 2000 |
| PCT/US00/30657 | Non-provisional of | 60/164,731 | Nov. 12, 1999 |
| 10/100,683 | Continuation-in-part of | PCT/US01/01396 | Jan. 17, 2001 |
| 60/256,968 | Non-provisional of | 60/256,968 | Dec. 21, 2000 |
| 60/256,968 | Non-provisional of | 60/226,280 | Aug. 18, 2000 |
| 10/100,683 | Continuation-in-part of | PCT/US01/01387 | Jan. 17, 2001 |
| 60/259,803 | Non-provisional of | 60/259,803 | Jan. 05, 2001 |
| 60/259,803 | Non-provisional of | 60/226,380 | Aug. 18, 2000 |
| 10/100,683 | Continuation-in-part of | PCT/US01/01567 | Jan. 17, 2001 |
| PCT/US01/01567 | Non-provisional of | 60/228,084 | Aug. 28, 2000 |
| 10/100,683 | Continuation-in-part of | PCT/US01/01431 | Jan. 17, 2001 |
| PCT/US01/01431 | Non-provisional of | 60/231,968 | Sep. 12, 2000 |
| PCT/US01/01431 | Continuation-in-part of | 09/915,582 | Jul. 27, 2001 |
| 10/100,683 | Continuation-in-part of | PCT/US01/01432 | Jan. 17, 2001 |
| PCT/US01/01432 | Non-provisional of | 60/236,326 | Sep. 29, 2000 |
| 10/100,683 | Continuation-in-part of | PCT/US01/00544 | Jan. 09, 2001 |
| PCT/US01/00544 | Non-provisional of | 60/234,211 | Sep. 20, 2000 |
| 10/100,683 | Continuation-in-part of | PCT/US01/01435 | Jan. 17, 2001 |
| PCT/US01/01435 | Non-provisional of | 60/226,282 | Aug. 18, 2000 |
| 10/100,683 | Continuation-in-part of | PCT/US01/01386 | Jan. 17, 2001 |
| PCT/US01/01386 | Non-provisional of | 60/232,104 | Sep. 12, 2000 |
| 10/100,683 | Continuation-in-part of | PCT/US01/01565 | Jan. 17, 2001 |
| PCT/US01/01565 | Non-provisional of | 60/234,210 | Sep. 20, 2000 |
| 10/100,683 | Continuation-in-part of | PCT/US01/01394 | Jan. 17, 2001 |
| PCT/US01/01394 | Non-provisional of | 60/259,805 | Jan. 05, 2001 |
| PCT/US01/01394 | Non-provisional of | 60/226,278 | Aug. 18, 2000 |
| 10/100,683 | Continuation-in-part of | PCT/US01/01434 | Jan. 17, 2001 |
| PCT/US01/01434 | Non-provisional of | 60/259,678 | Jan. 05, 2001 |
| PCT/US01/01434 | Non-provisional of | 60/226,279 | Aug. 18, 2000 |
| 10/100,683 | Continuation-in-part of | PCT/US01/01397 | Jan. 17, 2001 |
| PCT/US01/01397 | Non-provisional of | 60/226,281 | Aug. 18, 2000 |
| 10/100,683 | Continuation-in-part of | PCT/US01/01385 | Jan. 17, 2001 |
| PCT/US01/01385 | Non-provisional of | 60/231,969 | Sep. 12, 2000 |
| 10/100,683 | Continuation-in-part of | PCT/US01/01384 | Jan. 17, 2001 |
| PCT/US01/01384 | Non-provisional of | 60/259,516 | Jan. 04, 2001 |
| PCT/US01/01384 | Non-provisional of | 60/228,086 | Aug. 28, 2000 |
| 10/100,683 | Continuation-in-part of | PCT/US01/01383 | Jan. 17, 2001 |
| PCT/US01/01383 | Non-provisional of | 60/259,804 | Jan. 05, 2001 |
| PCT/US01/01383 | Non-provisional of | 60/228,083 | Aug. 28, 2000 |
| 10/100,683 | Continuation-in-part of | PCT/US02/05064 | Feb. 21, 2002 |
| PCT/US02/05064 | Non-provisional of | 60/304,444 | Jul. 12, 2001 |
| PCT/US02/05064 | Non-provisional of | 60/270,658 | Feb. 23, 2001 |
| 10/100,683 | Continuation-in-part of | PCT/US02/05301 | Feb. 21, 2002 |
| PCT/US02/05301 | Non-provisional of | 60/304,417 | Jul. 12, 2001 |
| PCT/US02/05301 | Non-provisional of | 60/270,625 | Feb. 23, 2001 |
| 10/100,683 | Non-provisional of | 60/304,121 | Jul. 11, 2001 |
| 10/100,683 | Non-provisional of | 60/295,869 | Jun. 06, 2001 |
| 10/100,683 | Non-provisional of | 60/325,209 | Sep. 28, 2001 |
| 10/100,683 | Non-provisional of | 60/311,085 | Aug. 10, 2001 |
| 10/100,683 | Non-provisional of | 60/330,629 | Oct. 26, 2001 |
| 10/100,683 | Non-provisional of | 60/331,046 | Nov. 07, 2001 |
| 10/100,683 | Non-provisional of | 60/358,554 | Feb. 22, 2002 |
| 10/100,683 | Non-provisional of | 60/358,714 | Feb. 25, 2002 |

; wherein each of the above applications are all herein incorporated by reference in their entirety.

### FIELD OF THE INVENTION

[0002] The present invention relates to human secreted proteins/polypeptides, and isolated nucleic acid molecules encoding said proteins/polypeptides, useful for detecting, preventing, diagnosing, prognosticating, treating, and/or ameliorating cancer and other hyperproliferative disorders. Antibodies that bind these polypeptides are also encompassed by the present invention. Also encompassed by the invention are vectors, host cells, and recombinant and synthetic methods for producing said polynucleotides, polypeptides, and/or antibodies. The invention further encompasses screening methods for identifying agonists and antagonists of polynucleotides and polypeptides of the invention. The present invention further encompasses methods and compositions for inhibiting or enhancing the production and function of the polypeptides of the present invention.

### BACKGROUND OF THE INVENTION

[0003] Cancer and other hyperproliferative disorders are a diverse group of disorders and diseases sharing one characteristic in common; all result from uncontrolled cell proliferation. The human body is composed of many different cell types, e.g. liver cells, muscle cells, brain cells, etc. Normally, these cells grow and divide to produce more cells only as the body needs them (e.g. to regenerate blood cells or replace epithelial cells lining the stomach). Sometimes, however, cells begin to divide unchecked even though new cells are not needed. These extra cells accumulate and form a mass of tissue, called a tumor. Although each of the over 200 cell types in the body can potentially become cancerous, some cell types become cancerous at relatively high rates while many other cell types rarely become cancerous.

[0004] Tumors are either benign or malignant. Benign tumors are not cancerous; they can usually be removed, they do not spread to other parts of the body and, they rarely threaten life. Malignant tumors, however, are cancerous. Cells in malignant tumors can invade and damage nearby or distant tissues and organs. The spread of cancerous cells is called metastasis. Malignant (or metastatic) cells can invade adjacent organs by proliferating directly from the primary tumor. Additionally, malignant cells can also metastasize to distant organs by breaking away from the primary tumor, entering the bloodstream or lymphatic system, and settling down in a new organ or tissue to produce a secondary tumor. The origin of secondary tumors is established by comparing cells comprising these tumors to cells in the original (primary) tumor.

[0005] In contrast to solid organ cancers (such as cancer in the liver, lung, and brain) cancer can also develop in blood-forming cells. These cancers are referred to as leukemias or lymphomas. Leukemia refers to cancer of blood forming cells such as red blood cells, platelets, and plasma cells. Lymphomas are a subset of leukemias, primarily involving white blood cells, in which the cancerous cells originated in, or are associated with, the lymph system and lymph organs (e.g. T-lymphocytes in the lymph nodes, spleen, or thymus).

[0006] In 1999 over 1.1 million people were newly diagnosed with 23 different types of cancer. The vast majority of these cases (˜75%) involved cancers of the prostate, breast, lung, colon, or urinary tract, or non-Hodgkin's lymphoma. Among the most fatal cancers are pancreatic, liver, esophageal, lung, stomach, and brain cancers, having up to 96% mortality rates depending on the specific cancer. In all, some 23 different types of cancer are expected to kill over 86,000 people each year.

[0007] Most cancers are treated with one or a combination therapies consisting of surgery, radiation therapy, chemotherapy, hormone therapy, and/or biological therapy. These five therapeutic modes are either local or systemic treatment strategies. Local treatments affect cancer cells in the tumor and imediately adjacent areas (for example, surgical tumor removal is a local treatment as are most radiation treatments). In contrast, systemic treatments travel through the bloodstream, and reach cancer and other cells all over the body. Chemotherapy, hormone therapy, and biological therapy are examples of systemic treatments.

[0008] Whether systemic or local, it is often difficult or impossible to protect healthy cells from the harmful effects of cancer treatment; healthy cells and tissues are inevitably damaged in the process of treating the cancerous cells. Damage and disruption of the normal functioning of healthy cells and tissues often produces the undesirable side effects experienced by patients undergoing cancer treatment.

[0009] Recombinant polypeptides and polynucleotides derived from naturally occurring molecules, as well as antibodies specifically targeted to these molecules, used alone or in conjunction with other existing therapies, hold great promise as improved therapeutic agents for the treatment of neoplastic disorders. Currently, most biological therapy can be classified as immunotherapy because these treatments often use naturally occurring molecules to assist the body's immune system in fighting the disease or in protecting the body from side effects of other cancer treatment(s). Among the most commonly used compounds in biological therapies are proteins called cytokines (e.g. interferons, interleukins, and colony stimulating factors) and monoclonal antibodies (targeted to particular cancer cells). Side effects caused by these commonly used biological therapies range from flu-like symptoms (chills, fever, muscle aches, weakness, loss of appetite, nausea, vomiting, and diarrhea) to rashes, swelling, easy bruising, or bleeding.

[0010] The discovery of human secreted proteins associated with initiation, progression, characterization, and/or distinction of neoplastic diseases (including antibodies that immunospecifically bind these polypeptides), satisfies a need in the art by providing new compositions useful in the detection, prevention, diagnosis, treatment, prevention, prognosis, and treatment of hyperproliferative disorders.

### SUMMARY OF THE INVENTION

[0011] The present invention encompasses human secreted proteins/polypeptides, and isolated nucleic acid molecules encoding said proteins/polypeptides, useful for detecting, preventing, diagnosing, prognosticating, treating, and/or ameliorating cancer and other hyperproliferative disorders. Antibodies that bind these polypeptides are also encompassed by the present invention; as are vectors, host cells, and recombinant and synthetic methods for producing said polynucleotides, polypeptides, and/or antibodies. The invention further encompasses screening methods for identifying agonists and antagonists of polynucleotides and polypeptides of the invention. The present invention also encompasses methods and compositions for inhibiting or enhancing the production and function of the polypeptides of the present invention.

### DETAILED DESCRIPTION

Polynucleotides and Polypeptides of the Invention

Description of Table 1A

[0012] Table 1A summarizes information concerning certain polypnucleotides and polypeptides of the invention. The first column provides the gene number in the application for each clone identifier. The second column provides a unique clone identifier, “Clone ID:”, for a cDNA clone related to each contig sequence disclosed in Table 1A. Third column, the cDNA Clones identified in the second column were deposited as indicated in the third column (i.e. by ATCC Deposit No:Z and deposit date). Some of the deposits contain multiple different clones corresponding to the same gene. In the fourth column, “Vector” refers to the type of vector contained in the corresponding cDNA Clone identified in the second column. In the fifth column, the nucleotide sequence identified as “NT SEQ ID NO:X” was assembled from partially homologous (“overlapping”) sequences obtained from the corresponding cDNA clone identified in the second column and, in some cases, from additional related cDNA clones. The overlapping sequences were assembled into a single contiguous sequence of high redundancy (usually three to five overlapping sequences at each nucleotide position), resulting in a final sequence identified as SEQ ID NO:X. In the sixth column, “Total NT Seq.” refers to the total number of nucleotides in the contig sequence identified as SEQ ID NO:X.” The deposited clone may contain all or most of these sequences, reflected by the nucleotide position indicated as “5′ NT of Clone Seq.” (seventh column) and the “3′ NT of Clone Seq.” (eighth column) of SEQ ID NO:X. In the ninth column, the nucleotide position of SEQ ID NO:X of the putative start codon (methionine) is identified as “5′ NT of Start Codon.” Similarly, in column ten, the nucleotide position of SEQ ID NO:X of the predicted signal sequence is identified as “5′ NT of First AA of Signal Pep.” In the eleventh column, the translated amino acid sequence, beginning with the methionine, is identified as “AA SEQ ID NO:Y,” although other reading frames can also be routinely translated using known molecular biology techniques. The polypeptides produced by these alternative open reading frames are specifically contemplated by the present invention.

[0013] In the twelfth and thirteenth columns of Table 1A, the first and last amino acid position of SEQ ID NO:Y of the predicted signal peptide is identified as “First AA of Sig Pep” and “Last AA of Sig Pep.” In the fourteenth column, the predicted first amino acid position of SEQ ID NO:Y of the secreted portion is identified as “Predicted First AA of Secreted Portion”. The amino acid position of SEQ ID NO:Y of the last amino acid encoded by the open reading frame is identified in the fifteenth column as “Last AA of ORF”.

[0014] SEQ ID NO:X (where X may be any of the polynucleotide sequences disclosed in the sequence listing) and the translated SEQ ID NO:Y (where Y may be any of the polypeptide sequences disclosed in the sequence listing) are sufficiently accurate and otherwise suitable for a variety of uses well known in the art and described further below. For instance, SEQ ID NO:X is useful for designing nucleic acid hybridization probes that will detect nucleic acid sequences contained in SEQ ID NO:X or the cDNA contained in the deposited clone. These probes will also hybridize to nucleic acid molecules in biological samples, thereby enabling a variety of forensic and diagnostic methods of the invention. Similarly, polypeptides identified from SEQ ID NO:Y may be used, for example, to generate antibodies which bind specifically to proteins containing the polypeptides and the secreted proteins encoded by the cDNA clones identified in Table 1A and/or elsewhere herein

[0015] Nevertheless, DNA sequences generated by sequencing reactions can contain sequencing errors. The errors exist as misidentified nucleotides, or as insertions or deletions of nucleotides in the generated DNA sequence. The erroneously inserted or deleted nucleotides cause frame shifts in the reading frames of the predicted amino acid sequence. In these cases, the predicted amino acid sequence diverges from the actual amino acid sequence, even though the generated DNA sequence may be greater than 99.9% identical to the actual DNA sequence (for example, one base insertion or deletion in an open reading frame of over 1000 bases).

[0016] Accordingly, for those applications requiring precision in the nucleotide sequence or the amino acid sequence, the present invention provides not only the generated nucleotide sequence identified as SEQ ID NO:X, and the predicted translated amino acid sequence identified as SEQ ID NO:Y, but also a sample of plasmid DNA containing a human cDNA of the invention deposited with the ATCC, as set forth in Table 1A. The nucleotide sequence of each deposited plasmid can readily be determined by sequencing the deposited plasmid in accordance with known methods

[0017] The predicted amino acid sequence can then be verified from such deposits. Moreover, the amino acid sequence of the protein encoded by a particular plasmid can also be directly determined by peptide sequencing or by expressing the protein in a suitable host cell containing the deposited human cDNA, collecting the protein, and determining its sequence.

[0018] Also provided in Table 1A is the name of the vector which contains the cDNA plasmid. Each vector is routinely used in the art. The following additional information is provided for convenience.

[0019] Vectors Lambda Zap (U.S. Pat. Nos. 5,128,256 and 5,286,636), Uni-Zap XR (U.S. Pat. Nos. 5,128,256 and 5,286,636), Zap Express (U.S. Pat. Nos. 5,128,256 and 5,286,636), pBluescript (pBS) (Short, J. M. et al., Nucleic Acids Res. 16:7583-7600 (1988); Alting-Mees, M. A. and Short, J. M., Nucleic Acids Res. 17:9494 (1989)) and pBK (Alting-Mees, M. A. et al., Strategies 5:58-61 (1992)) are commercially available from Stratagene Cloning Systems, Inc., 11011 N. Torrey Pines Road, La Jolla, Calif., 92037. pBS contains an ampicillin resistance gene and pBK contains a neomycin resistance gene. Phagemid pBS may be excised from the Lambda Zap and Uni-Zap XR vectors, and phagemid pBK may be excised from the Zap Express vector. Both phagemids may be transformed into E. coli strain XL-1 Blue, also available from Stratagene

[0020] Vectors pSport1, pCMVSport 1.0, pCMVSport 2.0 and pCMVSport 3.0, were obtained from Life Technologies, Inc., P.O. Box 6009, Gaithersburg, Md. 20897. All Sport vectors contain an ampicillin resistance gene and may be transformed into E. coli strain DH10B, also available from Life Technologies. See, for instance, Gruber, C. E., et al., Focus 15:59 (1993). Vector lafmid BA (Bento Soares, Columbia University, New York, N.Y.) contains an ampicillin resistance gene and can be transformed into E. coli strain XL-1 Blue. Vector pCR®2.1, which is available from Invitrogen, 1600 Faraday Avenue, Carlsbad, Calif. 92008, contains an ampicillin resistance gene and may be transformed into E. coli strain DH10B, available from Life Technologies. See, for instance, Clark, J. M., Nuc. Acids Res. 16:9677-9686 (1988) and Mead, D. et al., Bio/Technology 9: (1991).

[0021] The present invention also relates to the genes corresponding to SEQ ID NO:X, SEQ ID NO:Y, and/or a deposited cDNA (cDNA Clone ID). The corresponding gene can be isolated in accordance with known methods using the sequence information disclosed herein. Such methods include, but are not limited to, preparing probes or primers from the disclosed sequence and identifying or amplifying the corresponding gene from appropriate sources of genomic material.

[0022] Also provided in the present invention are allelic variants, orthologs, and/or species homologs. Procedures known in the art can be used to obtain full-length genes, allelic variants, splice variants, full-length coding portions, orthologs, and/or species homologs of genes corresponding to SEQ ID NO:X and SEQ ID NO:Y using information from the sequences disclosed herein or the clones deposited with the ATCC. For example, allelic variants and/or species homologs may be isolated and identified by making suitable probes or primers from the sequences provided herein and screening a suitable nucleic acid source for allelic variants and/or the desired homologue.

[0023] The present invention provides a polynucleotide comprising, or alternatively consisting of, the nucleic acid sequence of SEQ ID NO:X and/or a cDNA contained in ATCC Deposit No.Z. The present invention also provides a polypeptide comprising, or alternatively, consisting of, the polypeptide sequence of SEQ ID NO:Y, a polypeptide encoded by SEQ ID NO:X, and/or a polypeptide encoded by a cDNA contained in ATCC deposit No.Z. Polynucleotides encoding a polypeptide comprising, or alternatively consisting of the polypeptide sequence of SEQ ID NO:Y, a polypeptide encoded by SEQ ID NO:X and/or a polypeptide encoded by the cDNA contained in ATCC Deposit No.Z, are also encompassed by the invention. The present invention further encompasses a polynucleotide comprising, or alternatively consisting of the complement of the nucleic acid sequence of SEQ ID NO:X, and/or the complement of the coding strand of the cDNA contained in ATCC Deposit No.Z.

Description of Table 1B (Comprised of Tables 1B.1 and 1B.2)

[0024] Table 1B.1 and Table 1B.2 summarize some of the polynucleotides encompassed by the invention (including cDNA clones related to the sequences (Clone ID:), contig sequences (contig identifier (Contig ID:) and contig nucleotide sequence identifiers (SEQ ID NO:X)) and further summarizes certain characteristics of these polynucleotides and the polypeptides encoded thereby. The first column of Tables 1B.1 and 1B.2 provide the gene numbers in the application for each clone identifier. The second column of Tables 1B.1 and 1B.2 provide unique clone identifiers, “Clone ID:”, for cDNA clones related to each contig sequence disclosed in Table 1A and/or Table 1B. The third column of Tables 1B.1 and 1B.2 provide unique contig identifiers, “Contig ID:” for each of the contig sequences disclosed in these tables. The fourth column of Tables 1B.1 and 1B.2 provide the sequence identifiers, “SEQ ID NO:X”, for each of the contig sequences disclosed in Table 1A and/or 1B.

[0025] Table 1B.1

[0026] The fifth column of Table 1B.1, “ORF (From-To)”, provides the location (i.e., nucleotide position numbers) within the polynucleotide sequence of SEQ ID NO:X that delineates the preferred open reading frame (ORF) that encodes the amino acid sequence shown in the sequence listing and referenced in Table 1B.1 as SEQ ID NO:Y (column 6). Column 7 of Table 1B.1 lists residues comprising predicted epitopes contained in the polypeptides encoded by each of the preferred ORFs (SEQ ID NO:Y). Identification of potential immunogenic regions was performed according to the method of Jameson and Wolf (CABIOS, 4; 181-186 (1988)); specifically, the Genetics Computer Group (GCG) implementation of this algorithm, embodied in the program PEPTIDESTRUCTURE (Wisconsin Package v10.0, Genetics Computer Group (GCG), Madison, Wis.). This method returns a measure of the probability that a given residue is found on the surface of the protein. Regions where the antigenic index score is greater than 0.9 over at least 6 amino acids are indicated in Table 1B.1 as “Predicted Epitopes”. In particular embodiments, polypeptides of the invention comprise, or alternatively consist of, one, two, three, four, five or more of the predicted epitopes described in Table 1B.1. It will be appreciated that depending on the analytical criteria used to predict antigenic determinants, the exact address of the determinant may vary slightly. Column 8 of Table 1B.1 (“Tissue Distribution”) is described below in Table 1B.2 Column 5. Column 9 of Table 1B.1 (“Cytologic Band”) provides the chromosomal location of polynucleotides corresponding to SEQ ID NO:X. Chromosomal location was determined by finding exact matches to EST and cDNA sequences contained in the NCBI (National Center for Biotechnology Information) UniGene database. Given a presumptive chromosomal location, disease locus association was determined by comparison with the Morbid Map, derived from Online Mendelian Inheritance in Man (Online Mendelian Inheritance in Man, OMIM™. McKusick-Nathans Institute for Genetic Medicine, Johns Hopkins University (Baltimore, Md.) and National Center for Biotechnology Information, National Library of Medicine (Bethesda, Md.) 2000. World Wide Web URL: http://www.ncbi.nlm.nih.gov/omim/). If the putative chromosomal location of the Query overlaps with the chromosomal location of a Morbid Map entry, an OMIM identification number is disclosed in Table 1B.1, column 9 labeled “OMIM Disease Reference(s)”. A key to the OMIM reference identification numbers is provided in Table 5.

[0027] Table 1B.2

[0028] Column 5 of Table 1B.2, “Tissue Distribution” shows the expression profile of tissue, cells, and/or cell line libraries which express the polynucleotides of the invention. The first code number shown in Table 1B.2 column 5 (preceding the colon), represents the tissue/cell source identifier code corresponding to the key provided in Table 4. Expression of these polynucleotides was not observed in the other tissues and/or cell libraries tested. The second number in column 5 (following the colon), represents the number of times a sequence corresponding to the reference polynucleotide sequence (e.g., SEQ ID NO:X) was identified in the corresponding tissue/cell source. Those tissue/cell source identifier codes in which the first two letters are “AR” designate information generated using DNA array technology. Utilizing this technology, cDNAs were amplified by PCR and then transferred, in duplicate, onto the array. Gene expression was assayed through hybridization of first strand cDNA probes to the DNA array. cDNA probes were generated from total RNA extracted from a variety of different tissues and cell lines. Probe synthesis was performed in the presence of ³³P dCTP, using oligo(dT) to prime reverse transcription. After hybridization, high stringency washing conditions were employed to remove non-specific hybrids from the array. The remaining signal, emanating from each gene target, was measured using a Phosphorimager. Gene expression was reported as Phosphor Stimulating Luminescence (PSL) which reflects the level of phosphor signal generated from the probe hybridized to each of the gene targets represented on the array. A local background signal subtraction was performed before the total signal generated from each array was used to normalize gene expression between the different hybridizations. The value presented after “[array code]:” represents the mean of the duplicate values, following background subtraction and probe normalization. One of skill in the art could routinely use this information to identify normal and/or diseased tissue(s) which show a predominant expression pattern of the corresponding polynucleotide of the invention or to identify polynucleotides which show predominant and/or specific tissue and/or cell expression.

[0029] Description of Table 1C

[0030] Table 1C summarizes additional polynucleotides encompassed by the invention (including cDNA clones related to the sequences (Clone ID:), contig sequences (contig identifier (Contig ID:) contig nucleotide sequence identifiers (SEQ ID NO:X)), and genomic sequences (SEQ ID NO:B). The first column provides a unique clone identifier, “Clone ID:”, for a cDNA clone related to each contig sequence. The second column provides the sequence identifier, “SEQ ID NO:X”, for each contig sequence. The third column provides a unique contig identifier, “Contig ID:” for each contig sequence. The fourth column, provides a BAC identifier “BAC ID NO:A” for the BAC clone referenced in the corresponding row of the table. The fifth column provides the nucleotide sequence identifier, “SEQ ID NO:B” for a fragment of the BAC clone identified in column four of the corresponding row of the table. The sixth column, “Exon From-To”, provides the location (i.e., nucleotide position numbers) within the polynucleotide sequence of SEQ ID NO:B which delineate certain polynucleotides of the invention that are also exemplary members of polynucleotide sequences that encode polypeptides of the invention (e.g., polypeptides containing amino acid sequences encoded by the polynucleotide sequences delineated in column six, and fragments and variants thereof).

[0031] Description of Table 1D

[0032] Table 1D: In preferred embodiments, the present invention encompasses a method of detecting, preventing, diagnosing, prognosticating, treating, and/or ameliorating cancer and other hyperproliferative disorders; comprising administering to a patient in which such treatment, prevention, or amelioration is desired a protein, nucleic acid, or antibody of the invention (or fragment or variant thereof) represented by Table 1A, Table 1B, and Table 1C, in an amount effective to detect, prevent, diagnose, prognosticate, treat, and/or ameliorate the disease or disorder.

[0033] As indicated in Table 1D, the polynucleotides, polypeptides, agonists, or antagonists of the present invention (including antibodies) can be used in assays to test for one or more biological activities. If these polynucleotides and polypeptides do exhibit activity in a particular assay, it is likely that these molecules may be involved in the diseases associated with the biological activity. Thus, the polynucleotides or polypeptides, or agonists or antagonists thereof (including antibodies) could be used to treat the associated disease.

[0034] Table 1D provides information related to biological activities for polynucleotides and polypeptides of the invention (including antibodies, agonists, and/or antagonists thereof). Table 1D also provides information related to assays which may be used to test polynucleotides and polypeptides of the invention (including antibodies, agonists, and/or antagonists thereof) for the corresponding biological activities. The first column (“Gene No.”) provides the gene number in the application for each clone identifier. The second column (“cDNA Clone ID:”) provides the unique clone identifier for each clone as previously described and indicated in Tables 1A, 1B, and 1C. The third column (“AA SEQ ID NO:Y”) indicates the Sequence Listing SEQ ID Number for polypeptide sequences encoded by the corresponding cDNA clones (also as indicated in Tables 1A, 1B, and 2). The fourth column (“Biological Activity”) indicates a biological activity corresponding to the indicated polypeptides (or polynucleotides encoding said polypeptides). The fifth column (“Exemplary Activity Assay”) further describes the corresponding biological activity and provides information pertaining to the various types of assays which may be performed to test, demonstrate, or quantify the corresponding biological activity. Table 1D describes the use of FMAT technology, inter alia, for testing or demonstrating various biological activities. Fluorometric microvolume assay technology (FMAT) is a fluorescence-based system which provides a means to perform nonradioactive cell- and bead-based assays to detect activation of cell signal transduction pathways. This technology was designed specifically for ligand binding and immunological assays. Using this technology, fluorescent cells or beads at the bottom of the well are detected as localized areas of concentrated fluorescence using a data processing system. Unbound flurophore comprising the background signal is ignored, allowing for a wide variety of homogeneous assays. FMAT technology may be used for peptide ligand binding assays, immunofluorescence, apoptosis, cytotoxicity, and bead-based immunocapture assays. See, Miraglia S et. al., “Homogeneous cell and bead based assays for highthroughput screening using flourometric microvolume assay technology,” Journal of Biomolecular Screening; 4:193-204 (1999). In particular, FMAT technology may be used to test, confirm, and/or identify the ability of polypeptides (including polypeptide fragments and variants) to activate signal transduction pathways. For example, FMAT technology may be used to test, confirm, and/or identify the ability of polypeptides to upregulate production of immunomodulatory proteins (such as, for example, interleukins, GM-CSF, Rantes, and Tumor Necrosis factors, as well as other cellular regulators (e.g. insulin)).

[0035] Table 1D also describes the use of kinase assays for testing, demonstrating, or quantifying biological activity. In this regard, the phosphorylation and de-phosphorylation of specific amino acid residues (e.g. Tyrosine, Serine, Threonine) on cell-signal transduction proteins provides a fast, reversible means for activation and de-activation of cellular signal transduction pathways. Moreover, cell signal transduction via phosphorylation/de-phosphorylation is crucial to the regulation of a wide variety of cellular processes (e.g. proliferation, differentiation, migration, apoptosis, etc.). Accordingly, kinase assays provide a powerful tool useful for testing, confirming, and/or identifying polypeptides (including polypeptide fragments and variants) that mediate cell signal transduction events via protein phosphorylation. See e.g., Forrer, P., Tamaskovic R., and Jaussi, R. “Enzyme-Linked Immunosorbent Assay for Measurement of JNK, ERK, and p38 Kinase Activities” Biol. Chem. 379(8-9): 1101-1110 (1998).

[0036] Description of Table 1E

[0037] Polynucleotides encoding polypeptides of the present invention can be used in assays to test for one or more biological activities. One such biological activity which may be tested includes the ability of polynucleotides and polypeptides of the invention to stimulate up-regulation or down-regulation of expression of particular genes and proteins. Hence, if polynucleotides and polypeptides of the present invention exhibit activity in altering particular gene and protein expression patterns, it is likely that these polynucleotides and polypeptides of the present invention may be involved in, or capable of effecting changes in, diseases associated with the altered gene and protein expression profiles. Hence, polynucleotides, polypeptides, or antibodies of the present invention could be used to treat said associated diseases.

[0038] TaqMan® assays may be performed to assess the ability of polynucleotides (and polypeptides they encode) to alter the expression pattern of particular “target” genes. TaqMan® reactions are performed to evaluate the ability of a test agent to induce or repress expression of specific genes in different cell types. TaqMan® gene expression quantification assays (“TaqMan® assays”) are well known to, and routinely performed by, those of ordinary skill in the art. TaqMan® assays are performed in a two step reverse transcription/polymerase chain reaction (RT-PCR). In the first (RT) step, cDNA is reverse transcribed from total RNA samples using random hexamer primers. In the second (PCR) step, PCR products are synthesized from the cDNA using gene specific primers.

[0039] To quantify gene expression the Taqman® PCR reaction exploits the 5′ nuclease activity of AmpliTaq Gold® DNA Polymerase to cleave a Taqman® probe (distinct from the primers) during PCR. The Taqman® probe contains a reporter dye at the 5′-end of the probe and a quencher dye at the 3′ end of the probe. When the probe is intact, the proximity of the reporter dye to the quencher dye results in suppression of the reporter fluorescence. During PCR, if the target of interest is present, the probe specifically anneals between the forward and reverse primer sites. AmpliTaq Fold DNA Polymerase then cleaves the probe between the reporter and quencher when the probe hybridizes to the target, resulting in increased fluorescence of the reporter (see FIG. 2). Accumulation of PCR products is detected directly by monitoring the increase in fluorescence of the reporter dye.

[0040] After the probe fragments are displaced from the target, polymerization of the strand continues. The 3′-end of the probe is blocked to prevent extension of the probe during PCR. This process occurs in every cycle and does not interfere with the exponential accumulation of product. The increase in fluorescence signal is detected only if the target sequence is complementary to the probe and is amplified during PCR. Because of these requirements, any nonspecific amplification is not detected.

[0041] For test sample preparation, vector controls or constructs containing the coding sequence for the gene of interest are transfected into cells, such as for example 293T cells, and supernatants collected after 48 hours. For cell treatment and RNA isolation, multiple primary human cells or human cell lines are used; such cells may include but are not limited to, Normal Human Dermal Fibroblasts, Aortic Smooth Muscle, Human Umbilical Vein Endothelial Cells, HepG2, Daudi, Jurkat, U937, Caco, and THP-1 cell lines. Cells are plated in growth media and growth is arrested by culturing without media change for 3 days, or by switching cells to low serum media and incubating overnight. Cells are treated for 1, 6, or 24 hours with either vector control supernatant or sample supernatant (or purified/partially purified protein preparations in buffer). Total RNA is isolated; for example, by using Trizol extraction or by using the Ambion RNAqueous™-4PCR RNA isolation system. Expression levels of multiple genes are analyzed using TAQMAN, and expression in the test sample is compared to control vector samples to identify genes induced or repressed. Each of the above described techniques are well known to, and routinely performed by, those of ordinary skill in the art.

[0042] Table 1E indicates particular disease classes and preferred indications for which polynucleotides, polypeptides, or antibodies of the present invention may be used in detecting, diagnosing, preventing, treating and/or ameliorating said diseases and disorders based on “target” gene expression patterns which may be up- or down-regulated by polynucleotides (and the encoded polypeptides) corresponding to each indicated cDNA Clone ID (shown in Table 1E, Column 2).

[0043] Thus, in preferred embodiments, the present invention encompasses a method of detecting, diagnosing, preventing, treating, and/or ameliorating a disease or disorder listed in the “Disease Class” and/or “Preferred Indication” columns of Table 1E; comprising administering to a patient in which such detection, diagnosis, prevention, or treatment is desired a protein, nucleic acid, or antibody of the invention (or fragment or variant thereof) in an amount effective to detect, diagnose, prevent, treat, or ameliorate the disease or disorder. The first and second columns of Table 1D show the “Gene No.” and “cDNA Clone ID No.”, respectively, indicating certain nucleic acids and proteins (or antibodies against the same) of the invention (including polynucleotide, polypeptide, and antibody fragments or variants thereof) that may be used in detecting, diagnosing, preventing, treating, or ameliorating the disease(s) or disorder(s) indicated in column 6 and as indicated in the corresponding row in the “Disease Class” or “Preferred Indication” Columns of Table 1E.

[0044] In another embodiment, the present invention also encompasses methods of detecting, diagnosing, preventing, treating, or ameliorating a disease or disorder listed in the “Disease Class” or “Preferred Indication” Columns of Table 1E; comprising administering to a patient combinations of the proteins, nucleic acids, or antibodies of the invention (or fragments or variants thereof), sharing similar indications as shown in the corresponding rows in the “Disease Class” or “Preferred Indication” Columns of Table 1E.

[0045] The “Disease Class” Column of Table 1E provides a categorized descriptive heading for diseases, disorders, and/or conditions (more fully described below) that may be detected, diagnosed, prevented, treated, or ameliorated by a protein, nucleic acid, or antibody of the invention (or fragment or variant thereof).

[0046] The “Preferred Indication” Column of Table 1E describes diseases, disorders, and/or conditions that may be detected, diagnosed, prevented, treated, or ameliorated by a protein, nucleic acid, or antibody of the invention (or fragment or variant thereof).

[0047] The “Cell Line” and “Exemplary Targets” Columns of Table 1E indicate particular cell lines and target genes, respectively, which may show altered gene expression patterns (i.e., up- or down-regulation of the indicated target gene) in Taqman assays, performed as described above, utilizing polynucleotides of the cDNA Clone ID shown in the corresponding row. Alteration of expression patterns of the indicated “Exemplary Target” genes is correlated with a particular “Disease Class” and/or “Preferred Indication” as shown in the corresponding row under the respective column headings.

[0048] The “Exemplary Accessions” Column indicates GenBank Accessions (available online through the National Center for Biotechnology Information (NCBI) at http://www.ncbi.nlm.nih.gov/) which correspond to the “Exemplary Targets” shown in the adjacent row.

[0049] The recitation of “Cancer” in the “Disease Class” Column indicates that the corresponding nucleic acid and protein, or antibody against the same, of the invention (or fragment or variant thereof) may be used for example, to detect, diagnose, prevent, treat, and/or ameliorate neoplastic diseases and/or disorders (e.g., leukemias, cancers, etc., as described below under “Hyperproliferative Disorders”).

[0050] The recitation of “Immune” in the “Disease Class” column indicates that the corresponding nucleic acid and protein, or antibody against the same, of the invention (or fragment or variant thereof), may be used for example, to detect, diagnose, prevent, treat, and/or ameliorate diseases and/or disorders relating to neoplastic diseases (e.g., as described below under “Hyperproliferative Disorders”), blood disorders (e.g., as described below under “Immune Activity” “Cardiovascular Disorders” and/or “Blood-Related Disorders”), and infections (e.g., as described below under “Infectious Disease”).

[0051] The recitation of “Angiogenesis” in the “Disease Class” column indicates that the corresponding nucleic acid and protein, or antibody against the same, of the invention (or fragment or variant thereof), may be used for example, to detect, diagnose, treat, prevent, and/or ameliorate diseases and/or disorders relating to neoplastic diseases (e.g., as described below under “Hyperproliferative Disorders”), diseases and/or disorders of the cardiovascular system (e.g., as described below under “Cardiovascular Disorders”), diseases and/or disorders involving cellular and genetic abnormalities (e.g., as described below under “Diseases at the Cellular Level”), diseases and/or disorders involving angiogenesis (e.g., as described below under “Anti-Angiogenesis Activity”), to promote or inhibit cell or tissue regeneration (e.g., as described below under “Regeneration”), or to promote wound healing (e.g., as described below under “Wound Healing and Epithelial Cell Proliferation”).

[0052] The recitation of “Diabetes” in the “Disease Class” column indicates that the corresponding nucleic acid and protein, or antibody against the same, of the invention (or fragment or variant thereof), may be used for example, to detect, diagnose, treat, prevent, and/or ameliorate diabetes (including diabetes mellitus types I and II), as well as diseases and/or disorders associated with, or consequential to, diabetes (e.g. as described below under “Endocrine Disorders,” “Renal Disorders,” and “Gastrointestinal Disorders”).

[0053] Description of Table 2

[0054] Table 2 summarizes homology and features of some of the polypeptides of the invention. The first column provides a unique clone identifier, “Clone ID:”, corresponding to a cDNA clone disclosed in Table 1A or Table 1B. The second column provides the unique contig identifier, “Contig ID:” corresponding to contigs in Table 1B and allowing for correlation with the information in Table 1B. The third column provides the sequence identifier, “SEQ ID NO:X”, for the contig polynucleotide sequence. The fourth column provides the analysis method by which the homology/identity disclosed in the Table was determined. Comparisons were made between polypeptides encoded by the polynucleotides of the invention and either a non-redundant protein database (herein referred to as “NR”), or a database of protein families (herein referred to as “PFAM”) as further described below. The fifth column provides a description of the PFAM/NR hit having a significant match to a polypeptide of the invention. Column six provides the accession number of the PFAM/NR hit disclosed in the fifth column. Column seven, “Score/Percent Identity”, provides a quality score or the percent identity, of the hit disclosed in columns five and six. Columns 8 and 9, “NT From” and “NT To” respectively, delineate the polynucleotides in “SEQ ID NO:X” that encode a polypeptide having a significant match to the PFAM/NR database as disclosed in the fifth and sixth columns. In specific embodiments polypeptides of the invention comprise, or alternatively consist of, an amino acid sequence encoded by a polynucleotide in SEQ ID NO:X as delineated in columns 8 and 9, or fragments or variants thereof.

[0055] Description of Table 3

[0056] Table 3 provides polynucleotide sequences that may be disclaimed according to certain embodiments of the invention. The first column provides a unique clone identifier, “Clone ID”, for a cDNA clone related to contig sequences disclosed in Table 1B. The second column provides the sequence identifier, “SEQ ID NO:X”, for contig sequences disclosed in Table 1A and/or Table 1B. The third column provides the unique contig identifier, “Contig ID:”, for contigs disclosed in Table 1B. The fourth column provides a unique integer ‘a’ where ‘a’ is any integer between 1 and the final nucleotide minus 15 of SEQ ID NO:X, and the fifth column provides a unique integer ‘b’ where ‘b’ is any integer between 15 and the final nucleotide of SEQ ID NO:X, where both a and b correspond to the positions of nucleotide residues shown in SEQ ID NO:X, and where b is greater than or equal to a +14. For each of the polynucleotides shown as SEQ ID NO:X, the uniquely defined integers can be substituted into the general formula of a-b, and used to describe polynucleotides which may be preferably excluded from the invention. In certain embodiments, preferably excluded from the invention are at least one, two, three, four, five, ten, or more of the polynucleotide sequence(s) having the accession number(s) disclosed in the sixth column of this Table (including for example, published sequence in connection with a particular BAC clone). In further embodiments, preferably excluded from the invention are the specific polynucleotide sequence(s) contained in the clones corresponding to at least one, two, three, four, five, ten, or more of the available material having the accession numbers identified in the sixth column of this Table (including for example, the actual sequence contained in an identified BAC clone).

[0057] Description of Table 4

[0058] Table 4 provides a key to the tissue/cell source identifier code disclosed in Table 1B.2, column 5. Column 1 of Table 4 provides the tissue/cell source identifier code disclosed in Table 1B.2, Column 5. Columns 2-5 provide a description of the tissue or cell source. Note that “Description” and “Tissue” sources (i.e. columns 2 and 3) having the prefix “a_” indicates organs, tissues, or cells derived from “adult” sources. Codes corresponding to diseased tissues are indicated in column 6 with the word “disease.” The use of the word “disease” in column 6 is non-limiting. The tissue or cell source may be specific (e.g. a neoplasm), or may be disease-associated (e.g., a tissue sample from a normal portion of a diseased organ). Furthermore, tissues and/or cells lacking the “disease” designation may still be derived from sources directly or indirectly involved in a disease state or disorder, and therefore may have a further utility in that disease state or disorder. In numerous cases where the tissue/cell source is a library, column 7 identifies the vector used to generate the library.

[0059] Description of Table 5

[0060] Table 5 provides a key to the OMIM reference identification numbers disclosed in Table 1B.1, column 9. OMIM reference identification numbers (Column 1) were derived from Online Mendelian Inheritance in Man (Online Mendelian Inheritance in Man, OMIM. McKusick-Nathans Institute for Genetic Medicine, Johns Hopkins University (Baltimore, Md.) and National Center for Biotechnology Information, National Library of Medicine, (Bethesda, Md.) 2000. World Wide Web URL: http://www.ncbi.nlm.nih.gov/omim/). Column 2 provides diseases associated with the cytologic band disclosed in Table 1B.1, column 8, as determined using the Morbid Map database.

[0061] Description of Table 6

[0062] Table 6 summarizes some of the ATCC Deposits, Deposit dates, and ATCC designation numbers of deposits made with the ATCC in connection with the present application. These deposits were made in addition to those described in the Table 1A.

[0063] Description of Table 7

[0064] Table 7 shows the cDNA libraries sequenced, and ATCC designation numbers and vector information relating to these cDNA libraries.

[0065] The first column shows the first four letters indicating the Library from which each library clone was derived. The second column indicates the catalogued tissue description for the corresponding libraries. The third column indicates the vector containing the corresponding clones. The fourth column shows the ATCC deposit designation for each libray clone as indicated by the deposit information in Table 6.

[0066] Definitions

[0067] The following definitions are provided to facilitate understanding of certain terms used throughout this specification.

[0068] In the present invention, “isolated” refers to material removed from its original environment (e.g., the natural environment if it is naturally occurring), and thus is altered “by the hand of man” from its natural state. For example, an isolated polynucleotide could be part of a vector or a composition of matter, or could be contained within a cell, and still be “isolated” because that vector, composition of matter, or particular cell is not the original environment of the polynucleotide. The term “isolated” does not refer to genomic or cDNA libraries, whole cell total or mRNA preparations, genomic DNA preparations (including those separated by electrophoresis and transferred onto blots), sheared whole cell genomic DNA preparations or other compositions where the art demonstrates no distinguishing features of the polynucleotide/sequences of the present invention.

[0069] In the present invention, a “secreted” protein refers to those proteins capable of being directed to the ER, secretory vesicles, or the extracellular space as a result of a signal sequence, as well as those proteins released into the extracellular space without necessarily containing a signal sequence. If the secreted protein is released into the extracellular space, the secreted protein can undergo extracellular processing to produce a “mature” protein. Release into the extracellular space can occur by many mechanisms, including exocytosis and proteolytic cleavage.

[0070] As used herein, a “polynucleotide” refers to a molecule having a nucleic acid sequence encoding SEQ ID NO:Y or a fragment or variant thereof (e.g., the polypeptide delinated in columns fourteen and fifteen of Table 1A); a nucleic acid sequence contained in SEQ ID NO:X (as described in column 5 of Table 1A and/or column 3 of Table 1B) or the complement thereof; a cDNA sequence contained in Clone ID: (as described in column 2 of Table 1A and/or Table 1B and contained within a library deposited with the ATCC); a nucleotide sequence encoding the polypeptide encoded by a nucleotide sequence in SEQ ID NO:B as defined in column 6 (EXON From-To) of Table 1C or a fragment or variant thereof; or a nucleotide coding sequence in SEQ ID NO:B as defined in column 6 of Table 1C or the complement thereof. For example, the polynucleotide can contain the nucleotide sequence of the full length cDNA sequence, including the 5′ and 3′ untranslated sequences, the coding region, as well as fragments, epitopes, domains, and variants of the nucleic acid sequence. Moreover, as used herein, a “polypeptide” refers to a molecule having an amino acid sequence encoded by a polynucleotide of the invention as broadly defined (obviously excluding poly-Phenylalanine or poly-Lysine peptide sequences which result from translation of a polyA tail of a sequence corresponding to a cDNA).

[0071] In the present invention, “SEQ ID NO:X” was often generated by overlapping sequences contained in multiple clones (contig analysis). A representative clone containing all or most of the sequence for SEQ ID NO:X is deposited at Human Genome Sciences, Inc. (HGS) in a catalogued and archived library. As shown, for example, in column 2 of Table 1B, each clone is identified by a cDNA Clone ID (identifier generally referred to herein as Clone ID:). Each Clone ID is unique to an individual clone and the Clone ID is all the information needed to retrieve a given clone from the HGS library. Table 7 provides a list of the deposited cDNA libraries. One can use the Clone ID: to determine the library source by reference to Tables 6 and 7. Table 7 lists the deposited cDNA libraries by name and links each library to an ATCC Deposit. Library names contain four characters, for example, “HTWE.” The name of a cDNA clone (Clone ID) isolated from that library begins with the same four characters, for example “HTWEP07”. As mentioned below, Table 1A and/or Table 1B correlates the Clone ID names with SEQ ID NO:X. Thus, starting with an SEQ ID NO:X, one can use Tables 1A, 1B, 6, 7, and 9 to determine the corresponding Clone ID, which library it came from and which ATCC deposit the library is contained in. Furthermore, it is possible to retrieve a given cDNA clone from the source library by techniques known in the art and described elsewhere herein. The ATCC is located at 10801 University Boulevard, Manassas, Va. 20110-2209, USA. The ATCC deposits were made pursuant to the terms of the Budapest Treaty on the international recognition of the deposit of microorganisms for the purposes of patent procedure.

[0072] In specific embodiments, the polynucleotides of the invention are at least 15, at least 30, at least 50, at least 100, at least 125, at least 500, or at least 1000 continuous nucleotides but are less than or equal to 300 kb, 200 kb, 100 kb, 50 kb, 15 kb, 10 kb, 7.5 kb, 5 kb, 2.5 kb, 2.0 kb, or 1 kb, in length. In a further embodiment, polynucleotides of the invention comprise a portion of the coding sequences, as disclosed herein, but do not comprise all or a portion of any intron. In another embodiment, the polynucleotides comprising coding sequences do not contain coding sequences of a genomic flanking gene (i.e., 5′ or 3′ to the gene of interest in the genome). In other embodiments, the polynucleotides of the invention do not contain the coding sequence of more than 1000, 500, 250, 100, 50, 25, 20, 15, 10, 5, 4, 3, 2, or 1 genomic flanking gene(s).

[0073] A “polynucleotide” of the present invention also includes those polynucleotides capable of hybridizing, under stringent hybridization conditions, to sequences contained in SEQ ID NO:X, or the complement thereof (e.g., the complement of any one, two, three, four, or more of the polynucleotide fragments described herein), the polynucleotide sequence delineated in columns 7 and 8 of Table 1A or the complement thereof, the polynucleotide sequence delineated in columns 8 and 9 of Table 2 or the complement thereof, and/or cDNA sequences contained in Clone ID: (e.g., the complement of any one, two, three, four, or more of the polynucleotide fragments, or the cDNA clone within the pool of cDNA clones deposited with the ATCC, described herein), and/or the polynucleotide sequence delineated in column 6 of Table 1C or the complement thereof. “Stringent hybridization conditions” refers to an overnight incubation at 42 degree C. in a solution comprising 50% formamide, 5×SSC (750 mM NaCl, 75 mM trisodium citrate), 50 mM sodium phosphate (pH 7.6), 5× Denhardt's solution, 10% dextran sulfate, and 20 μg/ml denatured, sheared salmon sperm DNA, followed by washing the filters in 0.1×SSC at about 65 degree C.

[0074] Also contemplated are nucleic acid molecules that hybridize to the polynucleotides of the present invention at lower stringency hybridization conditions. Changes in the stringency of hybridization and signal detection are primarily accomplished through the manipulation of formamide concentration (lower percentages of formamide result in lowered stringency); salt conditions, or temperature. For example, lower stringency conditions include an overnight incubation at 37 degree C. in a solution comprising 6×SSPE (20×SSPE=3M NaCl; 0.2M NaH₂PO₄; 0.02M EDTA, pH 7.4), 0.5% SDS, 30% formamide, 100 ug/ml salmon sperm blocking DNA; followed by washes at 50 degree C. with 1×SSPE, 0.1% SDS. In addition, to achieve even lower stringency, washes performed following stringent hybridization can be done at higher salt concentrations (e.g. 5×SSC).

[0075] Note that variations in the above conditions may be accomplished through the inclusion and/or substitution of alternate blocking reagents used to suppress background in hybridization experiments. Typical blocking reagents include Denhardt's reagent, BLOTTO, heparin, denatured salmon sperm DNA, and commercially available proprietary formulations. The inclusion of specific blocking reagents may require modification of the hybridization conditions described above, due to problems with compatibility.

[0076] Of course, a polynucleotide which hybridizes only to polyA+ sequences (such as any 3′ terminal polyA+ tract of a cDNA shown in the sequence listing), or to a complementary stretch of T (or U) residues, would not be included in the definition of “polynucleotide,” since such a polynucleotide would hybridize to any nucleic acid molecule containing a poly (A) stretch or the complement thereof (e.g., practically any double-stranded cDNA clone generated using oligo dT as a primer).

[0077] The polynucleotide of the present invention can be composed of any polyribonucleotide or polydeoxribonucleotide, which may be unmodified RNA or DNA or modified RNA or DNA. For example, polynucleotides can be composed of single- and double-stranded DNA, DNA that is a mixture of single- and double-stranded regions, single- and double-stranded RNA, and RNA that is mixture of single- and double-stranded regions, hybrid molecules comprising DNA and RNA that may be single-stranded or, more typically, double-stranded or a mixture of single- and double-stranded regions. In addition, the polynucleotide can be composed of triple-stranded regions comprising RNA or DNA or both RNA and DNA. A polynucleotide may also contain one or more modified bases or DNA or RNA backbones modified for stability or for other reasons. “Modified” bases include, for example, tritylated bases and unusual bases such as inosine. A variety of modifications can be made to DNA and RNA; thus, “polynucleotide” embraces chemically, enzymatically, or metabolically modified forms.

[0078] In specific embodiments, the polynucleotides of the invention are at least 15, at least 30, at least 50, at least 100, at least 125, at least 500, or at least 1000 continuous nucleotides but are less than or equal to 300 kb, 200 kb, 100 kb, 50 kb, 15 kb, 10 kb, 7.5 kb, 5 kb, 2.5 kb, 2.0 kb, or 1 kb, in length. In a further embodiment, polynucleotides of the invention comprise a portion of the coding sequences, as disclosed herein, but do not comprise all or a portion of any intron. In another embodiment, the polynucleotides comprising coding sequences do not contain coding sequences of a genomic flanking gene (i.e., 5′ or 3′ to the gene of interest in the genome). In other embodiments, the polynucleotides of the invention do not contain the coding sequence of more than 1000, 500, 250, 100, 50, 25, 20, 15, 10, 5, 4, 3, 2, or 1 genomic flanking gene(s). “SEQ ID NO:X” refers to a polynucleotide sequence described in column 5 of Table 1A, while “SEQ ID NO:Y” refers to a polypeptide sequence described in column 10 of Table 1A. SEQ ID NO:X is identified by an integer specified in column 6 of Table 1A. The polypeptide sequence SEQ ID NO:Y is a translated open reading frame (ORF) encoded by polynucleotide SEQ ID NO:X. The polynucleotide sequences are shown in the sequence listing immediately followed by all of the polypeptide sequences. Thus, a polypeptide sequence corresponding to polynucleotide sequence SEQ ID NO:2 is the first polypeptide sequence shown in the sequence listing. The second polypeptide sequence corresponds to the polynucleotide sequence shown as SEQ ID NO:3, and so on.

[0079] The polypeptide of the present invention can be composed of amino acids joined to each other by peptide bonds or modified peptide bonds, i.e., peptide isosteres, and may contain amino acids other than the 20 gene-encoded amino acids. The polypeptides may be modified by either natural processes, such as posttranslational processing, or by chemical modification techniques which are well known in the art. Such modifications are well described in basic texts and in more detailed monographs, as well as in a voluminous research literature. Modifications can occur anywhere in a polypeptide, including the peptide backbone, the amino acid side-chains and the amino or carboxyl termini. It will be appreciated that the same type of modification may be present in the same or varying degrees at several sites in a given polypeptide. Also, a given polypeptide may contain many types of modifications. Polypeptides may be branched, for example, as a result of ubiquitination, and they may be cyclic, with or without branching. Cyclic, branched, and branched cyclic polypeptides may result from posttranslation natural processes or may be made by synthetic methods. Modifications include acetylation, acylation, ADP-ribosylation, amidation, covalent attachment of flavin, covalent attachment of a heme moiety, covalent attachment of a nucleotide or nucleotide derivative, covalent attachment of a lipid or lipid derivative, covalent attachment of phosphotidylinositol, cross-linking, cyclization, disulfide bond formation, demethylation, formation of covalent cross-links, formation of cysteine, formation of pyroglutamate, formylation, gamma-carboxylation, glycosylation, GPI anchor formation, hydroxylation, iodination, methylation, myristoylation, oxidation, pegylation, proteolytic processing, phosphorylation, prenylation, racemization, selenoylation, sulfation, transfer-RNA mediated addition of amino acids to proteins such as arginylation, and ubiquitination. (See, for instance, PROTEINS—STRUCTURE AND MOLECULAR PROPERTIES, 2nd Ed., T. E. Creighton, W. H. Freeman and Company, New York (1993); POSTTRANSLATIONAL COVALENT MODIFICATION OF PROTEINS, B. C. Johnson, Ed., Academic Press, New York, pgs. 1-12 (1983); Seifter et al., Meth. Enzymol. 182:626-646 (1990); Rattan et al., Ann. N.Y. Acad. Sci. 663:48-62 (1992)).

[0080] “SEQ ID NO:X” refers to a polynucleotide sequence described, for example, in Tables 1A, Table 1B, or Table 2, while “SEQ ID NO:Y” refers to a polypeptide sequence described in column 11 of Table 1A and or column 6 of Table 1B.1. SEQ ID NO:X is identified by an integer specified in column 4 of Table 1B. The polypeptide sequence SEQ ID NO:Y is a translated open reading frame (ORF) encoded by polynucleotide SEQ ID NO:X. “Clone ID:” refers to a cDNA clone described in column 2 of Table 1A and/or 1B.

[0081] “A polypeptide having functional activity” refers to a polypeptide capable of displaying one or more known functional activities associated with a full-length (complete) protein. Such functional activities include, but are not limited to, biological activity (e.g. activity useful in treating, preventing and/or ameliorating cancer and other hyperproliferative disorders), antigenicity (ability to bind [or compete with a polypeptide for binding] to an anti-polypeptide antibody), immunogenicity (ability to generate antibody which binds to a specific polypeptide of the invention), ability to form multimers with polypeptides of the invention, and ability to bind to a receptor or ligand for a polypeptide.

[0082] The polypeptides of the invention can be assayed for functional activity (e.g. biological activity) using or routinely modifying assays known in the art, as well as assays described herein. Specifically, one of skill in the art may routinely assay secreted polypeptides (including fragments and variants) of the invention for activity using assays as described in the examples section below.

[0083] “A polypeptide having biological activity” refers to a polypeptide exhibiting activity similar to, but not necessarily identical to, an activity of a polypeptide of the present invention, including mature forms, as measured in a particular biological assay, with or without dose dependency. In the case where dose dependency does exist, it need not be identical to that of the polypeptide, but rather substantially similar to the dose-dependence in a given activity as compared to the polypeptide of the present invention (i.e., the candidate polypeptide will exhibit greater activity or not more than about 25-fold less and, preferably, not more than about tenfold less activity, and most preferably, not more than about three-fold less activity relative to the polypeptide of the present invention).

Tables:

[0084] Table 1A

[0085] Table 1A summarizes information concerning certain polypnucleotides and polypeptides of the invention. The first column provides the gene number in the application for each clone identifier. The second column provides a unique clone identifier, “Clone ID:”, for a cDNA clone related to each contig sequence disclosed in Table 1A. Third column, the cDNA Clones identified in the second column were deposited as indicated in the third column (i.e. by ATCC Deposit No:Z and deposit date). Some of the deposits contain multiple different clones corresponding to the same gene. In the fourth column, “Vector” refers to the type of vector contained in the corresponding cDNA Clone identified in the second column. In the fifth column, the nucleotide sequence identified as “NT SEQ ID NO:X” was assembled from partially homologous (“overlapping”) sequences obtained from the corresponding cDNA clone identified in the second column and, in some cases, from additional related cDNA clones. The overlapping sequences were assembled into a single contiguous sequence of high redundancy (usually three to five overlapping sequences at each nucleotide position), resulting in a final sequence identified as SEQ ID NO:X. In the sixth column, “Total NT Seq.” refers to the total number of nucleotides in the contig sequence identified as SEQ ID NO:X.” The deposited clone may contain all or most of these sequences, reflected by the nucleotide position indicated as “5′ NT of Clone Seq.” (seventh column) and the “3′ NT of Clone Seq.” (eighth column) of SEQ ID NO:X. In the ninth column, the nucleotide position of SEQ ID NO:X of the putative start codon (methionine) is identified as “5′ NT of Start Codon.” Similarly, in column ten, the nucleotide position of SEQ ID NO:X of the predicted signal sequence is identified as “5′ NT of First AA of Signal Pep.” In the eleventh column, the translated amino acid sequence, beginning with the methionine, is identified as “AA SEQ ID NO:Y,” although other reading frames can also be routinely translated using known molecular biology techniques. The polypeptides produced by these alternative open reading frames are specifically contemplated by the present invention.

[0086] In the twelfth and thirteenth columns of Table 1A, the first and last amino acid position of SEQ ID NO:Y of the predicted signal peptide is identified as “First AA of Sig Pep” and “Last AA of Sig Pep.” In the fourteenth column, the predicted first amino acid position of SEQ ID NO:Y of the secreted portion is identified as “Predicted First AA of Secreted Portion”. The amino acid position of SEQ ID NO:Y of the last amino acid encoded by the open reading frame is identified in the fifteenth column as “Last AA of ORF”.

[0087] SEQ ID NO:X (where X may be any of the polynucleotide sequences disclosed in the sequence listing) and the translated SEQ ID NO:Y (where Y may be any of the polypeptide sequences disclosed in the sequence listing) are sufficiently accurate and otherwise suitable for a variety of uses well known in the art and described further below. For instance, SEQ ID NO:X is useful for designing nucleic acid hybridization probes that will detect nucleic acid sequences contained in SEQ ID NO:X or the cDNA contained in the deposited clone. These probes will also hybridize to nucleic acid molecules in biological samples, thereby enabling a variety of forensic and diagnostic methods of the invention. Similarly, polypeptides identified from SEQ ID NO:Y may be used, for example, to generate antibodies which bind specifically to proteins containing the polypeptides and the secreted proteins encoded by the cDNA clones identified in Table 1A and/or elsewhere herein

[0088] Nevertheless, DNA sequences generated by sequencing reactions can contain sequencing errors. The errors exist as misidentified nucleotides, or as insertions or deletions of nucleotides in the generated DNA sequence. The erroneously inserted or deleted nucleotides cause frame shifts in the reading frames of the predicted amino acid sequence. In these cases, the predicted amino acid sequence diverges from the actual amino acid sequence, even though the generated DNA sequence may be greater than 99.9% identical to the actual DNA sequence (for example, one base insertion or deletion in an open reading frame of over 1000 bases).

[0089] Accordingly, for those applications requiring precision in the nucleotide sequence or the amino acid sequence, the present invention provides not only the generated nucleotide sequence identified as SEQ ID NO:X, and the predicted translated amino acid sequence identified as SEQ ID NO:Y, but also a sample of plasmid DNA containing a human cDNA of the invention deposited with the ATCC, as set forth in Table 1A. The nucleotide sequence of each deposited plasmid can readily be determined by sequencing the deposited plasmid in accordance with known methods

[0090] The predicted amino acid sequence can then be verified from such deposits. Moreover, the amino acid sequence of the protein encoded by a particular plasmid can also be directly determined by peptide sequencing or by expressing the protein in a suitable host cell containing the deposited human cDNA, collecting the protein, and determining its sequence.

[0091] Also provided in Table 1A is the name of the vector which contains the cDNA plasmid. Each vector is routinely used in the art. The following additional information is provided for convenience.

[0092] Vectors Lambda Zap (U.S. Pat. Nos. 5,128,256 and 5,286,636), Uni-Zap XR (U.S. Pat. Nos. 5,128,256 and 5,286,636), Zap Express (U.S. Pat. Nos. 5,128,256 and 5,286,636), pBluescript (pBS) (Short, J. M. et al., Nucleic Acids Res. 16:7583-7600 (1988); Alting-Mees, M. A. and Short, J. M., Nucleic Acids Res. 17:9494 (1989)) and pBK (Alting-Mees, M. A. et al., Strategies 5:58-61 (1992)) are commercially available from Stratagene Cloning Systems, Inc., 11011 N. Torrey Pines Road, La Jolla, Calif., 92037. pBS contains an ampicillin resistance gene and pBK contains a neomycin resistance gene. Phagemid pBS may be excised from the Lambda Zap and Uni-Zap XR vectors, and phagemid pBK may be excised from the Zap Express vector. Both phagemids may be transformed into E. coli strain XL-1 Blue, also available from Stratagene Vectors pSport1, pCMVSport 1.0, pCMVSport 2.0 and pCMVSport 3.0, were obtained from Life Technologies, Inc., P.O. Box 6009, Gaithersburg, Md. 20897. All Sport vectors contain an ampicillin resistance gene and may be transformed into E. coli strain DH10B, also available from Life Technologies. See, for instance, Gruber, C. E., et al., Focus 15:59 (1993). Vector lafmid BA (Bento Soares, Columbia University, New York, N.Y.) contains an ampicillin resistance gene and can be transformed into E. coli strain XL-1 Blue. Vector pCR®2.1, which is available from Invitrogen, 1600 Faraday Avenue, Carlsbad, Calif. 92008, contains an ampicillin resistance gene and may be transformed into E. coli strain DH10B, available from Life Technologies. See, for instance, Clark, J. M., Nuc. Acids Res. 16:9677-9686 (1988) and Mead, D. et al., Bio/Technology 9: (1991).

[0093] The present invention also relates to the genes corresponding to SEQ ID NO:X, SEQ ID NO:Y, and/or a deposited cDNA (cDNA Clone ID). The corresponding gene can be isolated in accordance with known methods using the sequence information disclosed herein. Such methods include, but are not limited to, preparing probes or primers from the disclosed sequence and identifying or amplifying the corresponding gene from appropriate sources of genomic material.

[0094] Also provided in the present invention are allelic variants, orthologs, and/or species homologs. Procedures known in the art can be used to obtain full-length genes, allelic variants, splice variants, full-length coding portions, orthologs, and/or species homologs of genes corresponding to SEQ ID NO:X and SEQ ID NO:Y using information from the sequences disclosed herein or the clones deposited with the ATCC. For example, allelic variants and/or species homologs may be isolated and identified by making suitable probes or primers from the sequences provided herein and screening a suitable nucleic acid source for allelic variants and/or the desired homologue.

[0095] The present invention provides a polynucleotide comprising, or alternatively consisting of, the nucleic acid sequence of SEQ ID NO:X and/or a cDNA contained in ATCC Deposit No.Z. The present invention also provides a polypeptide comprising, or alternatively, consisting of, the polypeptide sequence of SEQ ID NO:Y, a polypeptide encoded by SEQ ID NO:X, and/or a polypeptide encoded by a cDNA contained in ATCC deposit No.Z. Polynucleotides encoding a polypeptide comprising, or alternatively consisting of the polypeptide sequence of SEQ ID NO:Y, a polypeptide encoded by SEQ ID NO:X and/or a polypeptide encoded by the cDNA contained in ATCC Deposit No.Z, are also encompassed by the invention. The present invention further encompasses a polynucleotide comprising, or alternatively consisting of the complement of the nucleic acid sequence of SEQ ID NO:X, and/or the complement of the coding strand of the cDNA contained in ATCC Deposit No.Z.

TABLE 1A

| | | | | | | | | | 5′ NT | | First | Last | | |
|---|---|---|---|---|---|---|---|---|---|---|---|---|---|---|
| | | | | NT | | 5′ NT | 3′ NT | | of First | AA | AA | AA | First AA | Last |
| | | ATCC | | SEQ | Total | of | of | 5′ NT | AA | SEQ | of | of | of | AA |
| Gene | cDNA | Deposit No: Z | | ID | NT | Clone | Clone | of Start | of Signal | ID | Sig | Sig | Secreted | of |
| No. | Clone ID | and Date | Vector | NO: X | Seq. | Seq. | Seq. | Codon | Pep | NO: Y | Pep | Pep | Portion | ORF |
| 1 | H2CBG48 | 209889 | pBluescript | 11 | 2797 | 1 | 2797 | 125 | 125 | 948 | 1 | 25 | 26 | 45 |
| | | May 22, 1998 | SK− | | | | | | | | | | | |
| 2 | H2MAC30 | 209299 | pBluescript | 12 | 459 | 1 | 459 | 157 | 157 | 949 | 1 | 28 | 29 | 72 |
| | | Sep. 25, 1997 | SK− | | | | | | | | | | | |
| 3 | H6EAB28 | 209511 | Uni-ZAP XR | 13 | 1939 | 1 | 1939 | 115 | 115 | 950 | 1 | 31 | 32 | 100 |
| | | Dec. 03, 1997 | | | | | | | | | | | | |
| 3 | H6EAB28 | 209511 | Uni-ZAP XR | 631 | 1547 | 1 | 1547 | 116 | 116 | 1568 | 1 | 20 | 21 | 76 |
| | | Dec. 03, 1997 | | | | | | | | | | | | |
| 4 | H6EDF66 | 209299 | Uni-ZAP XR | 14 | 540 | 1 | 540 | 146 | 146 | 951 | 1 | 27 | 28 | 131 |
| | | Sep. 25, 1997 | | | | | | | | | | | | |
| 5 | HABAG37 | 209626 | pSport1 | 15 | 654 | 1 | 639 | 97 | 97 | 952 | 1 | 31 | 32 | 62 |
| | | Feb. 12, 1998 | | | | | | | | | | | | |
| 6 | HACBD91 | 209626 | Uni-ZAP XR | 16 | 1445 | 1 | 1445 | 117 | 117 | 953 | 1 | 42 | 43 | 49 |
| | | Feb. 12, 1998 | | | | | | | | | | | | |
| 7 | HACCI17 | 203071 | Uni-ZAP XR | 17 | 1722 | 336 | 1714 | 461 | 461 | 954 | 1 | 24 | 25 | 218 |
| | | Jul. 27, 1998 | | | | | | | | | | | | |
| 7 | HACCI17 | 203071 | Uni-ZAP XR | 632 | 1380 | 12 | 1380 | 135 | 135 | 1569 | 1 | 24 | 25 | 72 |
| | | Jul. 27, 1998 | | | | | | | | | | | | |
| 8 | HADAO89 | 209423 | pSport1 | 18 | 1453 | 1 | 1453 | 244 | 244 | 955 | 1 | 22 | 23 | 44 |
| | | Oct. 30, 1997 | | | | | | | | | | | | |
| 9 | HAGAI85 | 97922 | Uni-ZAP XR | 19 | 1752 | 52 | 1752 | 166 | 166 | 956 | 1 | 23 | 24 | 30 |
| | | Mar. 07, 1997 | | | | | | | | | | | | |
| | | 209070 | | | | | | | | | | | | |
| | | May 22, 1997 | | | | | | | | | | | | |
| 10 | HAGAM64 | 209603 | Uni-ZAP XR | 20 | 2321 | 1 | 2321 | 57 | 57 | 957 | 1 | 31 | 32 | 44 |
| | | Jan. 29, 1998 | | | | | | | | | | | | |
| 11 | HAGAN21 | PTA-841 | Uni-ZAP XR | 21 | 843 | 1 | 843 | 34 | 34 | 958 | 1 | 17 | 18 | 91 |
| | | Oct. 13, 1999 | | | | | | | | | | | | |
| 11 | HAGAN21 | PTA-841 | Uni-ZAP XR | 633 | 610 | 294 | 610 | 335 | 335 | 1570 | 1 | 17 | 18 | 91 |
| | | Oct. 13, 1999 | | | | | | | | | | | | |
| 11 | HAGAN21 | PTA-841 | Uni-ZAP XR | 634 | 659 | 1 | 659 | | 452 | 1571 | 1 | | | 4 |
| | | Oct. 13, 1999 | | | | | | | | | | | | |
| 11 | HAGAN21 | PTA-841 | Uni-ZAP XR | 635 | 189 | 1 | 189 | | 146 | 1572 | 1 | 13 | 14 | 14 |
| | | Oct. 13, 1999 | | | | | | | | | | | | |
| 11 | HAGAN21 | PTA-841 | Uni-ZAP XR | 636 | 637 | 1 | 637 | | 321 | 1573 | 1 | | | 6 |
| | | Oct. 13, 1999 | | | | | | | | | | | | |
| 12 | HAGBZ81 | 209118 | Uni-ZAP XR | 22 | 1382 | 24 | 1382 | | 65 | 959 | 1 | 30 | 31 | 49 |
| | | Jun. 12, 1997 | | | | | | | | | | | | |
| 13 | HAGDG59 | 209277 | Uni-ZAP XR | 23 | 1734 | 44 | 1717 | 124 | 124 | 960 | 1 | 18 | 19 | 300 |
| | | Sep. 18, 1997 | | | | | | | | | | | | |
| 14 | HAGDI35 | 209852 | Uni-ZAP XR | 24 | 1357 | 1 | 1338 | 318 | 318 | 961 | 1 | 25 | 26 | 93 |
| | | May 07, 1998 | | | | | | | | | | | | |
| 15 | HAGFG51 | 203364 | Uni-ZAP XR | 25 | 1313 | 1 | 1313 | 163 | 163 | 962 | 1 | 23 | 24 | 43 |
| | | Oct. 19, 1998 | | | | | | | | | | | | |
| 16 | HAGFI62 | 209782 | Uni-ZAP XR | 26 | 1003 | 368 | 992 | 429 | 429 | 963 | 1 | 28 | 29 | 91 |
| | | Apr. 20, 1998 | | | | | | | | | | | | |
| 17 | HAGFY16 | 97923 | Uni-ZAP XR | 27 | 1963 | 209 | 1922 | 251 | 251 | 964 | 1 | 28 | 29 | 198 |
| | | Mar. 07, 1997 | | | | | | | | | | | | |
| | | 209071 | | | | | | | | | | | | |
| | | May 22, 1997 | | | | | | | | | | | | |
| 17 | HAGFY16 | 97923 | Uni-ZAP XR | 637 | 1830 | 87 | 1786 | 128 | 128 | 1574 | 1 | 26 | 27 | 45 |
| | | Mar. 07, 1997 | | | | | | | | | | | | |
| | | 209071 | | | | | | | | | | | | |
| | | May 22, 1997 | | | | | | | | | | | | |
| 18 | HAHDB16 | 209626 | Uni-ZAP XR | 28 | 796 | 1 | 796 | 93 | 93 | 965 | 1 | 20 | 21 | 50 |
| | | Feb. 12, 1998 | | | | | | | | | | | | |
| 19 | HAHDR32 | 209626 | Uni-ZAP XR | 29 | 1256 | 365 | 1256 | 435 | 435 | 966 | 1 | 25 | 26 | 181 |
| | | Feb. 12, 1998 | | | | | | | | | | | | |
| 20 | HAIBO71 | 209145 | Uni-ZAP XR | 30 | 752 | 172 | 752 | 325 | 325 | 967 | 1 | 28 | 29 | 66 |
| | | Jul. 17, 1997 | | | | | | | | | | | | |
| 21 | HAIBP89 | 209877 | Uni-ZAP XR | 31 | 2243 | 173 | 2243 | 311 | 311 | 968 | 1 | 27 | 28 | 317 |
| | | May 18, 1998 | | | | | | | | | | | | |
| 21 | HAIBP89 | 209877 | Uni-ZAP XR | 638 | 1025 | 1 | 1025 | | 1 | 1575 | 1 | 1 | 2 | 18 |
| | | May 18, 1998 | | | | | | | | | | | | |
| 22 | HAICP19 | 209009 | Uni-ZAP XR | 32 | 1624 | 89 | 1483 | 128 | 128 | 969 | 1 | 18 | 19 | 446 |
| | | Apr. 28, 1997 | | | | | | | | | | | | |
| 23 | HAIFL18 | 209852 | Uni-ZAP XR | 33 | 879 | 1 | 879 | 274 | 274 | 970 | 1 | 29 | 30 | 140 |
| | | May 07, 1998 | | | | | | | | | | | | |
| 24 | HAJAF57 | 203364 | pCMVSport | 34 | 2761 | 1 | 2761 | 43 | 43 | 971 | 1 | 1 | 2 | 94 |
| | | Oct. 19, 1998 | 3.0 | | | | | | | | | | | |
| 25 | HAJBR69 | 209626 | pCMVSport | 35 | 755 | 1 | 755 | 262 | 262 | 972 | 1 | 19 | 20 | 53 |
| | | Feb. 12, 1998 | 3.0 | | | | | | | | | | | |
| 26 | HAJBZ75 | 209603 | pCMVSport | 36 | 2089 | 10 | 2085 | 49 | 49 | 973 | 1 | 22 | 23 | 607 |
| | | Jan. 29, 1998 | 3.0 | | | | | | | | | | | |
| 27 | HAMFK58 | 209641 | pCMVSport | 37 | 785 | 1 | 785 | 279 | 279 | 974 | 1 | 31 | 32 | 79 |
| | | Feb. 25, 1998 | 3.0 | | | | | | | | | | | |
| 28 | HAMGG68 | 209878 | pCMVSport | 38 | 1458 | 1 | 1458 | 312 | 312 | 975 | 1 | 20 | 21 | 55 |
| | | May 18, 1998 | 3.0 | | | | | | | | | | | |
| 29 | HANGG89 | PTA-1543 | pSport1 | 39 | 2657 | 348 | 2398 | 520 | 520 | 976 | 1 | 1 | 2 | 52 |
| | | Mar. 21, 2000 | | | | | | | | | | | | |
| 29 | HANGG89 | PTA-1543 | pSport1 | 639 | 2454 | 1 | 2454 | 125 | 125 | 1576 | 1 | 23 | 24 | 98 |
| | | Mar. 21, 2000 | | | | | | | | | | | | |
| 29 | HANGG89 | PTA-1543 | pSport1 | 640 | 1775 | 1 | 1775 | 70 | 70 | 1577 | 1 | 29 | 30 | 392 |
| | | Mar. 21, 2000 | | | | | | | | | | | | |
| 29 | HANGG89 | PTA-1543 | pSport1 | 641 | 1379 | 1 | 1379 | 78 | 78 | 1578 | 1 | 26 | 27 | 434 |
| | | Mar. 21, 2000 | | | | | | | | | | | | |
| 30 | HAPBS03 | 209651 | Uni-ZAP XR | 40 | 1503 | 45 | 1479 | 252 | 252 | 977 | 1 | 28 | 29 | 41 |
| | | Mar. 04, 1998 | | | | | | | | | | | | |
| 31 | HAPNY86 | 209511 | Uni-ZAP XR | 41 | 1280 | 1 | 1280 | 100 | 100 | 978 | 1 | 25 | 26 | 129 |
| | | Dec. 03, 1997 | | | | | | | | | | | | |
| 32 | HAPNY94 | 209889 | Uni-ZAP XR | 42 | 742 | 1 | 742 | 94 | 94 | 979 | 1 | 29 | 30 | 50 |
| | | May 22, 1998 | | | | | | | | | | | | |
| 33 | HAPPW30 | 209683 | Uni-ZAP XR | 43 | 1472 | 1 | 1472 | 59 | 59 | 980 | 1 | 22 | 23 | 264 |
| | | Mar. 20, 1998 | | | | | | | | | | | | |
| 33 | HAPPW30 | 209683 | Uni-ZAP XR | 642 | 1508 | 14 | 1501 | 54 | 54 | 1579 | 1 | 22 | 23 | 91 |
| | | Mar. 20, 1998 | | | | | | | | | | | | |
| 34 | HAPQT22 | 203070 | Uni-ZAP XR | 44 | 635 | 1 | 635 | 132 | 132 | 981 | 1 | 17 | 18 | 72 |
| | | Jul. 27, 1998 | | | | | | | | | | | | |
| 35 | HAPUC89 | 203570 | Uni-ZAP XR | 45 | 1153 | 1 | 1153 | 385 | 385 | 982 | 1 | 25 | 26 | 140 |
| | | Jan. 11, 1999 | | | | | | | | | | | | |
| 36 | HASAV70 | 97923 | Uni-ZAP XR | 46 | 729 | 1 | 729 | 94 | 94 | 983 | 1 | 20 | 21 | 110 |
| | | Mar. 07, 1997 | | | | | | | | | | | | |
| | | 209071 | | | | | | | | | | | | |
| | | May 22, 1997 | | | | | | | | | | | | |
| 36 | HASAV70 | 97923 | Uni-ZAP XR | 643 | 1412 | 10 | 733 | 103 | 103 | 1580 | 1 | 20 | 21 | 110 |
| | | Mar. 07, 1997 | | | | | | | | | | | | |
| | | 209071 | | | | | | | | | | | | |
| | | May 22, 1997 | | | | | | | | | | | | |
| 37 | HASCG84 | 209568 | Uni-ZAP XR | 47 | 1079 | 1 | 1079 | 216 | 216 | 984 | 1 | 32 | 33 | 53 |
| | | Jan. 06, 1998 | | | | | | | | | | | | |
| 38 | HATAC53 | 209651 | Uni-ZAP XR | 48 | 1959 | 1 | 1959 | 97 | 97 | 985 | 1 | 21 | 22 | 248 |
| | | Mar. 04, 1998 | | | | | | | | | | | | |
| 38 | HATAC53 | 209651 | Uni-ZAP XR | 644 | 1306 | 13 | 1306 | 99 | 99 | 1581 | 1 | 21 | 22 | 189 |
| | | Mar. 04, 1998 | | | | | | | | | | | | |
| 39 | HATBR65 | 209626 | Uni-ZAP XR | 49 | 812 | 1 | 812 | 252 | 252 | 986 | 1 | 16 | 17 | 64 |
| | | Feb. 12, 1998 | | | | | | | | | | | | |
| 40 | HATCB92 | 209683 | Uni-ZAP XR | 50 | 1756 | 1 | 1756 | 247 | 247 | 987 | 1 | 37 | 38 | 56 |
| | | Mar. 20, 1998 | | | | | | | | | | | | |
| 41 | HATCP77 | 209965 | Uni-ZAP XR | 51 | 2098 | 1 | 2098 | 37 | 37 | 988 | 1 | 21 | 22 | 182 |
| | | Jun. 11, 1998 | | | | | | | | | | | | |
| 42 | HATEE46 | 209407 | Uni-ZAP XR | 52 | 1675 | 136 | 863 | 241 | 241 | 989 | 1 | 21 | 22 | 53 |
| | | Oct. 23, 1997 | | | | | | | | | | | | |
| 43 | HBAFJ33 | 209603 | pSport1 | 53 | 1280 | 1 | 1252 | 60 | 60 | 990 | 1 | 15 | 16 | 110 |
| | | Jan. 29, 1998 | | | | | | | | | | | | |
| 44 | HBAFV19 | PTA-1543 | pSport1 | 54 | 953 | 1 | 953 | 6 | 6 | 991 | 1 | 1 | 2 | 258 |
| | | Mar. 21, 2000 | | | | | | | | | | | | |
| 45 | HBAMB34 | 209324 | pSport1 | 55 | 1027 | 1 | 1027 | 87 | 87 | 992 | 1 | 35 | 36 | 48 |
| | | Oct. 02, 1997 | | | | | | | | | | | | |
| 46 | HBCPB32 | PTA-2075 | pSport1 | 56 | 1368 | 1 | 1368 | 88 | 88 | 993 | 1 | 37 | 38 | 202 |
| | | Jun. 09, 2000 | | | | | | | | | | | | |
| 46 | HBCPB32 | PTA-2075 | pSport1 | 645 | 729 | 1 | 729 | 89 | 89 | 1582 | 1 | 37 | 38 | 196 |
| | | Jun. 09, 2000 | | | | | | | | | | | | |
| 47 | HBCQL32 | PTA-2075 | pSport1 | 57 | 402 | 1 | 402 | 26 | 26 | 994 | 1 | 20 | 21 | 80 |
| | | Jun. 09, 2000 | | | | | | | | | | | | |
| 47 | HBCQL32 | PTA-2075 | pSport1 | 646 | 1180 | 741 | 1180 | 760 | 760 | 1583 | 1 | 20 | 21 | 80 |
| | | Jun. 09, 2000 | | | | | | | | | | | | |
| 48 | HBGNU56 | PTA-2073 | Uni-ZAP XR | 58 | 864 | 1 | 864 | 125 | 125 | 995 | 1 | 21 | 22 | 185 |
| | | Jun. 09, 2000 | | | | | | | | | | | | |
| 48 | HBGNU56 | PTA-2073 | Uni-ZAP XR | 647 | 941 | 1 | 941 | 79 | 79 | 1584 | 1 | 21 | 22 | 178 |
| | | Jun. 09, 2000 | | | | | | | | | | | | |
| 48 | HBGNU56 | PTA-2073 | Uni-ZAP XR | 648 | 988 | 804 | 853 | | 2 | 1585 | 1 | 1 | 2 | 219 |
| | | Jun. 09, 2000 | | | | | | | | | | | | |
| 49 | HBHAD12 | 209009 | Uni-ZAP XR | 59 | 786 | 1 | 786 | | 176 | 996 | 1 | 17 | 18 | 23 |
| | | Apr. 28, 1997 | | | | | | | | | | | | |
| 50 | HBHMA23 | 209782 | pSport1 | 60 | 1175 | 2 | 1175 | 71 | 71 | 997 | 1 | 24 | 25 | 197 |
| | | Apr. 20, 1998 | | | | | | | | | | | | |
| 50 | HBHMA23 | 209782 | pSport1 | 649 | 1172 | 1 | 1172 | 70 | 70 | 1586 | 1 | 24 | 25 | 76 |
| | | Apr. 20, 1998 | | | | | | | | | | | | |
| 51 | HBIMB51 | 209683 | pCMVSport | 61 | 537 | 1 | 537 | 98 | 98 | 998 | 1 | 21 | 22 | 146 |
| | | Mar. 20, 1998 | 3.0 | | | | | | | | | | | |
| 51 | HBIMB51 | 209683 | pCMVSport | 650 | 526 | 1 | 526 | 93 | 93 | 1587 | 1 | 21 | 22 | 130 |
| | | Mar. 20, 1998 | 3.0 | | | | | | | | | | | |
| 52 | HBINS58 | PTA-885 | pCMVSport | 62 | 843 | 1 | 843 | 57 | 57 | 999 | 1 | 30 | 31 | 174 |
| | | Oct. 28, 1999 | 3.0 | | | | | | | | | | | |
| 52 | HBINS58 | PTA-885 | pCMVSport | 651 | 1566 | 1 | 1566 | 71 | 71 | 1588 | 1 | 29 | 30 | 173 |
| | | Oct. 28, 1999 | 3.0 | | | | | | | | | | | |
| 52 | HBINS58 | PTA-885 | pCMVSport | 652 | 1067 | 1 | 1067 | 100 | 100 | 1589 | 1 | 29 | 30 | 210 |
| | | Oct. 28, 1999 | 3.0 | | | | | | | | | | | |
| 53 | HBJFU48 | 209125 | Uni-ZAP XR | 63 | 849 | 1 | 849 | 20 | 20 | 1000 | 1 | 39 | 40 | 40 |
| | | Jun. 19, 1997 | | | | | | | | | | | | |
| 54 | HBJIY92 | 203071 | Uni-ZAP XR | 64 | 2434 | 487 | 2366 | 548 | 548 | 1001 | 1 | 29 | 30 | 40 |
| | | Jul. 27, 1998 | | | | | | | | | | | | |
| 55 | HBJLC01 | 209651 | Uni-ZAP XR | 65 | 872 | 1 | 872 | 87 | 87 | 1002 | 1 | 34 | 35 | 46 |
| | | Mar. 04, 1998 | | | | | | | | | | | | |
| 56 | HBJLF01 | 209877 | Uni-ZAP XR | 66 | 1932 | 201 | 1931 | 217 | 217 | 1003 | 1 | 46 | 47 | 244 |
| | | May 18, 1998 | | | | | | | | | | | | |
| 57 | HBJLH40 | 203499 | Uni-ZAP XR | 67 | 1853 | 1 | 1853 | 74 | 74 | 1004 | 1 | 30 | 31 | 74 |
| | | Dec. 01, 1998 | | | | | | | | | | | | |
| 58 | HBJNC59 | PTA-622 | Uni-ZAP XR | 68 | 1061 | 1 | 1061 | 66 | 66 | 1005 | 1 | 22 | 23 | 245 |
| | | Sep. 02, 1999 | | | | | | | | | | | | |
| 58 | HBJNC59 | PTA-622 | Uni-ZAP XR | 653 | 1021 | 1 | 1021 | 66 | 66 | 1590 | 1 | 22 | 23 | 99 |
| | | Sep. 02, 1999 | | | | | | | | | | | | |
| 58 | HBJNC59 | PTA-622 | Uni-ZAP XR | 654 | 1086 | 1 | 1023 | 64 | 64 | 1591 | 1 | 22 | 23 | 245 |
| | | Sep. 02, 1999 | | | | | | | | | | | | |
| 59 | HBMCI50 | 97978 | pBluescript | 69 | 920 | 1 | 920 | 156 | 156 | 1006 | 1 | 29 | 30 | 83 |
| | | Mar. 27, 1997 | | | | | | | | | | | | |
| | | 209075 | | | | | | | | | | | | |
| | | May 22, 1997 | | | | | | | | | | | | |
| 60 | HBNAW17 | 209242 | Uni-ZAP XR | 70 | 601 | 1 | 601 | 77 | 77 | 1007 | 1 | 37 | 38 | 61 |
| | | Sep. 12, 1997 | | | | | | | | | | | | |
| 61 | HBOEG11 | PTA-2072 | pSport1 | 71 | 1356 | 1 | 1356 | 57 | 57 | 1008 | 1 | 22 | 23 | 250 |
| | | Jun. 09, 2000 | | | | | | | | | | | | |
| 61 | HBOEG11 | PTA-2072 | pSport1 | 655 | 1352 | 1 | 1352 | 53 | 53 | 1592 | 1 | 22 | 23 | 250 |
| | | Jun. 09, 2000 | | | | | | | | | | | | |
| 61 | HBOEG11 | PTA-2072 | pSport1 | 656 | 1337 | 1 | 1289 | 47 | 47 | 1593 | 1 | 22 | 23 | 250 |
| | | Jun. 09, 2000 | | | | | | | | | | | | |
| 62 | HBOEG69 | 203081 | pSport1 | 72 | 1411 | 1 | 1411 | 302 | 302 | 1009 | 1 | 19 | 20 | 54 |
| | | Jul. 30, 1998 | | | | | | | | | | | | |
| 63 | HBXFL29 | 203858 | ZAP Express | 73 | 2229 | 376 | 2210 | 560 | 560 | 1010 | 1 | 31 | 32 | 57 |
| | | Mar. 18, 1999 | | | | | | | | | | | | |
| 64 | HCACU58 | 209626 | Uni-ZAP XR | 74 | 1554 | 1 | 1554 | 137 | 137 | 1011 | 1 | 30 | 31 | 83 |
| | | Feb. 12, 1998 | | | | | | | | | | | | |
| 65 | HCACV51 | 209551 | Uni-ZAP XR | 75 | 2083 | 1 | 2083 | 168 | 168 | 1012 | 1 | 31 | 32 | 81 |
| | | Dec. 12, 1997 | | | | | | | | | | | | |
| 65 | HCACV51 | 209551 | Uni-ZAP XR | 657 | 2092 | 1 | 2092 | 173 | 173 | 1594 | 1 | 31 | 32 | 281 |
| | | Dec. 12, 1997 | | | | | | | | | | | | |
| 66 | HCDAF84 | 209300 | Uni-ZAP XR | 76 | 427 | 1 | 427 | 168 | 168 | 1013 | 1 | 18 | 19 | 56 |
| | | Sep. 25, 1997 | | | | | | | | | | | | |
| 67 | HCE1Q89 | 209242 | Uni-ZAP XR | 77 | 863 | 1 | 863 | 74 | 74 | 1014 | 1 | 17 | 18 | 88 |
| | | Sep. 12, 1997 | | | | | | | | | | | | |
| 68 | HCE2F54 | 209626 | Uni-ZAP XR | 78 | 1276 | 19 | 1256 | 166 | 166 | 1015 | 1 | 19 | 20 | 319 |
| | | Feb. 12, 1998 | | | | | | | | | | | | |
| 69 | HCEFB80 | PTA-2069 | Uni-ZAP XR | 79 | 2494 | 1 | 2494 | 12 | 12 | 1016 | 1 | 35 | 36 | 89 |
| | | Jun. 09, 2000 | | | | | | | | | | | | |
| 69 | HCEFB80 | PTA-2069 | Uni-ZAP XR | 658 | 2494 | 1 | 2451 | 5 | 5 | 1595 | 1 | 35 | 36 | 89 |
| | | Jun. 09, 2000 | | | | | | | | | | | | |
| 70 | HCEGR33 | 209090 | Uni-ZAP XR | 80 | 1630 | 1 | 1630 | 243 | 243 | 1017 | 1 | 18 | 19 | 31 |
| | | Jun. 05, 1997 | | | | | | | | | | | | |
| 71 | HCEMP62 | 209745 | Uni-ZAP XR | 81 | 1860 | 269 | 1726 | 352 | 352 | 1018 | 1 | 30 | 31 | 187 |
| | | Apr. 07, 1998 | | | | | | | | | | | | |
| 71 | HCEMP62 | 209745 | Uni-ZAP XR | 659 | 1957 | 582 | 1823 | 19 | 19 | 1596 | 1 | 33 | 34 | 335 |
| | | Apr. 07, 1998 | | | | | | | | | | | | |
| 72 | HCENK38 | 209651 | Uni-ZAP XR | 82 | 1509 | 1 | 1509 | 10 | 10 | 1019 | 1 | 28 | 29 | 52 |
| | | Mar. 04, 1998 | | | | | | | | | | | | |
| 73 | HCEWE17 | PTA-842 | Uni-ZAP XR | 83 | 967 | 1 | 967 | 117 | 117 | 1020 | 1 | 23 | 24 | 106 |
| | | Oct. 13, 1999 | | | | | | | | | | | | |
| 73 | HCEWE17 | PTA-842 | Uni-ZAP XR | 660 | 730 | 247 | 730 | 500 | 500 | 1597 | 1 | 19 | 20 | 27 |
| | | Oct. 13, 1999 | | | | | | | | | | | | |
| 73 | HCEWE17 | PTA-842 | Uni-ZAP XR | 661 | 550 | 1 | 550 | | 156 | 1598 | 1 | 1 | 2 | 54 |
| | | Oct. 13, 1999 | | | | | | | | | | | | |
| 74 | HCEWE20 | 209300 | Uni-ZAP XR | 84 | 885 | 13 | 885 | 166 | 166 | 1021 | 1 | 18 | 19 | 51 |
| | | Sep. 25, 1997 | | | | | | | | | | | | |
| 75 | HCFCU88 | 209324 | pSport1 | 85 | 853 | 1 | 853 | 217 | 217 | 1022 | 1 | 18 | 19 | 97 |
| | | Oct. 02, 1997 | | | | | | | | | | | | |
| 76 | HCFMV71 | 209242 | pSport1 | 86 | 400 | 1 | 400 | 31 | 31 | 1023 | 1 | 24 | 25 | 58 |
| | | Sep. 12, 1997 | | | | | | | | | | | | |
| 77 | HCFNN01 | 209086 | pSport1 | 87 | 1261 | 154 | 1261 | 254 | 254 | 1024 | 1 | 27 | 28 | 43 |
| | | May 29, 1997 | | | | | | | | | | | | |
| 78 | HCFOM18 | 209324 | pSport1 | 88 | 639 | 1 | 639 | 28 | 28 | 1025 | 1 | 20 | 21 | 63 |
| | | Oct. 02, 1997 | | | | | | | | | | | | |
| 79 | HCHNF25 | 209651 | pSport1 | 89 | 3576 | 1 | 3576 | 1130 | 1130 | 1026 | 1 | 30 | 31 | 169 |
| | | Mar. 04, 1998 | | | | | | | | | | | | |
| 79 | HCHNF25 | 209651 | pSport1 | 662 | 807 | 1 | 807 | 180 | 180 | 1599 | 1 | 30 | 31 | 147 |
| | | Mar. 04, 1998 | | | | | | | | | | | | |
| 80 | HCMSQ56 | 209877 | Uni-ZAP XR | 90 | 1262 | 1 | 1262 | 148 | 148 | 1027 | 1 | 19 | 20 | 88 |
| | | May 18, 1998 | | | | | | | | | | | | |
| 81 | HCMST14 | 209346 | Uni-ZAP XR | 91 | 614 | 1 | 614 | 136 | 136 | 1028 | 1 | 24 | 25 | 47 |
| | | Oct. 09, 1997 | | | | | | | | | | | | |
| 82 | HCMTB45 | 209368 | Uni-ZAP XR | 92 | 958 | 1 | 958 | 215 | 215 | 1029 | 1 | 20 | 21 | 123 |
| | | Oct. 16, 1997 | | | | | | | | | | | | |
| 82 | HCMTB45 | 209368 | Uni-ZAP XR | 663 | 946 | 1 | 946 | 209 | 209 | 1600 | 1 | 27 | 28 | 70 |
| | | Oct. 16, 1997 | | | | | | | | | | | | |
| 83 | HCNSB61 | 209242 | pBluescript | 93 | 712 | 1 | 712 | 218 | 218 | 1030 | 1 | 21 | 22 | 43 |
| | | Sep. 12, 1997 | | | | | | | | | | | | |
| 84 | HCNSD93 | 209627 | pBluescript | 94 | 1106 | 1 | 1106 | 139 | 139 | 1031 | 1 | 21 | 22 | 46 |
| | | Feb. 12, 1998 | | | | | | | | | | | | |
| 85 | HCNSM70 | 209580 | pBluescript | 95 | 1089 | 1 | 1089 | 107 | 107 | 1032 | 1 | 26 | 27 | 215 |
| | | Jan. 14, 1998 | | | | | | | | | | | | |
| 85 | HCNSM70 | 209580 | pBluescript | 664 | 1145 | 62 | 1145 | 161 | 161 | 1601 | 1 | 26 | 27 | 91 |
| | | Jan. 14, 1998 | | | | | | | | | | | | |
| 86 | HCOOS80 | PTA-2076 | pSport1 | 96 | 1254 | 1 | 1254 | 36 | 36 | 1033 | 1 | 26 | 27 | 158 |
| | | Jun. 09, 2000 | | | | | | | | | | | | |
| 86 | HCOOS80 | PTA-2076 | pSport1 | 665 | 869 | 15 | 869 | 40 | 40 | 1602 | 1 | 26 | 27 | 158 |
| | | Jun. 09, 2000 | | | | | | | | | | | | |
| 86 | HCOOS80 | PTA-2076 | pSport1 | 666 | 692 | 339 | 506 | | 1 | 1603 | 1 | 1 | 2 | 106 |
| | | Jun. 09, 2000 | | | | | | | | | | | | |
| 87 | HCUBS50 | 209215 | ZAP Express | 97 | 865 | 1 | 865 | 88 | 88 | 1034 | 1 | 34 | 35 | 38 |
| | | Aug. 21, 1997 | | | | | | | | | | | | |
| 88 | HCUCK44 | 209853 | ZAP Express | 98 | 1139 | 573 | 1133 | 593 | 593 | 1035 | 1 | 30 | 31 | 60 |
| | | May 07, 1998 | | | | | | | | | | | | |
| 89 | HCUEO60 | 209215 | ZAP Express | 99 | 1222 | 1 | 1222 | 102 | 102 | 1036 | 1 | 34 | 35 | 64 |
| | | Aug. 21, 1997 | | | | | | | | | | | | |
| 90 | HCUHK65 | 209641 | ZAP Express | 100 | 367 | 1 | 367 | 80 | 80 | 1037 | 1 | 26 | 27 | 79 |
| | | Feb. 25, 1998 | | | | | | | | | | | | |
| 90 | HCUHK65 | 209641 | ZAP Express | 667 | 3113 | 2577 | 2946 | 770 | 770 | 1604 | 1 | 30 | 31 | 708 |
| | | Feb. 25, 1998 | | | | | | | | | | | | |
| 91 | HCUIM65 | 209324 | ZAP Express | 101 | 875 | 331 | 736 | 557 | 557 | 1038 | 1 | 27 | 28 | 47 |
| | | Oct. 02, 1997 | | | | | | | | | | | | |
| 92 | HCWEB58 | PTA-883 | ZAP Express | 102 | 1283 | 1 | 1283 | 148 | 148 | 1039 | 1 | 27 | 28 | 343 |
| | | Oct. 28, 1999 | | | | | | | | | | | | |
| 92 | HCWEB58 | PTA-883 | ZAP Express | 668 | 980 | 1 | 980 | 247 | 247 | 1605 | 1 | 27 | 28 | 244 |
| | | Oct. 28, 1999 | | | | | | | | | | | | |
| 92 | HCWEB58 | PTA-883 | ZAP Express | 669 | 888 | 1 | 888 | 155 | 155 | 1606 | 1 | 27 | 28 | 244 |
| | | Oct. 28, 1999 | | | | | | | | | | | | |
| 93 | HCWGU37 | PTA-883 | ZAP Express | 103 | 2777 | 1 | 2777 | 194 | 194 | 1040 | 1 | | | 10 |
| | | Oct. 28, 1999 | | | | | | | | | | | | |
| 93 | HCWGU37 | PTA-883 | ZAP Express | 670 | 1651 | 1 | 1651 | 187 | 187 | 1607 | 1 | | | 10 |
| | | Oct. 28, 1999 | | | | | | | | | | | | |
| 94 | HCWKC15 | 209324 | ZAP Express | 104 | 710 | 1 | 710 | 37 | 37 | 1041 | 1 | 18 | 19 | 40 |
| | | Oct. 02, 1997 | | | | | | | | | | | | |
| 95 | HCWLD74 | 209626 | ZAP Express | 105 | 1540 | 1 | 1540 | 138 | 138 | 1042 | 1 | 21 | 22 | 65 |
| | | Feb. 12, 1998 | | | | | | | | | | | | |
| 96 | HCWUM50 | 209627 | ZAP Express | 106 | 1428 | 208 | 1428 | 270 | 270 | 1043 | 1 | 30 | 31 | 45 |
| | | Feb. 12, 1998 | | | | | | | | | | | | |
| 97 | HCYBG92 | 209563 | pBluescript | 107 | 3061 | 1 | 2661 | 118 | 118 | 1044 | 1 | 21 | 22 | 274 |
| | | Dec. 18, 1997 | SK− | | | | | | | | | | | |
| 98 | HDABR72 | 209965 | pSport1 | 108 | 1691 | 1 | 1691 | 33 | 33 | 1045 | 1 | 29 | 30 | 146 |
| | | Jun. 11, 1998 | | | | | | | | | | | | |
| 98 | HDABR72 | 209965 | pSport1 | 671 | 1746 | 1 | 1746 | 28 | 28 | 1608 | 1 | 29 | 30 | 146 |
| | | Jun. 11, 1998 | | | | | | | | | | | | |
| 99 | HDHEB60 | 209215 | pCMVSport | 109 | 1421 | 235 | 1421 | 568 | 568 | 1046 | 1 | 24 | 25 | 108 |
| | | Aug. 21, 1997 | 2.0 | | | | | | | | | | | |
| 100 | HDHIA94 | 209627 | pCMVSport | 110 | 1489 | 1 | 1489 | 154 | 154 | 1047 | 1 | 30 | 31 | 168 |
| | | Feb. 12, 1998 | 2.0 | | | | | | | | | | | |
| 100 | HDHIA94 | 209627 | pCMVSport | 672 | 2492 | 1 | 2492 | 163 | 163 | 1609 | 1 | 30 | 31 | 48 |
| | | Feb. 12, 1998 | 2.0 | | | | | | | | | | | |
| 101 | HDHMA72 | 209324 | pCMVSport | 111 | 4463 | 216 | 2158 | 287 | 287 | 1048 | 1 | 36 | 37 | 315 |
| | | Oct. 02, 1997 | 2.0 | | | | | | | | | | | |
| 102 | HDLAC10 | 209745 | pCMVSport | 112 | 1477 | 1 | 1477 | 132 | 132 | 1049 | 1 | 29 | 30 | 81 |
| | | Apr. 07, 1998 | 2.0 | | | | | | | | | | | |
| 103 | HDLAO28 | PTA-499 | pCMVSport | 113 | 1984 | 1 | 1984 | 259 | 259 | 1050 | 1 | 21 | 22 | 76 |
| | | Aug. 11, 1999 | 2.0 | | | | | | | | | | | |
| 104 | HDPBI32 | 209853 | pCMVSport | 114 | 1513 | 1 | 1513 | 37 | 37 | 1051 | 1 | 315 | 316 | 316 |
| | | May 07, 1998 | 3.0 | | | | | | | | | | | |
| 104 | HDPBI32 | 209853 | pCMVSport | 673 | 1579 | 598 | 1184 | 103 | 103 | 1610 | 1 | 30 | 31 | 271 |
| | | May 07, 1998 | 3.0 | | | | | | | | | | | |
| 104 | HDPBI32 | 209853 | pCMVSport | 674 | 587 | 1 | 587 | 51 | 51 | 1611 | 1 | 35 | 36 | 138 |
| | | May 07, 1998 | 3.0 | | | | | | | | | | | |
| 105 | HDPBQ71 | 209877 | pCMVSport | 115 | 2312 | 1 | 2312 | 93 | 93 | 1052 | 1 | 33 | 34 | 612 |
| | | May 18, 1998 | 3.0 | | | | | | | | | | | |
| 105 | HDPBQ71 | 209877 | pCMVSport | 675 | 2242 | 6 | 2242 | 24 | 24 | 1612 | 1 | 33 | 34 | 612 |
| | | May 18, 1998 | 3.0 | | | | | | | | | | | |
| 105 | HDPBQ71 | 209877 | pCMVSport | 676 | 2381 | 146 | 2381 | 165 | 165 | 1613 | 1 | 33 | 34 | 456 |
| | | May 18, 1998 | 3.0 | | | | | | | | | | | |
| 106 | HDPCJ91 | 209877 | pCMVSport | 116 | 6107 | 1 | 6107 | 131 | 131 | 1053 | 1 | 28 | 29 | 51 |
| | | May 18, 1998 | 3.0 | | | | | | | | | | | |
| 107 | HDPCO25 | 209125 | pCMVSport | 117 | 767 | 76 | 767 | 182 | 182 | 1054 | 1 | 20 | 21 | 53 |
| | | Jun. 19, 1997 | 3.0 | | | | | | | | | | | |
| 108 | HDPCY37 | 209568 | pCMVSport | 118 | 1932 | 45 | 1932 | 76 | 76 | 1055 | 1 | 21 | 22 | 578 |
| | | Jan. 06, 1998 | 3.0 | | | | | | | | | | | |
| 108 | HDPCY37 | 209568 | pCMVSport | 677 | 1931 | 45 | 1931 | 76 | 76 | 1614 | 1 | 21 | 22 | 264 |
| | | Jan. 06, 1998 | 3.0 | | | | | | | | | | | |
| 109 | HDPFB02 | PTA-622 | pCMVSport | 119 | 3436 | 1 | 3436 | 173 | 173 | 1056 | 1 | 19 | 20 | 152 |
| | | Sep. 02, 1999 | 3.0 | | | | | | | | | | | |
| 109 | HDPFB02 | PTA-622 | pCMVSport | 678 | 1517 | 1 | 1517 | 139 | 139 | 1615 | 1 | 28 | 29 | 316 |
| | | Sep. 02, 1999 | 3.0 | | | | | | | | | | | |
| 109 | HDPFB02 | PTA-622 | pCMVSport | 679 | 2751 | 1976 | 2751 | 218 | 218 | 1616 | 1 | 18 | 19 | 302 |
| | | Sep. 02, 1999 | 3.0 | | | | | | | | | | | |
| 110 | HDPFF39 | 209511 | pCMVSport | 120 | 1256 | 1 | 1256 | 175 | 175 | 1057 | 1 | 18 | 19 | 196 |
| | | Dec. 03, 1997 | 3.0 | | | | | | | | | | | |
| 111 | HDPFP29 | 209626 | pCMVSport | 121 | 1057 | 1 | 1057 | 293 | 293 | 1058 | 1 | 30 | 31 | 52 |
| | | Feb. 12, 1998 | 3.0 | | | | | | | | | | | |
| 112 | HDPGI49 | 203070 | pCMVSport | 122 | 2683 | 1 | 2640 | 266 | 266 | 1059 | 1 | 29 | 30 | 72 |
| | | Jul. 27, 1998 | 3.0 | | | | | | | | | | | |
| 113 | HDPGP94 | 203364 | pCMVSport | 123 | 3881 | 1 | 3881 | 256 | 256 | 1060 | 1 | 18 | 19 | 74 |
| | | Oct. 19, 1998 | 3.0 | | | | | | | | | | | |
| 114 | HDPHI51 | 209125 | pCMVSport | 124 | 728 | 1 | 728 | 245 | 245 | 1061 | 1 | 30 | 31 | 40 |
| | | Jun. 19, 1997 | 3.0 | | | | | | | | | | | |
| 115 | HDPJF37 | 209852 | pCMVSport | 125 | 986 | 1 | 986 | 196 | 196 | 1062 | 1 | 23 | 24 | 57 |
| | | May 07, 1998 | 3.0 | | | | | | | | | | | |
| 116 | HDPMM88 | PTA-848 | pCMVSport | 126 | 4893 | 1 | 4893 | 100 | 100 | 1063 | 1 | 37 | 38 | 937 |
| | | Oct. 13, 1999 | 3.0 | | | | | | | | | | | |
| 116 | HDPMM88 | PTA-848 | pCMVSport | 680 | 468 | 1 | 468 | 141 | 141 | 1617 | 1 | 20 | 21 | 109 |
| | | Oct. 13, 1999 | 3.0 | | | | | | | | | | | |
| 116 | HDPMM88 | PTA-848 | pCMVSport | 681 | 181 | 1 | 181 | | 44 | 1618 | 1 | 7 | 8 | 46 |
| | | Oct. 13, 1999 | 3.0 | | | | | | | | | | | |
| 116 | HDPMM88 | PTA-848 | pCMVSport | 682 | 612 | 1 | 612 | | 419 | 1619 | 1 | | | 6 |
| | | Oct. 13, 1999 | 3.0 | | | | | | | | | | | |
| 116 | HDPMM88 | PTA-848 | pCMVSport | 683 | 1024 | 1 | 1024 | | 111 | 1620 | 1 | 5 | 6 | 11 |
| | | Oct. 13, 1999 | 3.0 | | | | | | | | | | | |
| 116 | HDPMM88 | PTA-848 | pCMVSport | 684 | 366 | 18 | 321 | | 167 | 1621 | 1 | 1 | 2 | 56 |
| | | Oct. 13, 1999 | 3.0 | | | | | | | | | | | |
| 116 | HDPMM88 | PTA-848 | pCMVSport | 685 | 519 | 1 | 519 | | 28 | 1622 | 1 | 1 | 2 | 53 |
| | | Oct. 13, 1999 | 3.0 | | | | | | | | | | | |
| 117 | HDPNC61 | 209627 | pCMVSport | 127 | 1410 | 1 | 1410 | 20 | 20 | 1064 | 1 | 22 | 23 | 94 |
| | | Feb. 12, 1998 | 3.0 | | | | | | | | | | | |
| 118 | HDPND46 | 209627 | pCMVSport | 128 | 1727 | 1 | 1727 | 15 | 15 | 1065 | 1 | 22 | 23 | 484 |
| | | Feb. 12, 1998 | 3.0 | | | | | | | | | | | |
| 119 | HDPOE32 | PTA-622 | pCMVSport | 129 | 1353 | 1 | 1353 | 118 | 118 | 1066 | 1 | 34 | 35 | 151 |
| | | Sep. 02, 1999 | 3.0 | | | | | | | | | | | |
| 120 | HDPOH06 | 209745 | pCMVSport | 130 | 2504 | 1 | 2504 | 252 | 252 | 1067 | 1 | 29 | 30 | 242 |
| | | Apr. 07, 1998 | 3.0 | | | | | | | | | | | |
| 121 | HDPOZ56 | 209889 | pCMVSport | 131 | 1905 | 1 | 1905 | 91 | 91 | 1068 | 1 | 21 | 22 | 567 |
| | | May 22, 1998 | 3.0 | | | | | | | | | | | |
| 121 | HDPOZ56 | 209889 | pCMVSport | 686 | 1867 | 415 | 1867 | 103 | 103 | 1623 | 1 | 21 | 22 | 566 |
| | | May 22, 1998 | 3.0 | | | | | | | | | | | |
| 121 | HDPOZ56 | 209889 | pCMVSport | 687 | 1722 | 1 | 1722 | 59 | 59 | 1624 | 1 | 21 | 22 | 319 |
| | | May 22, 1998 | 3.0 | | | | | | | | | | | |
| 122 | HDPSP54 | 209782 | pCMVSport | 132 | 3091 | 2304 | 3091 | 2356 | 2356 | 1069 | 1 | 18 | 19 | 48 |
| | | Apr. 20, 1998 | 3.0 | | | | | | | | | | | |
| 122 | HDPSP54 | 209782 | pCMVSport | 688 | 536 | 1 | 536 | 179 | 179 | 1625 | 1 | 41 | 42 | 55 |
| | | Apr. 20, 1998 | 3.0 | | | | | | | | | | | |
| 123 | HDPTD15 | 209782 | pCMVSport | 133 | 1396 | 1 | 1396 | 223 | 223 | 1070 | 1 | 18 | 19 | 200 |
| | | Apr. 20, 1998 | 3.0 | | | | | | | | | | | |
| 124 | HDPTK41 | 209965 | pCMVSport | 134 | 1564 | 1 | 1564 | 39 | 39 | 1071 | 1 | 26 | 27 | 369 |
| | | Jun. 11, 1998 | 3.0 | | | | | | | | | | | |
| 125 | HDPUG50 | 209745 | pCMVSport | 135 | 1734 | 1 | 1734 | 22 | 22 | 1072 | 1 | 34 | 35 | 526 |
| | | Apr. 07, 1998 | 3.0 | | | | | | | | | | | |
| 126 | HDPUH26 | PTA-163 | pCMVSport | 136 | 2916 | 1 | 2916 | 90 | 90 | 1073 | 1 | 18 | 19 | 549 |
| | | Jun. 01, 1999 | 3.0 | | | | | | | | | | | |
| 127 | HDPUW68 | 203331 | pCMVSport | 137 | 1748 | 1 | 1748 | 40 | 40 | 1074 | 1 | 18 | 19 | 467 |
| | | Oct. 08, 1998 | 3.0 | | | | | | | | | | | |
| 128 | HDPVH60 | 203105 | pCMVSport | 138 | 3116 | 1 | 3100 | 8 | 8 | 1075 | 1 | 45 | 46 | 51 |
| | | Aug. 13, 1998 | 3.0 | | | | | | | | | | | |
| 129 | HDPVW11 | PTA-869 | pCMVSport | 139 | 2339 | 1 | 2339 | 67 | 67 | 1076 | 1 | 28 | 29 | 455 |
| | | Oct. 26, 1999 | 3.0 | | | | | | | | | | | |
| 129 | HDPVW11 | PTA-869 | pCMVSport | 689 | 397 | 1 | 397 | 50 | 50 | 1626 | 1 | 28 | 29 | 99 |
| | | Oct. 26, 1999 | 3.0 | | | | | | | | | | | |
| 130 | HDPWN93 | PTA-868 | pCMVSport | 140 | 2679 | 1 | 2669 | 45 | 45 | 1077 | 1 | 19 | 20 | 802 |
| | | Oct. 26, 1999 | 3.0 | | | | | | | | | | | |
| 130 | HDPWN93 | PTA-868 | pCMVSport | 690 | 716 | 1 | 716 | 35 | 35 | 1627 | 1 | 19 | 20 | 214 |
| | | Oct. 26, 1999 | 3.0 | | | | | | | | | | | |
| 130 | HDPWN93 | PTA-868 | pCMVSport | 691 | 2716 | 26 | 2716 | 27 | 27 | 1628 | 1 | 19 | 20 | 43 |
| | | Oct. 26, 1999 | 3.0 | | | | | | | | | | | |
| 131 | HDPWU34 | 209782 | pCMVSport | 141 | 1277 | 860 | 1277 | 117 | 117 | 1078 | 1 | 23 | 24 | 325 |
| | | Apr. 20, 1998 | 3.0 | | | | | | | | | | | |
| 131 | HDPWU34 | 209782 | pCMVSport | 692 | 427 | 1 | 427 | 111 | 111 | 1629 | 1 | 16 | 17 | 44 |
| | | Apr. 20, 1998 | 3.0 | | | | | | | | | | | |
| 132 | HDQHD03 | 203570 | pCMVSport | 142 | 1266 | 1 | 1266 | 274 | 274 | 1079 | 1 | 20 | 21 | 331 |
| | | Jan. 11, 1999 | 3.0 | | | | | | | | | | | |
| 132 | HDQHD03 | 203570 | pCMVSport | 693 | 1257 | 1 | 1257 | 259 | 259 | 1630 | 1 | 20 | 21 | 333 |
| | | Jan. 11, 1999 | 3.0 | | | | | | | | | | | |
| 133 | HDTBD53 | PTA-848 | pCMVSport | 143 | 2803 | 1 | 2803 | 288 | 288 | 1080 | 1 | 22 | 23 | 365 |
| | | Oct. 13, 1999 | 2.0 | | | | | | | | | | | |
| 133 | HDTBD53 | PTA-848 | pCMVSport | 694 | 3302 | 1 | 2718 | 292 | 292 | 1631 | 1 | 22 | 23 | 365 |
| | | Oct. 13, 1999 | 2.0 | | | | | | | | | | | |
| 134 | HDTBP04 | 209300 | pCMVSport | 144 | 961 | 1 | 961 | 70 | 70 | 1081 | 1 | 15 | 16 | 219 |
| | | Sep. 25, 1997 | 2.0 | | | | | | | | | | | |
| 134 | HDTBP04 | 209300 | pCMVSport | 695 | 959 | 1 | 959 | 65 | 65 | 1632 | 1 | 15 | 16 | 220 |
| | | Sep. 25, 1997 | 2.0 | | | | | | | | | | | |
| 135 | HDTDQ23 | 209965 | pCMVSport | 145 | 2207 | 1 | 2207 | 132 | 132 | 1082 | 1 | 20 | 21 | 56 |
| | | Jun. 11, 1998 | 2.0 | | | | | | | | | | | |
| 135 | HDTDQ23 | 209965 | pCMVSport | 696 | 2227 | 1 | 2206 | 148 | 148 | 1633 | 1 | 20 | 21 | 108 |
| | | Jun. 11, 1998 | 2.0 | | | | | | | | | | | |
| 135 | HDTDQ23 | 209965 | pCMVSport | 697 | 2214 | 1 | 2206 | 148 | 148 | 1634 | 1 | 20 | 21 | 73 |
| | | Jun. 11, 1998 | 2.0 | | | | | | | | | | | |
| 136 | HDTEK44 | PTA-867 | pCMVSport | 146 | 2070 | 20 | 2070 | | 691 | 1083 | 1 | 12 | 13 | 83 |
| | | Oct. 26, 1999 | 2.0 | | | | | | | | | | | |
| 136 | HDTEK44 | PTA-867 | pCMVSport | 698 | 1005 | 1 | 1005 | 175 | 175 | 1635 | 1 | 17 | 18 | 67 |
| | | Oct. 26, 1999 | 2.0 | | | | | | | | | | | |
| 136 | HDTEK44 | PTA-867 | pCMVSport | 699 | 2988 | 1 | 2988 | 116 | 116 | 1636 | 1 | 17 | 18 | 67 |
| | | Oct. 26, 1999 | 2.0 | | | | | | | | | | | |
| 136 | HDTEK44 | PTA-867 | pCMVSport | 700 | 2052 | 2 | 2052 | | 673 | 1637 | 1 | 12 | 13 | 83 |
| | | Oct. 26, 1999 | 2.0 | | | | | | | | | | | |
| 137 | HDTEN81 | 209463 | pCMVSport | 147 | 566 | 1 | 566 | 114 | 114 | 1084 | 1 | 17 | 18 | 85 |
| | | Nov. 14, 1997 | 2.0 | | | | | | | | | | | |
| 138 | HDTFE17 | PTA-868 | pCMVSport | 148 | 1242 | 1 | 1242 | 260 | 260 | 1085 | 1 | 20 | 21 | 29 |
| | | Oct. 26, 1999 | 2.0 | | | | | | | | | | | |
| 138 | HDTFE17 | PTA-868 | pCMVSport | 701 | 628 | 1 | 628 | 251 | 251 | 1638 | 1 | 20 | 21 | 29 |
| | | Oct. 26, 1999 | 2.0 | | | | | | | | | | | |
| 138 | HDTFE17 | PTA-868 | pCMVSport | 702 | 923 | 29 | 903 | | 101 | 1639 | 1 | 6 | 7 | 80 |
| | | Oct. 26, 1999 | 2.0 | | | | | | | | | | | |
| 139 | HDTGC73 | 209627 | pCMVSport | 149 | 712 | 1 | 712 | 386 | 386 | 1086 | 1 | 31 | 32 | 49 |
| | | Feb. 12, 1998 | 2.0 | | | | | | | | | | | |
| 140 | HDTIT10 | 203570 | pCMVSport | 150 | 1200 | 1 | 813 | 58 | 58 | 1087 | 1 | 56 | 57 | 297 |
| | | Jan. 11, 1999 | 2.0 | | | | | | | | | | | |
| 140 | HDTIT10 | 203570 | pCMVSport | 703 | 1159 | 1 | 805 | 161 | 161 | 1640 | 1 | 30 | 31 | 56 |
| | | Jan. 11, 1999 | 2.0 | | | | | | | | | | | |
| 141 | HDTMK50 | PTA-884 | pCMVSport | 151 | 1352 | 1 | 1352 | 154 | 154 | 1088 | 1 | 21 | 22 | 51 |
| | | Oct. 28, 1999 | 2.0 | | | | | | | | | | | |
| 141 | HDTMK50 | PTA-884 | pCMVSport | 704 | 912 | 1 | 912 | 164 | 164 | 1641 | 1 | 21 | 22 | 51 |
| | | Oct. 28, 1999 | 2.0 | | | | | | | | | | | |
| 141 | HDTMK50 | PTA-884 | pCMVSport | 705 | 321 | 1 | 321 | | 200 | 1642 | 1 | | | 1 |
| | | Oct. 28, 1999 | 2.0 | | | | | | | | | | | |
| 142 | HE2DY70 | 209877 | Uni-ZAP XR | 152 | 639 | 1 | 639 | 137 | 137 | 1089 | 1 | 45 | 46 | 58 |
| | | May 18, 1998 | | | | | | | | | | | | |
| 143 | HE2EB74 | 209225 | Uni-ZAP XR | 153 | 1434 | 311 | 1418 | 507 | 507 | 1090 | 1 | 15 | 16 | 19 |
| | | Aug. 28, 1997 | | | | | | | | | | | | |
| 144 | HE2EN04 | 209300 | Uni-ZAP XR | 154 | 370 | 1 | 370 | 57 | 57 | 1091 | 1 | 16 | 17 | 50 |
| | | Sep. 25, 1997 | | | | | | | | | | | | |
| 145 | HE2FV03 | 97955 | Uni-ZAP XR | 155 | 2067 | 1 | 1251 | 116 | 116 | 1092 | 1 | 21 | 22 | 42 |
| | | Mar. 13, 1997 | | | | | | | | | | | | |
| | | 209074 | | | | | | | | | | | | |
| | | May 22, 1997 | | | | | | | | | | | | |
| 146 | HE2NV57 | 209877 | Uni-ZAP XR | 156 | 867 | 1 | 867 | 99 | 99 | 1093 | 1 | 36 | 37 | 99 |
| | | May 18, 1998 | | | | | | | | | | | | |
| 147 | HE2PD49 | 209627 | Uni-ZAP XR | 157 | 1422 | 257 | 1404 | 337 | 337 | 1094 | 1 | 18 | 19 | 171 |
| | | Feb. 12, 1998 | | | | | | | | | | | | |
| 148 | HE2PY40 | 209965 | Uni-ZAP XR | 158 | 1288 | 1 | 1288 | 147 | 147 | 1095 | 1 | 22 | 23 | 83 |
| | | Jun. 11, 1998 | | | | | | | | | | | | |
| 149 | HE6EU50 | 97975 | Uni-ZAP XR | 159 | 1152 | 117 | 686 | 237 | 237 | 1096 | 1 | 20 | 21 | 34 |
| | | Apr. 04, 1997 | | | | | | | | | | | | |
| | | 209081 | | | | | | | | | | | | |
| | | May 29, 1997 | | | | | | | | | | | | |
| 150 | HE8DS15 | PTA-1544 | Uni-ZAP XR | 160 | 2199 | 1 | 2199 | 91 | 91 | 1097 | 1 | 24 | 25 | 72 |
| | | Mar. 21, 2000 | | | | | | | | | | | | |
| 151 | HE8MH91 | 209603 | Uni-ZAP XR | 161 | 1761 | 1 | 1761 | 63 | 63 | 1098 | 1 | 23 | 24 | 116 |
| | | Jan. 29, 1998 | | | | | | | | | | | | |
| 152 | HE8QV67 | PTA-2072 | Uni-ZAP XR | 162 | 1999 | 643 | 1999 | 502 | 502 | 1099 | 1 | 49 | 50 | 80 |
| | | Jun. 09, 2000 | | | | | | | | | | | | |
| 152 | HE8QV67 | PTA-2072 | Uni-ZAP XR | 706 | 2342 | 1956 | 2276 | | 256 | 1643 | 1 | 1 | 2 | 415 |
| | | Jun. 09, 2000 | | | | | | | | | | | | |
| 153 | HE9BK23 | 209683 | Uni-ZAP XR | 163 | 1636 | 1 | 1636 | 39 | 39 | 1100 | 1 | 21 | 22 | 309 |
| | | Mar. 20, 1998 | | | | | | | | | | | | |
| 154 | HE9CP41 | 209368 | Uni-ZAP XR | 164 | 1392 | 1 | 1392 | 132 | 132 | 1101 | 1 | 20 | 21 | 41 |
| | | Oct. 16, 1997 | | | | | | | | | | | | |
| 155 | HE9DG49 | 97923 | Uni-ZAP XR | 165 | 717 | 1 | 717 | 70 | 70 | 1102 | 1 | 28 | 29 | 201 |
| | | Mar. 07, 1997 | | | | | | | | | | | | |
| | | 209071 | | | | | | | | | | | | |
| | | May 22, 1997 | | | | | | | | | | | | |
| 155 | HE9DG49 | 97923 | Uni-ZAP XR | 707 | 717 | 1 | 717 | 70 | 70 | 1644 | 1 | 27 | 28 | 201 |
| | | Mar. 07, 1997 | | | | | | | | | | | | |
| | | 209071 | | | | | | | | | | | | |
| | | May 22, 1997 | | | | | | | | | | | | |
| 155 | HE9DG49 | 97923 | Uni-ZAP XR | 708 | 713 | 17 | 713 | 78 | 78 | 1645 | 1 | 28 | 29 | 203 |
| | | Mar. 07, 1997 | | | | | | | | | | | | |
| | | 209071 | | | | | | | | | | | | |
| | | May 22, 1997 | | | | | | | | | | | | |
| 156 | HE9HY07 | 209010 | Uni-ZAP XR | 166 | 832 | 1 | 832 | 35 | 35 | 1103 | 1 | 26 | 27 | 41 |
| | | Apr. 28, 1997 | | | | | | | | | | | | |
| | | 209085 | | | | | | | | | | | | |
| | | May 29, 1997 | | | | | | | | | | | | |
| 157 | HE9NN84 | | Uni-ZAP XR | 167 | 734 | 1 | 734 | 380 | 380 | 1104 | 1 | 38 | 39 | 53 |
| 158 | HE9OW20 | 203570 | Uni-ZAP XR | 168 | 1209 | 1 | 1209 | 129 | 129 | 1105 | 1 | 33 | 34 | 355 |
| | | Jan. 11, 1999 | | | | | | | | | | | | |
| 158 | HE9OW20 | 203570 | Uni-ZAP XR | 709 | 1165 | 1 | 1165 | 136 | 136 | 1646 | 1 | 30 | 31 | 313 |
| | | Jan. 11, 1999 | | | | | | | | | | | | |
| 158 | HE9OW20 | 203570 | Uni-ZAP XR | 710 | 1160 | 1 | 1160 | 129 | 129 | 1647 | 1 | 30 | 31 | 134 |
| | | Jan. 11, 1999 | | | | | | | | | | | | |
| 159 | HE9RM63 | PTA-499 | Uni-ZAP XR | 169 | 2149 | 1 | 2149 | 82 | 82 | 1106 | 1 | 27 | 28 | 354 |
| | | Aug. 11, 1999 | | | | | | | | | | | | |
| 160 | HEAAR07 | 209346 | Uni-ZAP XR | 170 | 1084 | 1 | 1084 | 48 | 48 | 1107 | 1 | 31 | 32 | 42 |
| | | Oct. 09, 1997 | | | | | | | | | | | | |
| 161 | HEBAE88 | 209242 | Uni-ZAP XR | 171 | 582 | 1 | 582 | 160 | 160 | 1108 | 1 | 26 | 27 | 42 |
| | | Sep. 12, 1997 | | | | | | | | | | | | |
| 162 | HEBBN36 | 209141 | Uni-ZAP XR | 172 | 1046 | 470 | 1046 | 645 | 645 | 1109 | 1 | 29 | 30 | 53 |
| | | Jul. 09, 1997 | | | | | | | | | | | | |
| 163 | HEBCM63 | 209141 | Uni-ZAP XR | 173 | 558 | 1 | 558 | 246 | 246 | 1110 | 1 | 26 | 27 | 68 |
| | | Jul. 09, 1997 | | | | | | | | | | | | |
| 164 | HEBEJ18 | 203069 | Uni-ZAP XR | 174 | 685 | 7 | 649 | 51 | 51 | 1111 | 1 | 15 | 16 | 139 |
| | | Jul. 27, 1998 | | | | | | | | | | | | |
| 165 | HEEAG23 | 209745 | Uni-ZAP XR | 175 | 1669 | 25 | 1280 | 57 | 57 | 1112 | 1 | 18 | 19 | 46 |
| | | Apr. 07, 1998 | | | | | | | | | | | | |
| 166 | HEEAJ02 | 209627 | Uni-ZAP XR | 176 | 1038 | 148 | 1037 | 387 | 387 | 1113 | 1 | 40 | 41 | 125 |
| | | Feb. 12, 1998 | | | | | | | | | | | | |
| 167 | HEEAQ11 | 203071 | Uni-ZAP XR | 177 | 921 | 1 | 921 | 213 | 213 | 1114 | 1 | 28 | 29 | 147 |
| | | Jul. 27, 1998 | | | | | | | | | | | | |
| 168 | HEEBI05 | PTA-2076 | Uni-ZAP XR | 178 | 894 | 1 | 894 | 146 | 146 | 1115 | 1 | 22 | 23 | 159 |
| | | Jun. 09, 2000 | | | | | | | | | | | | |
| 168 | HEEBI05 | PTA-2076 | Uni-ZAP XR | 711 | 979 | 88 | 979 | 226 | 226 | 1648 | 1 | 22 | 23 | 159 |
| | | Jun. 09, 2000 | | | | | | | | | | | | |
| 169 | HEGAH43 | 209277 | Uni-ZAP XR | 179 | 442 | 1 | 442 | 29 | 29 | 1116 | 1 | 20 | 21 | 111 |
| | | Sep. 18, 1997 | | | | | | | | | | | | |
| 170 | HEGAN94 | 203071 | Uni-ZAP XR | 180 | 582 | 1 | 582 | 52 | 52 | 1117 | 1 | 23 | 24 | 121 |
| | | Jul. 27, 1998 | | | | | | | | | | | | |
| 170 | HEGAN94 | 203071 | Uni-ZAP XR | 712 | 680 | 1 | 680 | 133 | 133 | 1649 | 1 | 23 | 24 | 121 |
| | | Jul. 27, 1998 | | | | | | | | | | | | |
| 171 | HEGBS69 | PTA-2082 | Uni-ZAP XR | 181 | 809 | 1 | 809 | 260 | 260 | 1118 | 1 | 20 | 21 | 161 |
| | | Jun. 09, 2000 | | | | | | | | | | | | |
| 171 | HEGBS69 | PTA-2082 | Uni-ZAP XR | 713 | 1188 | 1 | 807 | 253 | 253 | 1650 | 1 | 20 | 21 | 161 |
| | | Jun. 09, 2000 | | | | | | | | | | | | |
| 172 | HELGK31 | 209878 | Uni-ZAP XR | 182 | 1396 | 25 | 1334 | 209 | 209 | 1119 | 1 | 29 | 30 | 344 |
| | | May 18, 1998 | | | | | | | | | | | | |
| 172 | HELGK31 | 209878 | Uni-ZAP XR | 714 | 1342 | 68 | 1342 | 402 | 402 | 1651 | 1 | 1 | 2 | 291 |
| | | May 18, 1998 | | | | | | | | | | | | |
| 173 | HELHD85 | PTA-1544 | Uni-ZAP XR | 183 | 1886 | 1 | 1886 | 41 | 41 | 1120 | 1 | 25 | 26 | 79 |
| | | Mar. 21, 2000 | | | | | | | | | | | | |
| 174 | HELHL48 | 209877 | Uni-ZAP XR | 184 | 2971 | 560 | 2557 | 629 | 629 | 1121 | 1 | 16 | 17 | 291 |
| | | May 18, 1998 | | | | | | | | | | | | |
| 174 | HELHL48 | 209877 | Uni-ZAP XR | 715 | 1955 | 1 | 1955 | 31 | 31 | 1652 | 1 | 16 | 17 | 184 |
| | | May 18, 1998 | | | | | | | | | | | | |
| 175 | HEMAM41 | 209010 | Uni-ZAP XR | 185 | 1337 | 60 | 1328 | 175 | 175 | 1122 | 1 | 39 | 40 | 190 |
| | | Apr. 28, 1997 | | | | | | | | | | | | |
| | | 209085 | | | | | | | | | | | | |
| | | May 29, 1997 | | | | | | | | | | | | |
| 175 | HEMAM41 | 209010 | Uni-ZAP XR | 716 | 1338 | 33 | 1327 | 175 | 175 | 1653 | 1 | 32 | 33 | 91 |
| | | Apr. 28, 1997 | | | | | | | | | | | | |
| | | 209085 | | | | | | | | | | | | |
| | | May 29, 1997 | | | | | | | | | | | | |
| 176 | HEPAA46 | 209551 | Uni-ZAP XR | 186 | 1129 | 1 | 1129 | 18 | 18 | 1123 | 1 | 20 | 21 | 123 |
| | | Dec. 12, 1997 | | | | | | | | | | | | |
| 177 | HEPAB80 | 209423 | Uni-ZAP XR | 187 | 799 | 1 | 799 | 73 | 73 | 1124 | 1 | 28 | 29 | 121 |
| | | Oct. 30, 1997 | | | | | | | | | | | | |
| 177 | HEPAB80 | 209423 | Uni-ZAP XR | 717 | 802 | 1 | 802 | 67 | 67 | 1654 | 1 | 28 | 29 | 122 |
| | | Oct. 30, 1997 | | | | | | | | | | | | |
| 178 | HEQAK71 | 209551 | pCMVSport | 188 | 1689 | 1 | 1689 | 198 | 198 | 1125 | 1 | 17 | 18 | 44 |
| | | Dec. 12, 1997 | 3.0 | | | | | | | | | | | |
| 179 | HERAR44 | 209407 | Uni-ZAP XR | 189 | 420 | 1 | 420 | 60 | 60 | 1126 | 1 | 40 | 41 | 45 |
| | | Oct. 23, 1997 | | | | | | | | | | | | |
| 180 | HESAJ10 | 209242 | Uni-ZAP XR | 190 | 1090 | 400 | 1090 | 405 | 405 | 1127 | 1 | 23 | 24 | 71 |
| | | Sep. 12, 1997 | | | | | | | | | | | | |
| 181 | HETAB45 | 209580 | Uni-ZAP XR | 191 | 1676 | 1 | 1676 | 123 | 123 | 1128 | 1 | 30 | 31 | 179 |
| | | Jan. 14, 1998 | | | | | | | | | | | | |
| 182 | HETBR16 | 209877 | Uni-ZAP XR | 192 | 1569 | 1 | 1569 | 161 | 161 | 1129 | 1 | 21 | 22 | 64 |
| | | May 18, 1998 | | | | | | | | | | | | |
| 183 | HETLM70 | PTA-2073 | Uni-ZAP XR | 193 | 1251 | 1 | 1199 | 336 | 336 | 1130 | 1 | 27 | 28 | 229 |
| | | Jun. 09, 2000 | | | | | | | | | | | | |
| 183 | HETLM70 | PTA-2073 | Uni-ZAP XR | 718 | 1251 | 1 | 1251 | 336 | 336 | 1655 | 1 | 27 | 28 | 229 |
| | | Jun. 09, 2000 | | | | | | | | | | | | |
| 183 | HETLM70 | PTA-2073 | Uni-ZAP XR | 719 | 517 | 161 | 517 | | 2 | 1656 | 1 | 1 | 2 | 85 |
| | | Jun. 09, 2000 | | | | | | | | | | | | |
| 184 | HFABG18 | PTA-1544 | Uni-ZAP XR | 194 | 1345 | 1 | 1345 | 53 | 53 | 1131 | 1 | 26 | 27 | 87 |
| | | Mar. 21, 2000 | | | | | | | | | | | | |
| 185 | HFAMB72 | 209146 | Uni-ZAP XR | 195 | 1323 | 509 | 1323 | 559 | 559 | 1132 | 1 | 22 | 23 | 60 |
| | | Jul. 17, 1997 | | | | | | | | | | | | |
| 186 | HFAMH77 | 209300 | Uni-ZAP XR | 196 | 669 | 96 | 669 | 240 | 240 | 1133 | 1 | 33 | 34 | 61 |
| | | Sep. 25, 1997 | | | | | | | | | | | | |
| 187 | HFCCQ50 | 209463 | Uni-ZAP XR | 197 | 1271 | 1 | 1271 | 47 | 47 | 1134 | 1 | 20 | 21 | 352 |
| | | Nov. 14, 1997 | | | | | | | | | | | | |
| 188 | HFCEW05 | 209603 | Uni-ZAP XR | 198 | 933 | 1 | 933 | 34 | 34 | 1135 | 1 | 18 | 19 | 209 |
| | | Jan. 29, 1998 | | | | | | | | | | | | |
| 189 | HFFAD59 | 209242 | Lambda ZAP | 199 | 470 | 1 | 470 | 44 | 44 | 1136 | 1 | 17 | 18 | 45 |
| | | Sep. 12, 1997 | II | | | | | | | | | | | |
| 190 | HFFAL36 | 209368 | Lambda ZAP | 200 | 1020 | 1 | 1020 | 68 | 68 | 1137 | 1 | 35 | 36 | 56 |
| | | Oct. 16, 1997 | II | | | | | | | | | | | |
| 191 | HFGAD82 | 209225 | Uni-ZAP XR | 201 | 1881 | 772 | 1861 | 1019 | 1019 | 1138 | 1 | 18 | 19 | 38 |
| | | Aug. 28, 1997 | | | | | | | | | | | | |
| 192 | HFIIZ70 | PTA-846 | pSport1 | 202 | 1408 | 1 | 1408 | 24 | 24 | 1139 | 1 | 23 | 24 | 47 |
| | | Oct. 13, 1999 | | | | | | | | | | | | |
| 192 | HFIIZ70 | PTA-846 | pSport1 | 720 | 1441 | 43 | 1441 | 74 | 74 | 1657 | 1 | 23 | 24 | 47 |
| | | Oct. 13, 1999 | | | | | | | | | | | | |
| 193 | HFKET18 | PTA-622 | Uni-ZAP XR | 203 | 2407 | 1 | 2407 | 137 | 137 | 1140 | 1 | 14 | 15 | 74 |
| | | Sep. 02, 1999 | | | | | | | | | | | | |
| 194 | HFKFG02 | 209627 | Uni-ZAP XR | 204 | 795 | 1 | 795 | 110 | 110 | 1141 | 1 | 18 | 19 | 53 |
| | | Feb. 12, 1998 | | | | | | | | | | | | |
| 195 | HFOXB13 | 209423 | pSport1 | 205 | 1169 | 1 | 1169 | 36 | 36 | 1142 | 1 | 21 | 22 | 54 |
| | | Oct. 30, 1997 | | | | | | | | | | | | |
| 196 | HFPAC12 | 209511 | Uni-ZAP XR | 206 | 1088 | 1 | 1088 | 140 | 140 | 1143 | 1 | 21 | 22 | 88 |
| | | Dec. 03, 1997 | | | | | | | | | | | | |
| 197 | HFPAO71 | 209626 | Uni-ZAP XR | 207 | 2067 | 364 | 2067 | 414 | 414 | 1144 | 1 | 33 | 34 | 131 |
| | | Feb. 12, 1998 | | | | | | | | | | | | |
| 198 | HFPCX09 | 209551 | Uni-ZAP XR | 208 | 2213 | 1 | 2213 | 185 | 185 | 1145 | 1 | 26 | 27 | 549 |
| | | Dec. 12, 1997 | | | | | | | | | | | | |
| 198 | HFPCX09 | 209551 | Uni-ZAP XR | 721 | 2674 | 59 | 2674 | 249 | 249 | 1658 | 1 | 26 | 27 | 549 |
| | | Dec. 12, 1997 | | | | | | | | | | | | |
| 198 | HFPCX09 | 209551 | Uni-ZAP XR | 722 | 2207 | 1 | 2207 | 185 | 185 | 1659 | 1 | 26 | 27 | 66 |
| | | Dec. 12, 1997 | | | | | | | | | | | | |
| 199 | HFPCX36 | 209242 | Uni-ZAP XR | 209 | 796 | 1 | 796 | 103 | 103 | 1146 | 1 | 27 | 28 | 46 |
| | | Sep. 12, 1997 | | | | | | | | | | | | |
| 200 | HFRAN90 | 209242 | Uni-ZAP XR | 210 | 532 | 1 | 532 | 178 | 178 | 1147 | 1 | 33 | 34 | 54 |
| | | Sep. 12, 1997 | | | | | | | | | | | | |
| 201 | HFTCU19 | 209119 | Uni-ZAP XR | 211 | 1575 | 1266 | 1575 | 137 | 137 | 1148 | 1 | 30 | 31 | 222 |
| | | Jun. 12, 1997 | | | | | | | | | | | | |
| 201 | HFTCU19 | 209119 | Uni-ZAP XR | 723 | 470 | 1 | 470 | 157 | 157 | 1660 | 1 | 24 | 25 | 56 |
| | | Jun. 12, 1997 | | | | | | | | | | | | |
| 202 | HFTDL56 | 209782 | Uni-ZAP XR | 212 | 1839 | 32 | 1838 | 93 | 93 | 1149 | 1 | 20 | 21 | 519 |
| | | Apr. 20, 1998 | | | | | | | | | | | | |
| 203 | HFTDZ36 | 209300 | Uni-ZAP XR | 213 | 1103 | 231 | 1103 | 547 | 547 | 1150 | 1 | 22 | 23 | 68 |
| | | Sep. 25, 1997 | | | | | | | | | | | | |
| 204 | HFVAB79 | 209368 | Uni-ZAP XR | 214 | 1175 | 1 | 1175 | 133 | 133 | 1151 | 1 | 15 | 16 | 194 |
| | | Oct. 16, 1997 | | | | | | | | | | | | |
| 204 | HFVAB79 | 209368 | Uni-ZAP XR | 724 | 1186 | 1 | 1186 | 139 | 139 | 1661 | 1 | 15 | 16 | 194 |
| | | Oct. 16, 1997 | | | | | | | | | | | | |
| 205 | HFVGE32 | PTA-844 | pBluescript | 215 | 572 | 1 | 572 | 154 | 154 | 1152 | 1 | 32 | 33 | 79 |
| | | Oct. 13, 1999 | | | | | | | | | | | | |
| 205 | HFVGE32 | PTA-844 | pBluescript | 725 | 470 | 2 | 470 | | 1 | 1662 | 1 | 1 | 2 | 67 |
| | | Oct. 13, 1999 | | | | | | | | | | | | |
| 206 | HFVIC62 | 203105 | pBluescript | 216 | 1350 | 1 | 1350 | 114 | 114 | 1153 | 1 | 31 | 32 | 56 |
| | | Aug. 13, 1998 | | | | | | | | | | | | |
| 207 | HFXAM76 | 209568 | Lambda ZAP | 217 | 947 | 1 | 947 | 213 | 213 | 1154 | 1 | 24 | 25 | 79 |
| | | Jan. 06, 1998 | II | | | | | | | | | | | |
| 208 | HFXDJ75 | 209603 | Lambda ZAP | 218 | 1918 | 1 | 1914 | 44 | 44 | 1155 | 1 | 26 | 27 | 41 |
| | | Jan. 29, 1998 | II | | | | | | | | | | | |
| 209 | HFXDN63 | 209346 | Lambda ZAP | 219 | 1026 | 1 | 1026 | 33 | 33 | 1156 | 1 | 14 | 15 | 53 |
| | | Oct. 09, 1997 | II | | | | | | | | | | | |
| 210 | HFXGT26 | 209965 | Lambda ZAP | 220 | 1757 | 1 | 1757 | 13 | 13 | 1157 | 1 | 22 | 23 | 85 |
| | | Jun. 11, 1998 | II | | | | | | | | | | | |
| 211 | HFXGV31 | 209242 | Lambda ZAP | 221 | 752 | 1 | 752 | 100 | 100 | 1158 | 1 | 24 | 25 | 64 |
| | | Sep. 12, 1997 | II | | | | | | | | | | | |
| 212 | HFXHD88 | 209511 | Lambda ZAP | 222 | 1602 | 1 | 1602 | 130 | 130 | 1159 | 1 | 41 | 42 | 128 |
| | | Dec. 03, 1997 | II | | | | | | | | | | | |
| 213 | HFXHK73 | 209580 | Lambda ZAP | 223 | 1873 | 1 | 1873 | 247 | 247 | 1160 | 1 | 36 | 37 | 67 |
| | | Jan. 14, 1998 | II | | | | | | | | | | | |
| 214 | HFXKJ03 | 209215 | Lambda ZAP | 224 | 941 | 1 | 941 | 179 | 179 | 1161 | 1 | 33 | 34 | 41 |
| | | Aug. 21, 1997 | II | | | | | | | | | | | |
| 215 | HFXKT05 | 209651 | Lambda ZAP | 225 | 1715 | 1 | 1715 | 204 | 204 | 1162 | 1 | 18 | 19 | 79 |
| | | Mar. 04, 1998 | II | | | | | | | | | | | |
| 216 | HFXKY27 | 209877 | Lambda ZAP | 226 | 945 | 1 | 945 | 44 | 44 | 1163 | 1 | 19 | 20 | 58 |
| | | May 18, 1998 | II | | | | | | | | | | | |
| 217 | HGBFO79 | 209011 | Uni-ZAP XR | 227 | 1538 | 259 | 1538 | 273 | 273 | 1164 | 1 | 23 | 24 | 49 |
| | | Apr. 28, 1997 | | | | | | | | | | | | |
| 218 | HGBHE57 | 209407 | Uni-ZAP XR | 228 | 663 | 1 | 663 | 14 | 14 | 1165 | 1 | 19 | 20 | 68 |
| | | Oct. 23, 1997 | | | | | | | | | | | | |
| 219 | HGBIB74 | 203648 | Uni-ZAP XR | 229 | 1816 | 1 | 1804 | 14 | 14 | 1166 | 1 | 23 | 24 | 377 |
| | | Feb. 09, 1999 | | | | | | | | | | | | |
| 219 | HGBIB74 | 203648 | Uni-ZAP XR | 726 | 1821 | 1 | 1821 | 28 | 28 | 1663 | 1 | 20 | 21 | 170 |
| | | Feb. 09, 1999 | | | | | | | | | | | | |
| 219 | HGBIB74 | 203648 | Uni-ZAP XR | 727 | 1094 | 1 | 1094 | | 2 | 1664 | 1 | 1 | 2 | 151 |
| | | Feb. 09, 1999 | | | | | | | | | | | | |
| 220 | HGLAL82 | 209242 | Uni-ZAP XR | 230 | 406 | 1 | 406 | 144 | 144 | 1167 | 1 | 19 | 20 | 26 |
| | | Sep. 12, 1997 | | | | | | | | | | | | |
| 221 | HHAAF20 | 203648 | Uni-ZAP XR | 231 | 1495 | 1 | 1495 | 141 | 141 | 1168 | 1 | 18 | 19 | 55 |
| | | Feb. 09, 1999 | | | | | | | | | | | | |
| 222 | HHBCS39 | PTA-848 | pCMVSport 1 | 232 | 2895 | 1 | 2895 | 104 | 104 | 1169 | 1 | 26 | 27 | 166 |
| | | Oct. 13, 1999 | | | | | | | | | | | | |
| 222 | HHBCS39 | PTA-848 | pCMVSport 1 | 728 | 1042 | 1 | 1042 | 150 | 150 | 1665 | 1 | 26 | 27 | 166 |
| | | Oct. 13, 1999 | | | | | | | | | | | | |
| 222 | HHBCS39 | PTA-848 | pCMVSport 1 | 729 | 1556 | 171 | 1556 | | 1260 | 1666 | 1 | 16 | 17 | 26 |
| | | Oct. 13, 1999 | | | | | | | | | | | | |
| 223 | HHEAA08 | 209853 | pCMVSport | 233 | 2150 | 1 | 2150 | 88 | 88 | 1170 | 1 | 38 | 39 | 79 |
| | | May 07, 1998 | 3.0 | | | | | | | | | | | |
| 223 | HHEAA08 | 209853 | pCMVSport | 730 | 615 | 1 | 615 | | 311 | 1667 | 1 | 13 | 14 | 20 |
| | | May 07, 1998 | 3.0 | | | | | | | | | | | |
| 224 | HHEMA59 | 203364 | pCMVSport | 234 | 3102 | 1 | 3099 | 239 | 239 | 1171 | 1 | 20 | 21 | 76 |
| | | Oct. 19, 1998 | 3.0 | | | | | | | | | | | |
| 225 | HHEMA75 | 209179 | pCMVSport | 235 | 865 | 229 | 865 | 569 | 569 | 1172 | 1 | 35 | 36 | 84 |
| | | Jul. 24, 1997 | 3.0 | | | | | | | | | | | |
| 226 | HHEMM74 | PTA-849 | pCMVSport | 236 | 2612 | 1 | 2612 | 94 | 94 | 1173 | 1 | 27 | 28 | 74 |
| | | Oct. 13, 1999 | 3.0 | | | | | | | | | | | |
| 226 | HHEMM74 | PTA-849 | pCMVSport | 731 | 1125 | 1 | 1125 | 121 | 121 | 1668 | 1 | 27 | 28 | 74 |
| | | Oct. 13, 1999 | 3.0 | | | | | | | | | | | |
| 226 | HHEMM74 | PTA-849 | pCMVSport | 732 | 2297 | 1425 | 2297 | | 706 | 1669 | 1 | 6 | 7 | 33 |
| | | Oct. 13, 1999 | 3.0 | | | | | | | | | | | |
| 226 | HHEMM74 | PTA-849 | pCMVSport | 733 | 482 | 33 | 482 | | 7 | 1670 | 1 | 13 | 14 | 53 |
| | | Oct. 13, 1999 | 3.0 | | | | | | | | | | | |
| 227 | HHENQ22 | 209511 | pCMVSport | 237 | 1899 | 1 | 1899 | 115 | 115 | 1174 | 1 | 36 | 37 | 58 |
| | | Dec. 03, 1997 | 3.0 | | | | | | | | | | | |
| 228 | HHEPD24 | 209195 | pCMVSport | 238 | 238 | 1 | 238 | 156 | 156 | 1175 | 1 | 23 | 24 | 27 |
| | | Aug. 01, 1997 | 3.0 | | | | | | | | | | | |
| 229 | HHEPM33 | PTA-322 | pCMVSport | 239 | 1459 | 1 | 1459 | 269 | 269 | 1176 | 1 | 20 | 21 | 82 |
| | | Jul. 09, 1999 | 3.0 | | | | | | | | | | | |
| 230 | HHEPT60 | 209138 | pCMVSport | 240 | 532 | 21 | 532 | 245 | 245 | 1177 | 1 | 18 | 19 | 36 |
| | | Jul. 03, 1997 | 3.0 | | | | | | | | | | | |
| 231 | HHEPU04 | 203648 | pCMVSport | 241 | 1084 | 116 | 1084 | 259 | 259 | 1178 | 1 | 31 | 32 | 163 |
| | | Feb. 09, 1999 | 3.0 | | | | | | | | | | | |
| 231 | HHEPU04 | 203648 | pCMVSport | 734 | 1081 | 124 | 1081 | 267 | 267 | 1671 | 1 | 31 | 32 | 163 |
| | | Feb. 09, 1999 | 3.0 | | | | | | | | | | | |
| 231 | HHEPU04 | 203648 | pCMVSport | 735 | 720 | 1 | 720 | 45 | 45 | 1672 | 1 | 31 | 32 | 92 |
| | | Feb. 09, 1999 | 3.0 | | | | | | | | | | | |
| 232 | HHFBY53 | 203364 | Uni-ZAP XR | 242 | 870 | 1 | 870 | 172 | 172 | 1179 | 1 | 18 | 19 | 64 |
| | | Oct. 19, 1998 | | | | | | | | | | | | |
| 233 | HHFEC49 | PTA-844 | Uni-ZAP XR | 243 | 2263 | 1 | 2263 | 30 | 30 | 1180 | 1 | 24 | 25 | 184 |
| | | Oct. 13, 1999 | | | | | | | | | | | | |
| 234 | HHFFJ48 | 209627 | Uni-ZAP XR | 244 | 2566 | 1 | 2566 | 65 | 65 | 1181 | 1 | 21 | 22 | 106 |
| | | Feb. 12, 1998 | | | | | | | | | | | | |
| 235 | HHFGR93 | 209746 | Uni-ZAP XR | 245 | 1835 | 1 | 1835 | 132 | 132 | 1182 | 1 | 29 | 30 | 390 |
| | | Apr. 07, 1998 | | | | | | | | | | | | |
| 235 | HHFGR93 | 209746 | Uni-ZAP XR | 736 | 1932 | 1 | 1836 | 130 | 130 | 1673 | 1 | 29 | 30 | 236 |
| | | Apr. 07, 1998 | | | | | | | | | | | | |
| 236 | HHFHJ59 | 97975 | Uni-ZAP XR | 246 | 661 | 1 | 661 | 192 | 192 | 1183 | 1 | 29 | 30 | 112 |
| | | Apr. 04, 1997 | | | | | | | | | | | | |
| | | 209081 | | | | | | | | | | | | |
| | | May 29, 1997 | | | | | | | | | | | | |
| 237 | HHFHR32 | 97975 | Uni-ZAP XR | 247 | 1378 | 1 | 1378 | 58 | 58 | 1184 | 1 | 25 | 26 | 235 |
| | | Apr. 04, 1997 | | | | | | | | | | | | |
| | | 209081 | | | | | | | | | | | | |
| | | May 29, 1997 | | | | | | | | | | | | |
| 238 | HHFOJ29 | PTA-2075 | Uni-ZAP XR | 248 | 1366 | 1 | 1366 | 117 | 117 | 1185 | 1 | 31 | 32 | 82 |
| | | Jun. 09, 2000 | | | | | | | | | | | | |
| 238 | HHFOJ29 | PTA-2075 | Uni-ZAP XR | 737 | 1595 | 513 | 1595 | 132 | 132 | 1674 | 1 | 19 | 20 | 95 |
| | | Jun. 09, 2000 | | | | | | | | | | | | |
| 238 | HHFOJ29 | PTA-2075 | Uni-ZAP XR | 738 | 970 | 272 | 970 | | 62 | 1675 | 1 | 1 | 2 | 152 |
| | | Jun. 09, 2000 | | | | | | | | | | | | |
| 239 | HHGBO91 | 209242 | Lambda ZAP | 249 | 715 | 1 | 715 | 140 | 140 | 1186 | 1 | 28 | 29 | 49 |
| | | Sep. 12, 1997 | II | | | | | | | | | | | |
| 240 | HHGCM76 | 97958 | Lambda ZAP | 250 | 711 | 8 | 711 | 270 | 270 | 1187 | 1 | 22 | 23 | 89 |
| | | Mar. 13, 1997 | II | | | | | | | | | | | |
| | | 209072 | | | | | | | | | | | | |
| | | May 22, 1997 | | | | | | | | | | | | |
| 240 | HHGCM76 | 97958 | Lambda ZAP | 739 | 711 | 8 | 711 | 270 | 270 | 1676 | 1 | | | 11 |
| | | Mar. 13, 1997 | II | | | | | | | | | | | |
| | | 209072 | | | | | | | | | | | | |
| | | May 22, 1997 | | | | | | | | | | | | |
| 241 | HHGCQ54 | 209300 | Lambda ZAP | 251 | 875 | 1 | 875 | 62 | 62 | 1188 | 1 | 15 | 16 | 51 |
| | | Sep. 25, 1997 | II | | | | | | | | | | | |
| 242 | HHGDF16 | 209463 | Lambda ZAP | 252 | 890 | 215 | 890 | 253 | 253 | 1189 | 1 | 26 | 27 | 52 |
| | | Nov. 14, 1997 | II | | | | | | | | | | | |
| 243 | HHGDW43 | 209346 | Lambda ZAP | 253 | 1050 | 1 | 1050 | 107 | 107 | 1190 | 1 | 40 | 41 | 44 |
| | | Oct. 09, 1997 | II | | | | | | | | | | | |
| 244 | HHPDX20 | 209580 | Uni-ZAP XR | 254 | 1161 | 1 | 1161 | 174 | 174 | 1191 | 1 | 30 | 31 | 66 |
| | | Jan. 14, 1998 | | | | | | | | | | | | |
| 245 | HHPGO40 | 209878 | Uni-ZAP XR | 255 | 1002 | 1 | 1002 | 116 | 116 | 1192 | 1 | 26 | 27 | 295 |
| | | May 18, 1998 | | | | | | | | | | | | |
| 245 | HHPGO40 | 209878 | Uni-ZAP XR | 740 | 973 | 1 | 973 | 68 | 68 | 1677 | 1 | 37 | 38 | 302 |
| | | May 18, 1998 | | | | | | | | | | | | |
| 245 | HHPGO40 | 209878 | Uni-ZAP XR | 741 | 984 | 1 | 984 | 74 | 74 | 1678 | 1 | 37 | 38 | 224 |
| | | May 18, 1998 | | | | | | | | | | | | |
| 246 | HHPTJ65 | 209179 | Uni-ZAP XR | 256 | 515 | 1 | 515 | 247 | 247 | 1193 | 1 | 32 | 33 | 48 |
| | | Jul. 24, 1997 | | | | | | | | | | | | |
| 247 | HHSDX28 | 209346 | Uni-ZAP XR | 257 | 1113 | 1 | 1113 | 90 | 90 | 1194 | 1 | 21 | 22 | 56 |
| | | Oct. 09, 1997 | | | | | | | | | | | | |
| 248 | HILCF66 | 209627 | pBluescript | 258 | 1668 | 740 | 1668 | 331 | 331 | 1195 | 1 | 21 | 22 | 44 |
| | | Feb. 12, 1998 | SK− | | | | | | | | | | | |
| 249 | HJACG02 | 209215 | pBluescript | 259 | 575 | 1 | 575 | 66 | 66 | 1196 | 1 | 22 | 23 | 108 |
| | | Aug. 21, 1997 | SK− | | | | | | | | | | | |
| 249 | HJACG02 | 209215 | pBluescript | 742 | 553 | 1 | 553 | 47 | 47 | 1679 | 1 | 23 | 24 | 108 |
| | | Aug. 21, 1997 | SK− | | | | | | | | | | | |
| 250 | HJACG30 | PTA-843 | pBluescript | 260 | 1532 | 1 | 1532 | 291 | 291 | 1197 | 1 | 27 | 28 | 44 |
| | | Oct. 13, 1999 | SK− | | | | | | | | | | | |
| 250 | HJACG30 | PTA-843 | pBluescript | 743 | 1614 | 1020 | 1614 | | 50 | 1680 | 1 | 1 | 2 | 130 |
| | | Oct. 13, 1999 | SK− | | | | | | | | | | | |
| 250 | HJACG30 | PTA-843 | pBluescript | 744 | 1087 | 491 | 1087 | | 350 | 1681 | 1 | 1 | 2 | 122 |
| | | Oct. 13, 1999 | SK− | | | | | | | | | | | |
| 251 | HJBCU04 | PTA-322 | pBluescript | 261 | 1192 | 1 | 1192 | 96 | 96 | 1198 | 1 | 49 | 50 | 176 |
| | | Jul. 09, 1999 | SK− | | | | | | | | | | | |
| 252 | HJBCY35 | 209877 | pBluescript | 262 | 1559 | 93 | 1272 | 232 | 232 | 1199 | 1 | 23 | 24 | 327 |
| | | May 18, 1998 | SK− | | | | | | | | | | | |
| 253 | HJMBI18 | 209580 | pCMVSport | 263 | 1021 | 303 | 1021 | 574 | 574 | 1200 | 1 | 19 | 20 | 80 |
| | | Jan. 14, 1998 | 3.0 | | | | | | | | | | | |
| 254 | HJMBM38 | 209300 | pCMVSport | 264 | 1024 | 316 | 1023 | 387 | 387 | 1201 | 1 | 14 | 15 | 112 |
| | | Sep. 25, 1997 | 3.0 | | | | | | | | | | | |
| 255 | HJMBT65 | 209580 | pCMVSport | 265 | 621 | 79 | 621 | 341 | 341 | 1202 | 1 | 33 | 34 | 42 |
| | | Jan. 14, 1998 | 3.0 | | | | | | | | | | | |
| 256 | HJMBW30 | 209146 | pCMVSport | 266 | 884 | 1 | 874 | 110 | 110 | 1203 | 1 | 18 | 19 | 42 |
| | | Jul. 17, 1997 | 3.0 | | | | | | | | | | | |
| 257 | HJPAD75 | 209641 | Uni-ZAP XR | 267 | 1231 | 1 | 1231 | 60 | 60 | 1204 | 1 | 29 | 30 | 91 |
| | | Feb. 25, 1998 | | | | | | | | | | | | |
| 258 | HJPCP42 | PTA-843 | Uni-ZAP XR | 268 | 1223 | 1 | 1223 | | 156 | 1205 | 1 | 20 | 21 | 223 |
| | | Oct. 13, 1999 | | | | | | | | | | | | |
| 258 | HJPCP42 | PTA-843 | Uni-ZAP XR | 745 | 1201 | 1 | 1201 | | 134 | 1682 | 1 | 20 | 21 | 223 |
| | | Oct. 13, 1999 | | | | | | | | | | | | |
| 258 | HJPCP42 | PTA-843 | Uni-ZAP XR | 746 | 628 | 229 | 628 | | 468 | 1683 | 1 | | | 8 |
| | | Oct. 13, 1999 | | | | | | | | | | | | |
| 258 | HJPCP42 | PTA-843 | Uni-ZAP XR | 747 | 425 | 237 | 348 | | 1 | 1684 | 1 | 1 | 2 | 83 |
| | | Oct. 13, 1999 | | | | | | | | | | | | |
| 259 | HKAAE44 | 209368 | pCMVSport | 269 | 1494 | 1 | 1494 | 113 | 113 | 1206 | 1 | 39 | 40 | 136 |
| | | Oct. 16, 1997 | 2.0 | | | | | | | | | | | |
| 260 | HKAAH36 | 209563 | pCMVSport | 270 | 1216 | 1 | 1216 | 128 | 128 | 1207 | 1 | 29 | 30 | 293 |
| | | Dec. 18, 1997 | 2.0 | | | | | | | | | | | |
| 260 | HKAAH36 | 209563 | pCMVSport | 748 | 1016 | 1 | 1016 | 295 | 295 | 1685 | 1 | 29 | 30 | 143 |
| | | Dec. 18, 1997 | 2.0 | | | | | | | | | | | |
| 260 | HKAAH36 | 209563 | pCMVSport | 749 | 1490 | 1 | 1490 | 182 | 182 | 1686 | 1 | 29 | 30 | 293 |
| | | Dec. 18, 1997 | 2.0 | | | | | | | | | | | |
| 260 | HKAAH36 | 209563 | pCMVSport | 750 | 1441 | 8 | 1392 | 184 | 184 | 1687 | 1 | 29 | 30 | 85 |
| | | Dec. 18, 1997 | 2.0 | | | | | | | | | | | |
| 260 | HKAAH36 | 209563 | pCMVSport | 751 | 1516 | 1 | 1516 | 254 | 254 | 1688 | 1 | 29 | 30 | 293 |
| | | Dec. 18, 1997 | 2.0 | | | | | | | | | | | |
| 260 | HKAAH36 | 209563 | pCMVSport | 752 | 1381 | 196 | 1381 | 129 | 129 | 1689 | 1 | 29 | 30 | 293 |
| | | Dec. 18, 1997 | 2.0 | | | | | | | | | | | |
| 260 | HKAAH36 | 209563 | pCMVSport | 753 | 1439 | 1 | 1439 | 189 | 189 | 1690 | 1 | 29 | 30 | 61 |
| | | Dec. 18, 1997 | 2.0 | | | | | | | | | | | |
| 261 | HKAAK02 | 209551 | pCMVSport | 271 | 859 | 1 | 859 | 97 | 97 | 1208 | 1 | 34 | 35 | 196 |
| | | Dec. 12, 1997 | 2.0 | | | | | | | | | | | |
| 262 | HKABI84 | 209603 | pCMVSport | 272 | 1238 | 45 | 1238 | 274 | 274 | 1209 | 1 | 16 | 17 | 47 |
| | | Jan. 29, 1998 | 2.0 | | | | | | | | | | | |
| 263 | HKABZ65 | 209683 | pCMVSport | 273 | 1189 | 1 | 1189 | 77 | 77 | 1210 | 1 | 17 | 18 | 243 |
| | | Mar. 20, 1998 | 2.0 | | | | | | | | | | | |
| 263 | HKABZ65 | 209683 | pCMVSport | 754 | 1191 | 1 | 1191 | 69 | 69 | 1691 | 1 | 17 | 18 | 243 |
| | | Mar. 20, 1998 | 2.0 | | | | | | | | | | | |
| 264 | HKACB56 | 209346 | pCMVSport | 274 | 496 | 1 | 496 | 27 | 27 | 1211 | 1 | 23 | 24 | 80 |
| | | Oct. 09, 1997 | 2.0 | | | | | | | | | | | |
| 265 | HKACD58 | 209346 | pCMVSport | 275 | 3153 | 1 | 3153 | 38 | 38 | 1212 | 1 | 25 | 26 | 301 |
| | | Oct. 09, 1997 | 2.0 | | | | | | | | | | | |
| 265 | HKACD58 | 209346 | pCMVSport | 755 | 1626 | 1 | 1626 | 35 | 35 | 1692 | 1 | 25 | 26 | 154 |
| | | Oct. 09, 1997 | 2.0 | | | | | | | | | | | |
| 266 | HKACH44 | 209300 | pCMVSport | 276 | 686 | 1 | 686 | 375 | 375 | 1213 | 1 | 25 | 26 | 44 |
| | | Sep. 25, 1997 | 2.0 | | | | | | | | | | | |
| 267 | HKACM93 | PTA-849 | pCMVSport | 277 | 2352 | 1 | 2352 | 218 | 218 | 1214 | 1 | 30 | 31 | 692 |
| | | Oct. 13, 1999 | 2.0 | | | | | | | | | | | |
| 267 | HKACM93 | PTA-849 | pCMVSport | 756 | 549 | 1 | 549 | 189 | 189 | 1693 | 1 | 30 | 31 | 120 |
| | | Oct. 13, 1999 | 2.0 | | | | | | | | | | | |
| 267 | HKACM93 | PTA-849 | pCMVSport | 757 | 1120 | 1 | 1120 | 314 | 314 | 1694 | 1 | 30 | 31 | 269 |
| | | Oct. 13, 1999 | 2.0 | | | | | | | | | | | |
| 267 | HKACM93 | PTA-849 | pCMVSport | 758 | 1893 | 739 | 1893 | | 202 | 1695 | 1 | 13 | 14 | 17 |
| | | Oct. 13, 1999 | 2.0 | | | | | | | | | | | |
| 267 | HKACM93 | PTA-849 | pCMVSport | 759 | 1187 | 1 | 1187 | | 638 | 1696 | 1 | 4 | 5 | 45 |
| | | Oct. 13, 1999 | 2.0 | | | | | | | | | | | |
| 268 | HKAEL80 | 209423 | pCMVSport | 278 | 1105 | 1 | 1105 | 398 | 398 | 1215 | 1 | 17 | 18 | 79 |
| | | Oct. 30, 1997 | 2.0 | | | | | | | | | | | |
| 269 | HKAEV06 | 209627 | pCMVSport | 279 | 2496 | 1 | 2496 | 501 | 501 | 1216 | 1 | 30 | 31 | 438 |
| | | Feb. 12, 1998 | 2.0 | | | | | | | | | | | |
| 269 | HKAEV06 | 209627 | pCMVSport | 760 | 2351 | 1 | 2351 | 197 | 197 | 1697 | 1 | 29 | 30 | 57 |
| | | Feb. 12, 1998 | 2.0 | | | | | | | | | | | |
| 270 | HKAFK41 | 209300 | pCMVSport | 280 | 549 | 1 | 549 | 243 | 243 | 1217 | 1 | 30 | 31 | 43 |
| | | Sep. 25, 1997 | 2.0 | | | | | | | | | | | |
| 271 | HKAFT66 | PTA-849 | pCMVSport | 281 | 1001 | 270 | 1001 | 508 | 508 | 1218 | 1 | 41 | 42 | 107 |
| | | Oct. 13, 1999 | 2.0 | | | | | | | | | | | |
| 271 | HKAFT66 | PTA-849 | pCMVSport | 761 | 1001 | 270 | 1001 | 508 | 508 | 1698 | 1 | 41 | 42 | 107 |
| | | Oct. 13, 1999 | 2.0 | | | | | | | | | | | |
| 271 | HKAFT66 | PTA-849 | pCMVSport | 762 | 669 | 1 | 669 | 234 | 234 | 1699 | 1 | | | 37 |
| | | Oct. 13, 1999 | 2.0 | | | | | | | | | | | |
| 272 | HKDBF34 | 209511 | pCMVSport 1 | 282 | 1432 | 60 | 1418 | 69 | 69 | 1219 | 1 | 14 | 15 | 222 |
| | | Dec. 03, 1997 | | | | | | | | | | | | |
| 272 | HKDBF34 | 209511 | pCMVSport 1 | 763 | 1356 | 1 | 1356 | 18 | 18 | 1700 | 1 | 19 | 20 | 104 |
| | | Dec. 03, 1997 | | | | | | | | | | | | |
| 273 | HKGAT94 | 209126 | pSport1 | 283 | 1048 | 1 | 1048 | 449 | 449 | 1220 | 1 | 31 | 32 | 99 |
| | | Jun. 19, 1997 | | | | | | | | | | | | |
| 273 | HKGAT94 | 209126 | pSport1 | 764 | 1063 | 1 | 1063 | | 470 | 1701 | 1 | 20 | 21 | 94 |
| | | Jun. 19, 1997 | | | | | | | | | | | | |
| 274 | HKGCO27 | 209853 | pSport1 | 284 | 1021 | 1 | 1021 | 313 | 313 | 1221 | 1 | 26 | 27 | 93 |
| | | May 07, 1998 | | | | | | | | | | | | |
| 274 | HKGCO27 | 209853 | pSport1 | 765 | 1311 | 1 | 1311 | 57 | 57 | 1702 | 1 | 26 | 27 | 47 |
| | | May 07, 1998 | | | | | | | | | | | | |
| 275 | HKISB57 | 209603 | pBluescript | 285 | 1492 | 1 | 1439 | 130 | 130 | 1222 | 1 | 19 | 20 | 95 |
| | | Jan. 29, 1998 | | | | | | | | | | | | |
| 276 | HKMLK53 | 209511 | pBluescript | 286 | 1543 | 1 | 1543 | 20 | 20 | 1223 | 1 | 25 | 26 | 69 |
| | | Dec. 03, 1997 | | | | | | | | | | | | |
| 277 | HKMLM11 | 209236 | pBluescript | 287 | 954 | 1 | 954 | 82 | 82 | 1224 | 1 | 20 | 21 | 130 |
| | | Sep. 04, 1997 | | | | | | | | | | | | |
| 278 | HKMLP68 | PTA-845 | pBluescript | 288 | 2784 | 1 | 2784 | 130 | 130 | 1225 | 1 | 24 | 25 | 80 |
| | | Oct. 13, 1999 | | | | | | | | | | | | |
| 278 | HKMLP68 | PTA-845 | pBluescript | 766 | 718 | 1 | 718 | 153 | 153 | 1703 | 1 | 24 | 25 | 80 |
| | | Oct. 13, 1999 | | | | | | | | | | | | |
| 278 | HKMLP68 | PTA-845 | pBluescript | 767 | 614 | 1 | 614 | | 471 | 1704 | 1 | 1 | 2 | 47 |
| | | Oct. 13, 1999 | | | | | | | | | | | | |
| 279 | HKMMD13 | 209568 | pBluescript | 289 | 943 | 1 | 943 | 342 | 342 | 1226 | 1 | 21 | 22 | 49 |
| | | Jan. 06, 1998 | | | | | | | | | | | | |
| 280 | HKMND01 | 203069 | pBluescript | 290 | 887 | 1 | 887 | 23 | 23 | 1227 | 1 | 26 | 27 | 50 |
| | | Jul. 27, 1998 | | | | | | | | | | | | |
| 281 | HL2AC08 | 209580 | Uni-ZAP XR | 291 | 1478 | 1 | 1478 | 64 | 64 | 1228 | 1 | 23 | 24 | 280 |
| | | Jan. 14, 1998 | | | | | | | | | | | | |
| 282 | HL2AG57 | 209746 | Uni-ZAP XR | 292 | 1780 | 349 | 1780 | 560 | 560 | 1229 | 1 | 31 | 32 | 80 |
| | | Apr. 07, 1998 | | | | | | | | | | | | |
| 283 | HLCND09 | PTA-2076 | Uni-ZAP XR | 293 | 1984 | 1 | 1984 | 146 | 146 | 1230 | 1 | 38 | 39 | 110 |
| | | Jun. 09, 2000 | | | | | | | | | | | | |
| 283 | HLCND09 | PTA-2076 | Uni-ZAP XR | 768 | 465 | 1 | 465 | 38 | 38 | 1705 | 1 | 38 | 39 | 142 |
| | | Jun. 09, 2000 | | | | | | | | | | | | |
| 284 | HLDBE54 | 209563 | pCMVSport | 294 | 1222 | 1 | 1222 | 155 | 155 | 1231 | 1 | 38 | 39 | 318 |
| | | Dec. 18, 1997 | 3.0 | | | | | | | | | | | |
| 284 | HLDBE54 | 209563 | pCMVSport | 769 | 1194 | 1 | 1194 | 130 | 130 | 1706 | 1 | 26 | 27 | 89 |
| | | Dec. 18, 1997 | 3.0 | | | | | | | | | | | |
| 284 | HLDBE54 | 209563 | pCMVSport | 770 | 2334 | 1874 | 2334 | 133 | 133 | 1707 | 1 | 33 | 34 | 486 |
| | | Dec. 18, 1997 | 3.0 | | | | | | | | | | | |
| 285 | HLDBX13 | 203331 | pCMVSport | 295 | 1815 | 1 | 1815 | 303 | 303 | 1232 | 1 | 39 | 40 | 55 |
| | | Oct. 08, 1998 | 3.0 | | | | | | | | | | | |
| 286 | HLDNA86 | 209277 | pCMVSport | 296 | 1346 | 1 | 1346 | 238 | 238 | 1233 | 1 | 34 | 35 | 163 |
| | | Sep. 18, 1997 | 3.0 | | | | | | | | | | | |
| 286 | HLDNA86 | 209277 | pCMVSport | 771 | 720 | 1 | 717 | 45 | 45 | 1708 | 1 | 31 | 32 | 92 |
| | | Sep. 18, 1997 | 3.0 | | | | | | | | | | | |
| 287 | HLDON23 | 209628 | pCMVSport | 297 | 1262 | 208 | 1256 | 368 | 368 | 1234 | 1 | 20 | 21 | 113 |
| | | Feb. 12, 1998 | 3.0 | | | | | | | | | | | |
| 288 | HLDOW79 | PTA-1544 | pCMVSport | 298 | 989 | 1 | 989 | 43 | 43 | 1235 | 1 | 21 | 22 | 275 |
| | | Mar. 21, 2000 | 3.0 | | | | | | | | | | | |
| 289 | HLDQC46 | PTA-1544 | pCMVSport | 299 | 632 | 1 | 632 | 163 | 163 | 1236 | 1 | 34 | 35 | 87 |
| | | Mar. 21, 2000 | 3.0 | | | | | | | | | | | |
| 290 | HLDQR62 | 203027 | pCMVSport | 300 | 2572 | 427 | 2572 | 520 | 520 | 1237 | 1 | 18 | 19 | 161 |
| | | Jun. 26, 1998 | 3.0 | | | | | | | | | | | |
| 291 | HLDQU79 | 203071 | pCMVSport | 301 | 1488 | 1 | 1488 | 99 | 99 | 1238 | 1 | 23 | 24 | 348 |
| | | Jul. 27, 1998 | 3.0 | | | | | | | | | | | |
| 292 | HLDRM43 | 209628 | pCMVSport | 302 | 609 | 1 | 609 | 24 | 24 | 1239 | 1 | 20 | 21 | 151 |
| | | Feb. 12, 1998 | 3.0 | | | | | | | | | | | |
| 292 | HLDRM43 | 209628 | pCMVSport | 772 | 759 | 1 | 759 | 164 | 164 | 1709 | 1 | 20 | 21 | 151 |
| | | Feb. 12, 1998 | 3.0 | | | | | | | | | | | |
| 293 | HLDRP33 | 209641 | pCMVSport | 303 | 612 | 1 | 612 | 215 | 215 | 1240 | 1 | 26 | 27 | 41 |
| | | Feb. 25, 1998 | 3.0 | | | | | | | | | | | |
| 294 | HLHFP03 | 209126 | Uni-ZAP XR | 304 | 613 | 1 | 613 | 224 | 224 | 1241 | 1 | 19 | 20 | 116 |
| | | Jun. 19, 1997 | | | | | | | | | | | | |
| 295 | HLHFR58 | PTA-841 | Uni-ZAP XR | 305 | 1015 | 1 | 1015 | | 206 | 1242 | 1 | 17 | 18 | 21 |
| | | Oct. 13, 1999 | | | | | | | | | | | | |
| 295 | HLHFR58 | PTA-841 | Uni-ZAP XR | 773 | 733 | 1 | 733 | | 205 | 1710 | 1 | 16 | 17 | 21 |
| | | Oct. 13, 1999 | | | | | | | | | | | | |
| 295 | HLHFR58 | PTA-841 | Uni-ZAP XR | 774 | 741 | 1 | 741 | | 288 | 1711 | 1 | 1 | 2 | 67 |
| | | Oct. 13, 1999 | | | | | | | | | | | | |
| 295 | HLHFR58 | PTA-841 | Uni-ZAP XR | 775 | 951 | 12 | 675 | | 254 | 1712 | 1 | 1 | 2 | 91 |
| | | Oct. 13, 1999 | | | | | | | | | | | | |
| 296 | HLIBD68 | 203071 | pCMVSport 1 | 306 | 1022 | 1 | 1022 | 186 | 186 | 1243 | 1 | 35 | 36 | 50 |
| | | Jul. 27, 1998 | | | | | | | | | | | | |
| 297 | HLICQ90 | 203517 | pCMVSport 1 | 307 | 1766 | 1 | 1766 | 249 | 249 | 1244 | 1 | 29 | 30 | 206 |
| | | Dec. 10, 1998 | | | | | | | | | | | | |
| 298 | HLMBO76 | 209603 | Lambda ZAP | 308 | 815 | 1 | 795 | 43 | 43 | 1245 | 1 | 43 | 44 | 107 |
| | | Jan. 29, 1998 | II | | | | | | | | | | | |
| 299 | HLQBE09 | 209243 | Lambda ZAP | 309 | 633 | 1 | 633 | 17 | 17 | 1246 | 1 | 19 | 20 | 181 |
| | | Sep. 12, 1997 | II | | | | | | | | | | | |
| 300 | HLQDR48 | 209603 | Lambda ZAP | 310 | 989 | 1 | 989 | 10 | 10 | 1247 | 1 | 21 | 22 | 190 |
| | | Jan. 29, 1998 | II | | | | | | | | | | | |
| 300 | HLQDR48 | 209603 | Lambda ZAP | 776 | 990 | 1 | 990 | 3 | 3 | 1713 | 1 | 21 | 22 | 190 |
| | | Jan. 29, 1998 | II | | | | | | | | | | | |
| 301 | HLTAU74 | PTA-163 | Uni-ZAP XR | 311 | 1524 | 1 | 1524 | 76 | 76 | 1248 | 1 | 21 | 22 | 62 |
| | | Jun. 01, 1999 | | | | | | | | | | | | |
| 302 | HLTDV50 | 209243 | Uni-ZAP XR | 312 | 770 | 1 | 770 | 74 | 74 | 1249 | 1 | 17 | 18 | 28 |
| | | Sep. 12, 1997 | | | | | | | | | | | | |
| 303 | HLTEI25 | 97979 | Uni-ZAP XR | 313 | 843 | 1 | 843 | 155 | 155 | 1250 | 1 | 19 | 20 | 42 |
| | | Mar. 27, 1997 | | | | | | | | | | | | |
| 304 | HLTEJ06 | 209346 | Uni-ZAP XR | 314 | 617 | 69 | 617 | 197 | 197 | 1251 | 1 | 22 | 23 | 55 |
| | | Oct. 09, 1997 | | | | | | | | | | | | |
| 305 | HLTFA64 | 209628 | Uni-ZAP XR | 315 | 1130 | 1 | 1130 | 268 | 268 | 1252 | 1 | 42 | 43 | 43 |
| | | Feb. 12, 1998 | | | | | | | | | | | | |
| 306 | HLTHG37 | 209965 | Uni-ZAP XR | 316 | 3740 | 1908 | 3740 | 50 | 50 | 1253 | 1 | 1 | 2 | 319 |
| | | Jun. 11, 1998 | | | | | | | | | | | | |
| 306 | HLTHG37 | 209965 | Uni-ZAP XR | 777 | 1932 | 98 | 1932 | 313 | 313 | 1714 | 1 | 35 | 36 | 42 |
| | | Jun. 11, 1998 | | | | | | | | | | | | |
| 307 | HLWAA17 | 209626 | pCMVSport | 317 | 997 | 246 | 997 | 436 | 436 | 1254 | 1 | 15 | 16 | 187 |
| | | Feb. 12, 1998 | 3.0 | | | | | | | | | | | |
| 308 | HLWAA88 | 209551 | pCMVSport | 318 | 1770 | 1 | 1770 | 35 | 35 | 1255 | 1 | 22 | 23 | 113 |
| | | Dec. 12, 1997 | 3.0 | | | | | | | | | | | |
| 308 | HLWAA88 | 209551 | pCMVSport | 778 | 1636 | 1 | 1636 | 51 | 51 | 1715 | 1 | 22 | 23 | 488 |
| | | Dec. 12, 1997 | 3.0 | | | | | | | | | | | |
| 309 | HLWAD77 | 209651 | pCMVSport | 319 | 1167 | 304 | 1167 | 326 | 326 | 1256 | 1 | 24 | 25 | 140 |
| | | Mar. 04, 1998 | 3.0 | | | | | | | | | | | |
| 310 | HLWAE11 | 203071 | pCMVSport | 320 | 1618 | 1 | 1618 | 28 | 28 | 1257 | 1 | 46 | 47 | 278 |
| | | Jul. 27, 1998 | 3.0 | | | | | | | | | | | |
| 311 | HLWAO22 | 209511 | pCMVSport | 321 | 1338 | 1 | 1311 | 212 | 212 | 1258 | 1 | 21 | 22 | 354 |
| | | Dec. 03, 1997 | 3.0 | | | | | | | | | | | |
| 312 | HLWAY54 | 209651 | pCMVSport | 322 | 1892 | 1 | 1892 | 38 | 38 | 1259 | 1 | 25 | 26 | 338 |
| | | Mar. 04, 1998 | 3.0 | | | | | | | | | | | |
| 313 | HLWBH18 | PTA-849 | pCMVSport | 323 | 813 | 1 | 813 | 107 | 107 | 1260 | 1 | 18 | 19 | 60 |
| | | Oct. 13, 1999 | 3.0 | | | | | | | | | | | |
| 313 | HLWBH18 | PTA-849 | pCMVSport | 779 | 645 | 1 | 645 | 67 | 67 | 1716 | 1 | 18 | 19 | 60 |
| | | Oct. 13, 1999 | 3.0 | | | | | | | | | | | |
| 314 | HLWBI63 | 209407 | pCMVSport | 324 | 1038 | 1 | 1038 | 149 | 149 | 1261 | 1 | 30 | 31 | 63 |
| | | Oct. 23, 1997 | 3.0 | | | | | | | | | | | |
| 315 | HLWBK05 | 203331 | pCMVSport | 325 | 2383 | 157 | 2383 | 280 | 280 | 1262 | 1 | 34 | 35 | 298 |
| | | Oct. 08, 1998 | 3.0 | | | | | | | | | | | |
| 316 | HLWBY76 | 203517 | pCMVSport | 326 | 2081 | 1 | 2081 | 432 | 432 | 1263 | 1 | 27 | 28 | 232 |
| | | Dec. 10, 1998 | 3.0 | | | | | | | | | | | |
| 317 | HLWCF05 | 209126 | pCMVSport | 327 | 646 | 1 | 646 | 155 | 155 | 1264 | 1 | 36 | 37 | 58 |
| | | Jun. 19, 1997 | 3.0 | | | | | | | | | | | |
| 318 | HLYAC95 | 203071 | pSport1 | 328 | 312 | 1 | 312 | 92 | 92 | 1265 | 1 | 16 | 17 | 46 |
| | | Jul. 27, 1998 | | | | | | | | | | | | |
| 319 | HLYAF80 | 209126 | pSport1 | 329 | 826 | 1 | 826 | 222 | 222 | 1266 | 1 | 24 | 25 | 47 |
| | | Jun. 19, 1997 | | | | | | | | | | | | |
| 320 | HLYAN59 | 209346 | pSport1 | 330 | 770 | 1 | 770 | 383 | 383 | 1267 | 1 | 40 | 41 | 77 |
| | | Oct. 09, 1997 | | | | | | | | | | | | |
| 320 | HLYAN59 | 209346 | pSport1 | 780 | 729 | 1 | 729 | 254 | 254 | 1717 | 1 | 39 | 40 | 54 |
| | | Oct. 09, 1997 | | | | | | | | | | | | |
| 321 | HLYAP91 | 209346 | pSport1 | 331 | 1276 | 1 | 1276 | 280 | 280 | 1268 | 1 | 29 | 30 | 83 |
| | | Oct. 09, 1997 | | | | | | | | | | | | |
| 322 | HLYAZ61 | 209022 | pSport1 | 332 | 1237 | 1 | 1237 | 190 | 190 | 1269 | 1 | 18 | 19 | 222 |
| | | May 08, 1997 | | | | | | | | | | | | |
| 322 | HLYAZ61 | 209022 | pSport1 | 781 | 997 | 74 | 997 | 205 | 205 | 1718 | 1 | 18 | 19 | 215 |
| | | May 08, 1997 | | | | | | | | | | | | |
| 323 | HLYBD32 | 209407 | pSport1 | 333 | 1045 | 35 | 1045 | 98 | 98 | 1270 | 1 | 23 | 24 | 70 |
| | | Oct. 23, 1997 | | | | | | | | | | | | |
| 324 | HLYES38 | 209853 | pSport1 | 334 | 1223 | 1 | 1223 | 69 | 69 | 1271 | 1 | 22 | 23 | 73 |
| | | May 07, 1998 | | | | | | | | | | | | |
| 325 | HMADS41 | 209563 | Uni-ZAP XR | 335 | 1267 | 1 | 1267 | 267 | 267 | 1272 | 1 | 21 | 22 | 88 |
| | | Dec. 18, 1997 | | | | | | | | | | | | |
| 326 | HMADU73 | 209139 | Uni-ZAP XR | 336 | 3194 | 1 | 3194 | 491 | 491 | 1273 | 1 | 16 | 17 | 713 |
| | | Jul. 03, 1997 | | | | | | | | | | | | |
| 326 | HMADU73 | 209139 | Uni-ZAP XR | 782 | 437 | 1 | 437 | 115 | 115 | 1719 | 1 | 15 | 16 | 77 |
| | | Jul. 03, 1997 | | | | | | | | | | | | |
| 327 | HMAMI15 | PTA-2075 | Uni-ZAP XR | 337 | 1258 | 1 | 1258 | 4 | 4 | 1274 | 1 | 26 | 27 | 340 |
| | | Jun. 09, 2000 | | | | | | | | | | | | |
| 327 | HMAMI15 | PTA-2075 | Uni-ZAP XR | 783 | 1084 | 1 | 1084 | 3 | 3 | 1720 | 1 | 26 | 27 | 306 |
| | | Jun. 09, 2000 | | | | | | | | | | | | |
| 328 | HMDAE65 | 209243 | Uni-ZAP XR | 338 | 698 | 1 | 698 | 179 | 179 | 1275 | 1 | 17 | 18 | 77 |
| | | Sep. 12, 1997 | | | | | | | | | | | | |
| 329 | HMDAM24 | 209226 | Uni-ZAP XR | 339 | 996 | 1 | 996 | 109 | 109 | 1276 | 1 | | | 20 |
| | | Aug. 28, 1997 | | | | | | | | | | | | |
| 330 | HMDAQ29 | 209563 | Uni-ZAP XR | 340 | 974 | 1 | 974 | 180 | 180 | 1277 | 1 | 43 | 44 | 82 |
| | | Dec. 18, 1997 | | | | | | | | | | | | |
| 331 | HMEAI48 | 203069 | Lambda ZAP | 341 | 413 | 1 | 413 | 36 | 36 | 1278 | 1 | 29 | 30 | 88 |
| | | Jul. 27, 1998 | II | | | | | | | | | | | |
| 331 | HMEAI48 | 203069 | Lambda ZAP | 784 | 1168 | 1 | 1168 | 95 | 95 | 1721 | 1 | 29 | 30 | 40 |
| | | Jul. 27, 1998 | II | | | | | | | | | | | |
| 332 | HMECK83 | 209853 | Lambda ZAP | 342 | 1010 | 1 | 1010 | 50 | 50 | 1279 | 1 | 28 | 29 | 54 |
| | | May 07, 1998 | II | | | | | | | | | | | |
| 333 | HMEET96 | 209407 | Lambda ZAP | 343 | 1337 | 73 | 1200 | 121 | 121 | 1280 | 1 | 30 | 31 | 266 |
| | | Oct. 23, 1997 | II | | | | | | | | | | | |
| 334 | HMIAL37 | 209563 | Uni-ZAP XR | 344 | 1420 | 1 | 1420 | 49 | 49 | 1281 | 1 | 13 | 14 | 97 |
| | | Dec. 18, 1997 | | | | | | | | | | | | |
| 335 | HMIAP86 | 209878 | Uni-ZAP XR | 345 | 1674 | 13 | 1674 | 182 | 182 | 1282 | 1 | 19 | 20 | 334 |
| | | May 18, 1998 | | | | | | | | | | | | |
| 336 | HMKCG09 | 209346 | pSport1 | 346 | 921 | 60 | 921 | 221 | 221 | 1283 | 1 | 28 | 29 | 49 |
| | | Oct. 09, 1997 | | | | | | | | | | | | |
| 337 | HMMAH60 | 209368 | pSport1 | 347 | 822 | 1 | 822 | 142 | 142 | 1284 | 1 | 15 | 16 | 50 |
| | | Oct. 16, 1997 | | | | | | | | | | | | |
| 338 | HMQDF12 | 209407 | Uni-ZAP XR | 348 | 706 | 1 | 627 | 63 | 63 | 1285 | 1 | 27 | 28 | 142 |
| | | Oct. 23, 1997 | | | | | | | | | | | | |
| 339 | HMSBX80 | 209563 | Uni-ZAP XR | 349 | 1726 | 1 | 1726 | 169 | 169 | 1286 | 1 | 19 | 20 | 57 |
| | | Dec. 18, 1997 | | | | | | | | | | | | |
| 340 | HMSFS21 | 209324 | Uni-ZAP XR | 350 | 1283 | 1 | 1283 | 28 | 28 | 1287 | 1 | 17 | 18 | 37 |
| | | Oct. 02, 1997 | | | | | | | | | | | | |
| 341 | HMSGB14 | 209423 | Uni-ZAP XR | 351 | 1552 | 1 | 1552 | 138 | 138 | 1288 | 1 | 18 | 19 | 77 |
| | | Oct. 30, 1997 | | | | | | | | | | | | |
| 342 | HMSGT42 | 97958 | Uni-ZAP XR | 352 | 1563 | 33 | 1077 | 40 | 40 | 1289 | 1 | 32 | 33 | 92 |
| | | Mar. 13, 1997 | | | | | | | | | | | | |
| | | 209072 | | | | | | | | | | | | |
| | | May 22, 1997 | | | | | | | | | | | | |
| 343 | HMSHM14 | 209126 | Uni-ZAP XR | 353 | 756 | 1 | 756 | 103 | 103 | 1290 | 1 | 29 | 30 | 45 |
| | | Jun. 19, 1997 | | | | | | | | | | | | |
| 344 | HMSHS36 | PTA-2070 | Uni-ZAP XR | 354 | 1402 | 1 | 1402 | 134 | 134 | 1291 | 1 | 23 | 24 | 103 |
| | | Jun. 09, 2000 | | | | | | | | | | | | |
| 344 | HMSHS36 | PTA-2070 | Uni-ZAP XR | 785 | 616 | 30 | 616 | 162 | 162 | 1722 | 1 | 23 | 24 | 103 |
| | | Jun. 09, 2000 | | | | | | | | | | | | |
| 345 | HMSJM65 | 209641 | Uni-ZAP XR | 355 | 2270 | 1 | 2231 | 111 | 111 | 1292 | 1 | 27 | 28 | 77 |
| | | Feb. 25, 1998 | | | | | | | | | | | | |
| 346 | HMSJU68 | 209076 | Uni-ZAP XR | 356 | 1123 | 4 | 1123 | 272 | 272 | 1293 | 1 | 31 | 32 | 49 |
| | | May 22, 1997 | | | | | | | | | | | | |
| 347 | HMSKC04 | 203105 | Uni-ZAP XR | 357 | 1417 | 1 | 1417 | 133 | 133 | 1294 | 1 | 22 | 23 | 73 |
| | | Aug. 13, 1998 | | | | | | | | | | | | |
| 348 | HMTBI36 | PTA-322 | pCMVSport | 358 | 3388 | 1 | 3388 | 256 | 256 | 1295 | 1 | 18 | 19 | 957 |
| | | Jul. 09, 1999 | 3.0 | | | | | | | | | | | |
| 348 | HMTBI36 | PTA-322 | pCMVSport | 786 | 3546 | 1 | 3363 | 255 | 255 | 1723 | 1 | 18 | 19 | 957 |
| | | Jul. 09, 1999 | 3.0 | | | | | | | | | | | |
| 349 | HMUAP70 | 209878 | pCMVSport | 359 | 1965 | 531 | 1914 | 183 | 183 | 1296 | 1 | 16 | 17 | 221 |
| | | May 18, 1998 | 3.0 | | | | | | | | | | | |
| 349 | HMUAP70 | 209878 | pCMVSport | 787 | 1842 | 407 | 1783 | 413 | 413 | 1724 | 1 | 25 | 26 | 103 |
| | | May 18, 1998 | 3.0 | | | | | | | | | | | |
| 349 | HMUAP70 | 209878 | pCMVSport | 788 | 1963 | 530 | 1914 | 251 | 251 | 1725 | 1 | 28 | 29 | 198 |
| | | May 18, 1998 | 3.0 | | | | | | | | | | | |
| 349 | HMUAP70 | 209878 | pCMVSport | 789 | 1487 | 1 | 1487 | 62 | 62 | 1726 | 1 | 16 | 17 | 106 |
| | | May 18, 1998 | 3.0 | | | | | | | | | | | |
| 349 | HMUAP70 | 209878 | pCMVSport | 790 | 1653 | 1 | 1653 | 60 | 60 | 1727 | 1 | 15 | 16 | 68 |
| | | May 18, 1998 | 3.0 | | | | | | | | | | | |
| 349 | HMUAP70 | 209878 | pCMVSport | 791 | 1830 | 407 | 1830 | 60 | 60 | 1728 | 1 | | | 23 |
| | | May 18, 1998 | 3.0 | | | | | | | | | | | |
| 350 | HMVBN46 | 209603 | pSport1 | 360 | 1382 | 1 | 1382 | 10 | 10 | 1297 | 1 | 19 | 20 | 48 |
| | | Jan. 29, 1998 | | | | | | | | | | | | |
| 351 | HMWEB02 | 209628 | Uni-ZAP XR | 361 | 1755 | 1 | 1755 | 106 | 106 | 1298 | 1 | 23 | 24 | 91 |
| | | Feb. 12, 1998 | | | | | | | | | | | | |
| 352 | HMWFO02 | 209324 | Uni-ZAP XR | 362 | 547 | 1 | 547 | 7 | 7 | 1299 | 1 | 37 | 38 | 68 |
| | | Oct. 02, 1997 | | | | | | | | | | | | |
| 352 | HMWFO02 | 209324 | Uni-ZAP XR | 792 | 708 | 1 | 708 | 20 | 20 | 1729 | 1 | 38 | 39 | 60 |
| | | Oct. 02, 1997 | | | | | | | | | | | | |
| 353 | HMWGY65 | 203105 | Uni-ZAP XR | 363 | 1974 | 1 | 1974 | 42 | 42 | 1300 | 1 | 21 | 22 | 490 |
| | | Aug. 13, 1998 | | | | | | | | | | | | |
| 353 | HMWGY65 | 203105 | Uni-ZAP XR | 793 | 2027 | 1 | 1976 | 42 | 42 | 1730 | 1 | 21 | 22 | 188 |
| | | Aug. 13, 1998 | | | | | | | | | | | | |
| 354 | HNEAC05 | 209236 | Uni-ZAP XR | 364 | 890 | 1 | 890 | 101 | 101 | 1301 | 1 | 24 | 25 | 105 |
| | | Sep. 04, 1997 | | | | | | | | | | | | |
| 355 | HNEEB45 | PTA-845 | Uni-ZAP XR | 365 | 1043 | 1 | 1043 | 139 | 139 | 1302 | 1 | 25 | 26 | 57 |
| | | Oct. 13, 1999 | | | | | | | | | | | | |
| 355 | HNEEB45 | PTA-845 | Uni-ZAP XR | 794 | 699 | 160 | 699 | 226 | 226 | 1731 | 1 | 25 | 26 | 57 |
| | | Oct. 13, 1999 | | | | | | | | | | | | |
| 356 | HNFFC43 | 203027 | Uni-ZAP XR | 366 | 2103 | 209 | 2058 | 488 | 488 | 1303 | 1 | 12 | 13 | 68 |
| | | Jun. 26, 1998 | | | | | | | | | | | | |
| 357 | HNFIU96 | 209126 | pBluescript | 367 | 456 | 1 | 456 | 170 | 170 | 1304 | 1 | 32 | 33 | 79 |
| | | Jun. 19, 1997 | | | | | | | | | | | | |
| 358 | HNFJF07 | 209463 | Uni-ZAP XR | 368 | 616 | 1 | 616 | 86 | 86 | 1305 | 1 | 21 | 22 | 66 |
| | | Nov. 14, 1997 | | | | | | | | | | | | |
| 359 | HNFJH45 | 97976 | Uni-ZAP XR | 369 | 575 | 1 | 575 | 275 | 275 | 1306 | 1 | 30 | 31 | 67 |
| | | Apr. 04, 1997 | | | | | | | | | | | | |
| 360 | HNGAK47 | 209368 | Uni-ZAP XR | 370 | 1144 | 1 | 1144 | 89 | 89 | 1307 | 1 | 23 | 24 | 40 |
| | | Oct. 16, 1997 | | | | | | | | | | | | |
| 361 | HNGAP93 | 209243 | Uni-ZAP XR | 371 | 703 | 1 | 703 | 50 | 50 | 1308 | 1 | 19 | 20 | 33 |
| | | Sep. 12, 1997 | | | | | | | | | | | | |
| 362 | HNGBC07 | PTA-844 | Uni-ZAP XR | 372 | 1649 | 1 | 1647 | 81 | 81 | 1309 | 1 | 18 | 19 | 249 |
| | | Oct. 13, 1999 | | | | | | | | | | | | |
| 362 | HNGBC07 | PTA-844 | Uni-ZAP XR | 795 | 1649 | 1 | 1647 | 122 | 122 | 1732 | 1 | 24 | 25 | 44 |
| | | Oct. 13, 1999 | | | | | | | | | | | | |
| 362 | HNGBC07 | PTA-844 | Uni-ZAP XR | 796 | 1570 | 1 | 1570 | 55 | 55 | 1733 | 1 | 24 | 25 | 44 |
| | | Oct. 13, 1999 | | | | | | | | | | | | |
| 363 | HNGBT31 | 97976 | Uni-ZAP XR | 373 | 639 | 1 | 639 | 224 | 224 | 1310 | 1 | 28 | 29 | 104 |
| | | Apr. 04, 1997 | | | | | | | | | | | | |
| 364 | HNGDG40 | 209299 | Uni-ZAP XR | 374 | 520 | 1 | 520 | 13 | 13 | 1311 | 1 | 36 | 37 | 127 |
| | | Sep. 25, 1997 | | | | | | | | | | | | |
| 365 | HNGDJ72 | 209299 | Uni-ZAP XR | 375 | 524 | 1 | 524 | 185 | 185 | 1312 | 1 | 19 | 20 | 113 |
| | | Sep. 25, 1997 | | | | | | | | | | | | |
| 366 | HNGDU40 | 209563 | Uni-ZAP XR | 376 | 1035 | 1 | 1035 | 333 | 333 | 1313 | 1 | 17 | 18 | 51 |
| | | Dec. 18, 1997 | | | | | | | | | | | | |
| 367 | HNGEO29 | 209299 | Uni-ZAP XR | 377 | 491 | 1 | 491 | 98 | 98 | 1314 | 1 | 32 | 33 | 44 |
| | | Sep. 25, 1997 | | | | | | | | | | | | |
| 368 | HNGEP09 | 209197 | Uni-ZAP XR | 378 | 1042 | 1 | 1042 | 72 | 72 | 1315 | 1 | 15 | 16 | 82 |
| | | Aug. 08, 1997 | | | | | | | | | | | | |
| 369 | HNGHR74 | 209346 | Uni-ZAP XR | 379 | 1095 | 1 | 1095 | 53 | 53 | 1316 | 1 | 18 | 19 | 41 |
| | | Oct. 09, 1997 | | | | | | | | | | | | |
| 370 | HNGIH43 | 97976 | Uni-ZAP XR | 380 | 427 | 1 | 427 | 178 | 178 | 1317 | 1 | 31 | 32 | 40 |
| | | Apr. 04, 1997 | | | | | | | | | | | | |
| 371 | HNGIJ31 | 209236 | Uni-ZAP XR | 381 | 796 | 1 | 796 | 135 | 135 | 1318 | 1 | 16 | 17 | 36 |
| | | Sep. 04, 1997 | | | | | | | | | | | | |
| 372 | HNGIQ46 | 209243 | Uni-ZAP XR | 382 | 527 | 1 | 527 | 221 | 221 | 1319 | 1 | 21 | 22 | 70 |
| | | Sep. 12, 1997 | | | | | | | | | | | | |
| 373 | HNGJE50 | 209368 | Uni-ZAP XR | 383 | 1037 | 1 | 1037 | 77 | 77 | 1320 | 1 | 36 | 37 | 46 |
| | | Oct. 16, 1997 | | | | | | | | | | | | |
| 374 | HNGJO57 | 209463 | Uni-ZAP XR | 384 | 828 | 1 | 828 | 87 | 87 | 1321 | 1 | 18 | 19 | 52 |
| | | Nov. 14, 1997 | | | | | | | | | | | | |
| 375 | HNGJP69 | 209603 | Uni-ZAP XR | 385 | 985 | 1 | 985 | 321 | 321 | 1322 | 1 | 14 | 15 | 74 |
| | | Jan. 29, 1998 | | | | | | | | | | | | |
| 376 | HNGJT54 | 209215 | Uni-ZAP XR | 386 | 1110 | 1 | 1110 | 172 | 172 | 1323 | 1 | 19 | 20 | 34 |
| | | Aug. 21, 1997 | | | | | | | | | | | | |
| 377 | HNGKN89 | 203648 | Uni-ZAP XR | 387 | 925 | 1 | 925 | 436 | 436 | 1324 | 1 | 24 | 25 | 53 |
| | | Feb. 09, 1999 | | | | | | | | | | | | |
| 378 | HNGOM56 | 203648 | Uni-ZAP XR | 388 | 956 | 1 | 956 | 391 | 391 | 1325 | 1 | 22 | 23 | 55 |
| | | Feb. 09, 1999 | | | | | | | | | | | | |
| 379 | HNGOU56 | 203858 | Uni-ZAP XR | 389 | 742 | 1 | 742 | 317 | 317 | 1326 | 1 | 23 | 24 | 59 |
| | | Mar. 18, 1999 | | | | | | | | | | | | |
| 380 | HNGOW62 | PTA-622 | Uni-ZAP XR | 390 | 1298 | 1 | 1298 | 167 | 167 | 1327 | 1 | 19 | 20 | 54 |
| | | Sep. 02, 1999 | | | | | | | | | | | | |
| 381 | HNHAH01 | 209180 | Uni-ZAP XR | 391 | 905 | 1 | 905 | 328 | 328 | 1328 | 1 | 41 | 42 | 54 |
| | | Jul. 24, 1997 | | | | | | | | | | | | |
| 382 | HNHCX60 | 209243 | Uni-ZAP XR | 392 | 762 | 1 | 762 | 158 | 158 | 1329 | 1 | 20 | 21 | 21 |
| | | Sep. 12, 1997 | | | | | | | | | | | | |
| 383 | HNHCY64 | 209243 | Uni-ZAP XR | 393 | 725 | 1 | 725 | 258 | 258 | 1330 | 1 | 32 | 33 | 44 |
| | | Sep. 12, 1997 | | | | | | | | | | | | |
| 384 | HNHCY94 | 209243 | Uni-ZAP XR | 394 | 606 | 1 | 606 | 78 | 78 | 1331 | 1 | 25 | 26 | 48 |
| | | Sep. 12, 1997 | | | | | | | | | | | | |
| 385 | HNHDW38 | 209299 | Uni-ZAP XR | 395 | 793 | 1 | 793 | 231 | 231 | 1332 | 1 | 22 | 23 | 46 |
| | | Sep. 25, 1997 | | | | | | | | | | | | |
| 386 | HNHDW42 | 97976 | Uni-ZAP XR | 396 | 426 | 1 | 426 | 168 | 168 | 1333 | 1 | 26 | 27 | 71 |
| | | Apr. 04, 1997 | | | | | | | | | | | | |
| 387 | HNHED17 | 209346 | Uni-ZAP XR | 397 | 843 | 1 | 843 | 274 | 274 | 1334 | 1 | 19 | 20 | 51 |
| | | Oct. 09, 1997 | | | | | | | | | | | | |
| 387 | HNHED17 | 209346 | Uni-ZAP XR | 797 | 692 | 1 | 692 | 282 | 282 | 1734 | 1 | 19 | 20 | 48 |
| | | Oct. 09, 1997 | | | | | | | | | | | | |
| 388 | HNHEI42 | PTA-844 | Uni-ZAP XR | 398 | 2642 | 1 | 2642 | 52 | 52 | 1335 | 1 | 22 | 23 | 36 |
| | | Oct. 13, 1999 | | | | | | | | | | | | |
| 388 | HNHEI42 | PTA-844 | Uni-ZAP XR | 798 | 1654 | 1 | 1654 | 28 | 28 | 1735 | 1 | 22 | 23 | 36 |
| | | Oct. 13, 1999 | | | | | | | | | | | | |
| 388 | HNHEI42 | PTA-844 | Uni-ZAP XR | 799 | 447 | 1 | 447 | | 166 | 1736 | 1 | 6 | 7 | 28 |
| | | Oct. 13, 1999 | | | | | | | | | | | | |
| 388 | HNHEI42 | PTA-844 | Uni-ZAP XR | 800 | 641 | 1 | 641 | | 331 | 1737 | 1 | 3 | 4 | 34 |
| | | Oct. 13, 1999 | | | | | | | | | | | | |
| 389 | HNHFO29 | 209138 | Uni-ZAP XR | 399 | 699 | 1 | 699 | 160 | 160 | 1336 | 1 | 21 | 22 | 180 |
| | | Jul. 03, 1997 | | | | | | | | | | | | |
| 390 | HNHFR04 | 209683 | Uni-ZAP XR | 400 | 1681 | 1 | 1681 | 71 | 71 | 1337 | 1 | 21 | 22 | 78 |
| | | Mar. 20, 1998 | | | | | | | | | | | | |
| 391 | HNHFU32 | 209407 | Uni-ZAP XR | 401 | 607 | 1 | 607 | 175 | 175 | 1338 | 1 | 30 | 31 | 52 |
| | | Oct. 23, 1997 | | | | | | | | | | | | |
| 392 | HNHOD46 | PTA-1543 | Uni-ZAP XR | 402 | 1355 | 1 | 1355 | 12 | 12 | 1339 | 1 | 20 | 21 | 80 |
| | | Mar. 21, 2000 | | | | | | | | | | | | |
| 393 | HNHOG73 | 203570 | Uni-ZAP XR | 403 | 802 | 1 | 802 | 342 | 342 | 1340 | 1 | 19 | 20 | 51 |
| | | Jan. 11, 1999 | | | | | | | | | | | | |
| 394 | HNHPD10 | 203570 | Uni-ZAP XR | 404 | 940 | 1 | 940 | 291 | 291 | 1341 | 1 | 33 | 34 | 40 |
| | | Jan. 11, 1999 | | | | | | | | | | | | |
| 395 | HNTBI57 | 209423 | pCMVSport | 405 | 1365 | 134 | 1365 | 210 | 210 | 1342 | 1 | 26 | 27 | 58 |
| | | Oct. 30, 1997 | 3.0 | | | | | | | | | | | |
| 396 | HNTCE26 | PTA-1544 | pCMVSport | 406 | 2163 | 830 | 2163 | 111 | 111 | 1343 | 1 | 30 | 31 | 402 |
| | | Mar. 21, 2000 | 3.0 | | | | | | | | | | | |
| 396 | HNTCE26 | PTA-1544 | pCMVSport | 801 | 1763 | 1 | 1763 | 57 | 57 | 1738 | 1 | 28 | 29 | 121 |
| | | Mar. 21, 2000 | 3.0 | | | | | | | | | | | |
| 397 | HNTNC20 | 209782 | pSport1 | 407 | 1979 | 1 | 1979 | 270 | 270 | 1344 | 1 | 19 | 20 | 218 |
| | | Apr. 20, 1998 | | | | | | | | | | | | |
| 398 | HNTNI01 | 209782 | pSport1 | 408 | 2087 | 1 | 2087 | 307 | 307 | 1345 | 1 | 33 | 34 | 76 |
| | | Apr. 20, 1998 | | | | | | | | | | | | |
| 398 | HNTNI01 | 209782 | pSport1 | 802 | 1274 | 1 | 1114 | 306 | 306 | 1739 | 1 | 33 | 34 | 49 |
| | | Apr. 20, 1998 | | | | | | | | | | | | |
| 399 | HNTSY18 | PTA-855 | pSport1 | 409 | 1811 | 265 | 1783 | 257 | 257 | 1346 | 1 | 31 | 32 | 89 |
| | | Oct. 18, 1999 | | | | | | | | | | | | |
| 399 | HNTSY18 | PTA-855 | pSport1 | 803 | 847 | 742 | 819 | | 420 | 1740 | 1 | 1 | 2 | 79 |
| | | Oct. 18, 1999 | | | | | | | | | | | | |
| 400 | HOAAC90 | 209236 | Uni-ZAP XR | 410 | 642 | 1 | 642 | 33 | 33 | 1347 | 1 | 15 | 16 | 104 |
| | | Sep. 04, 1997 | | | | | | | | | | | | |
| 400 | HOAAC90 | 209236 | Uni-ZAP XR | 804 | 652 | 1 | 652 | 38 | 38 | 1741 | 1 | 15 | 16 | 104 |
| | | Sep. 04, 1997 | | | | | | | | | | | | |
| 401 | HOACB38 | 209243 | Uni-ZAP XR | 411 | 606 | 1 | 606 | 63 | 63 | 1348 | 1 | 21 | 22 | 40 |
| | | Sep. 12, 1997 | | | | | | | | | | | | |
| 402 | HOCNF19 | 203570 | pSport1 | 412 | 1118 | 1 | 1118 | 166 | 166 | 1349 | 1 | 20 | 21 | 87 |
| | | Jan. 11, 1999 | | | | | | | | | | | | |
| 403 | HODDF13 | 203069 | Uni-ZAP XR | 413 | 830 | 1 | 830 | 46 | 46 | 1350 | 1 | 23 | 24 | 41 |
| | | Jul. 27, 1998 | | | | | | | | | | | | |
| 404 | HODDN65 | 209244 | Uni-ZAP XR | 414 | 755 | 1 | 755 | 251 | 251 | 1351 | 1 | 14 | 15 | 20 |
| | | Sep. 12, 1997 | | | | | | | | | | | | |
| 405 | HODDN92 | 209012 | Uni-ZAP XR | 415 | 1939 | 294 | 1939 | | 434 | 1352 | 1 | 26 | 27 | 35 |
| | | Apr. 28, 1997 | | | | | | | | | | | | |
| | | 209089 | | | | | | | | | | | | |
| | | Jun. 05, 1997 | | | | | | | | | | | | |
| 406 | HODDO08 | 203364 | Uni-ZAP XR | 416 | 1776 | 138 | 1284 | 725 | 725 | 1353 | 1 | 33 | 34 | 106 |
| | | Oct. 19, 1998 | | | | | | | | | | | | |
| 407 | HODDW40 | 209463 | Uni-ZAP XR | 417 | 682 | 1 | 682 | 139 | 139 | 1354 | 1 | 19 | 20 | 40 |
| | | Nov. 14, 1997 | | | | | | | | | | | | |
| 408 | HODEJ32 | 203570 | Uni-ZAP XR | 418 | 739 | 1 | 739 | 358 | 358 | 1355 | 1 | 21 | 22 | 43 |
| | | Jan. 11, 1999 | | | | | | | | | | | | |
| 409 | HODFN71 | 203570 | Uni-ZAP XR | 419 | 1126 | 1 | 1126 | | 1 | 1356 | 1 | 1 | 2 | 159 |
| | | Jan. 11, 1999 | | | | | | | | | | | | |
| 409 | HODFN71 | 203570 | Uni-ZAP XR | 805 | 1124 | 1 | 1124 | 27 | 27 | 1742 | 1 | 18 | 19 | 148 |
| | | Jan. 11, 1999 | | | | | | | | | | | | |
| 410 | HODGE68 | 203570 | Uni-ZAP XR | 420 | 851 | 1 | 851 | 87 | 87 | 1357 | 1 | 26 | 27 | 59 |
| | | Jan. 11, 1999 | | | | | | | | | | | | |
| 411 | HOEBK34 | 209224 | Uni-ZAP XR | 421 | 747 | 75 | 747 | 149 | 149 | 1358 | 1 | 20 | 21 | 165 |
| | | Aug. 28, 1997 | | | | | | | | | | | | |
| 411 | HOEBK34 | 209224 | Uni-ZAP XR | 806 | 660 | 1 | 660 | 68 | 68 | 1743 | 1 | 26 | 27 | 88 |
| | | Aug. 28, 1997 | | | | | | | | | | | | |
| 412 | HOEBZ89 | 203517 | Uni-ZAP XR | 422 | 2520 | 1 | 2520 | 19 | 19 | 1359 | 1 | 21 | 22 | 333 |
| | | Dec. 10, 1998 | | | | | | | | | | | | |
| 413 | HOEDB32 | 209628 | Uni-ZAP XR | 423 | 1462 | 73 | 1462 | 104 | 104 | 1360 | 1 | 21 | 22 | 226 |
| | | Feb. 12, 1998 | | | | | | | | | | | | |
| 414 | HOEDE28 | PTA-844 | Uni-ZAP XR | 424 | 1635 | 1 | 1635 | 248 | 248 | 1361 | 1 | 21 | 22 | 117 |
| | | Oct. 13, 1999 | | | | | | | | | | | | |
| 414 | HOEDE28 | PTA-844 | Uni-ZAP XR | 807 | 1424 | 806 | 1424 | | 387 | 1744 | 1 | 11 | 12 | 20 |
| | | Oct. 13, 1999 | | | | | | | | | | | | |
| 415 | HOEDH84 | 209965 | Uni-ZAP XR | 425 | 2079 | 1 | 2079 | 256 | 256 | 1362 | 1 | 20 | 21 | 404 |
| | | Jun. 11, 1998 | | | | | | | | | | | | |
| 416 | HOEFV61 | 203517 | Uni-ZAP XR | 426 | 2657 | 1 | 2657 | 64 | 64 | 1363 | 1 | 13 | 14 | 180 |
| | | Dec. 10, 1998 | | | | | | | | | | | | |
| 417 | HOFMQ33 | PTA-848 | pCMVSport | 427 | 2410 | 1 | 2410 | 49 | 49 | 1364 | 1 | 24 | 25 | 484 |
| | | Oct. 13, 1999 | 2.0 | | | | | | | | | | | |
| 417 | HOFMQ33 | PTA-848 | pCMVSport | 808 | 2409 | 1 | 2409 | 48 | 48 | 1745 | 1 | 24 | 25 | 484 |
| | | Oct. 13, 1999 | 2.0 | | | | | | | | | | | |
| 417 | HOFMQ33 | PTA-848 | pCMVSport | 809 | 876 | 1 | 876 | 78 | 78 | 1746 | 1 | 24 | 25 | 266 |
| | | Oct. 13, 1999 | 2.0 | | | | | | | | | | | |
| 417 | HOFMQ33 | PTA-848 | pCMVSport | 810 | 1586 | 1 | 1586 | | 724 | 1747 | 1 | | | 5 |
| | | Oct. 13, 1999 | 2.0 | | | | | | | | | | | |
| 417 | HOFMQ33 | PTA-848 | pCMVSport | 811 | 1011 | 873 | 1011 | | 123 | 1748 | 1 | 1 | 2 | 84 |
| | | Oct. 13, 1999 | 2.0 | | | | | | | | | | | |
| 418 | HOFMT75 | PTA-848 | pCMVSport | 428 | 2131 | 6 | 2131 | 83 | 83 | 1365 | 1 | 20 | 21 | 410 |
| | | Oct. 13, 1999 | 2.0 | | | | | | | | | | | |
| 418 | HOFMT75 | PTA-848 | pCMVSport | 812 | 427 | 1 | 427 | 83 | 83 | 1749 | 1 | 20 | 21 | 115 |
| | | Oct. 13, 1999 | 2.0 | | | | | | | | | | | |
| 418 | HOFMT75 | PTA-848 | pCMVSport | 813 | 1500 | 1 | 1500 | | 1225 | 1750 | 1 | 9 | 10 | 92 |
| | | Oct. 13, 1999 | 2.0 | | | | | | | | | | | |
| 418 | HOFMT75 | PTA-848 | pCMVSport | 814 | 1234 | 337 | 1234 | 129 | 129 | 1751 | 1 | 20 | 21 | 368 |
| | | Oct. 13, 1999 | 2.0 | | | | | | | | | | | |
| 419 | HOFNC14 | PTA-623 | pCMVSport | 429 | 2794 | 1 | 2794 | 79 | 79 | 1366 | 1 | 13 | 14 | 73 |
| | | Sep. 02, 1999 | 2.0 | | | | | | | | | | | |
| 419 | HOFNC14 | PTA-623 | pCMVSport | 815 | 3095 | 1 | 3095 | 155 | 155 | 1752 | 1 | 13 | 14 | 72 |
| | | Sep. 02, 1999 | 2.0 | | | | | | | | | | | |
| 420 | HOFND85 | PTA-1544 | pCMVSport | 430 | 2048 | 1 | 2048 | 167 | 167 | 1367 | 1 | 22 | 23 | 627 |
| | | Mar. 21, 2000 | 2.0 | | | | | | | | | | | |
| 421 | HOFNY91 | PTA-1544 | pCMVSport | 431 | 2406 | 1 | 2406 | 64 | 64 | 1368 | 1 | 14 | 15 | 82 |
| | | Mar. 21, 2000 | 2.0 | | | | | | | | | | | |
| 422 | HOFOC33 | PTA-848 | pCMVSport | 432 | 1669 | 1 | 1669 | 76 | 76 | 1369 | 1 | 21 | 22 | 363 |
| | | Oct. 13, 1999 | 2.0 | | | | | | | | | | | |
| 422 | HOFOC33 | PTA-848 | pCMVSport | 816 | 518 | 1 | 518 | 81 | 81 | 1753 | 1 | 21 | 22 | 112 |
| | | Oct. 13, 1999 | 2.0 | | | | | | | | | | | |
| 422 | HOFOC33 | PTA-848 | pCMVSport | 817 | 518 | 1 | 518 | 81 | 81 | 1754 | 1 | 17 | 18 | 112 |
| | | Oct. 13, 1999 | 2.0 | | | | | | | | | | | |
| 422 | HOFOC33 | PTA-848 | pCMVSport | 818 | 1670 | 1 | 1670 | 76 | 76 | 1755 | 1 | 21 | 22 | 139 |
| | | Oct. 13, 1999 | 2.0 | | | | | | | | | | | |
| 422 | HOFOC33 | PTA-848 | pCMVSport | 819 | 606 | 1 | 606 | | 23 | 1756 | 1 | | | 7 |
| | | Oct. 13, 1999 | 2.0 | | | | | | | | | | | |
| 422 | HOFOC33 | PTA-848 | pCMVSport | 820 | 841 | 1 | 841 | | 158 | 1757 | 1 | 6 | 7 | 14 |
| | | Oct. 13, 1999 | 2.0 | | | | | | | | | | | |
| 422 | HOFOC33 | PTA-848 | pCMVSport | 821 | 868 | 1 | 847 | | 3 | 1758 | 1 | 1 | 2 | 288 |
| | | Oct. 13, 1999 | 2.0 | | | | | | | | | | | |
| 423 | HOFOC73 | PTA-848 | pCMVSport | 433 | 1491 | 1 | 1491 | 18 | 18 | 1370 | 1 | 18 | 19 | 129 |
| | | Oct. 13, 1999 | 2.0 | | | | | | | | | | | |
| 423 | HOFOC73 | PTA-848 | pCMVSport | 822 | 1395 | 1 | 1395 | 23 | 23 | 1759 | 1 | 18 | 19 | 67 |
| | | Oct. 13, 1999 | 2.0 | | | | | | | | | | | |
| 423 | HOFOC73 | PTA-848 | pCMVSport | 823 | 270 | 1 | 270 | | 127 | 1760 | 1 | 4 | 5 | 14 |
| | | Oct. 13, 1999 | 2.0 | | | | | | | | | | | |
| 423 | HOFOC73 | PTA-848 | pCMVSport | 824 | 2324 | 662 | 2324 | 142 | 142 | 1761 | 1 | | | 6 |
| | | Oct. 13, 1999 | 2.0 | | | | | | | | | | | |
| 424 | HOGAW62 | 209463 | pCMVSport | 434 | 571 | 1 | 571 | 259 | 259 | 1371 | 1 | 25 | 26 | 55 |
| | | Nov. 14, 1997 | 2.0 | | | | | | | | | | | |
| 425 | HOGCK20 | 209853 | pCMVSport | 435 | 2087 | 1 | 2087 | 57 | 57 | 1372 | 1 | 23 | 24 | 522 |
| | | May 07, 1998 | 2.0 | | | | | | | | | | | |
| 425 | HOGCK20 | 209853 | pCMVSport | 825 | 2075 | 1 | 2054 | | 53 | 1762 | 1 | 22 | 23 | 554 |
| | | May 07, 1998 | 2.0 | | | | | | | | | | | |
| 426 | HOGCK63 | PTA-848 | pCMVSport | 436 | 1409 | 310 | 1409 | 514 | 514 | 1373 | 1 | 29 | 30 | 246 |
| | | Oct. 13, 1999 | 2.0 | | | | | | | | | | | |
| 426 | HOGCK63 | PTA-848 | pCMVSport | 826 | 1697 | 144 | 1697 | | 1455 | 1763 | 1 | | | 5 |
| | | Oct. 13, 1999 | 2.0 | | | | | | | | | | | |
| 427 | HOGCS52 | PTA-848 | pCMVSport | 437 | 2571 | 1 | 2571 | 25 | 25 | 1374 | 1 | 22 | 23 | 453 |
| | | Oct. 13, 1999 | 2.0 | | | | | | | | | | | |
| 427 | HOGCS52 | PTA-848 | pCMVSport | 827 | 2645 | 1 | 2586 | 30 | 30 | 1764 | 1 | 22 | 23 | 453 |
| | | Oct. 13, 1999 | 2.0 | | | | | | | | | | | |
| 427 | HOGCS52 | PTA-848 | pCMVSport | 828 | 1098 | 457 | 638 | | 2 | 1765 | 1 | 1 | 2 | 96 |
| | | Oct. 13, 1999 | 2.0 | | | | | | | | | | | |
| 428 | HOHBB49 | 203517 | pCMVSport | 438 | 3080 | 1 | 3080 | 148 | 148 | 1375 | 1 | 19 | 20 | 48 |
| | | Dec. 10, 1998 | 2.0 | | | | | | | | | | | |
| 429 | HOHBC68 | 209568 | pCMVSport | 439 | 1837 | 1 | 1837 | 348 | 348 | 1376 | 1 | 30 | 31 | 128 |
| | | Jan. 06, 1998 | 2.0 | | | | | | | | | | | |
| 430 | HOHBY12 | 209603 | pCMVSport | 440 | 1188 | 1 | 1188 | 232 | 232 | 1377 | 1 | 25 | 26 | 199 |
| | | Jan. 29, 1998 | 2.0 | | | | | | | | | | | |
| 431 | HOHBY44 | PTA-867 | pCMVSport | 441 | 3369 | 1 | 3369 | 170 | 170 | 1378 | 1 | 24 | 25 | 184 |
| | | Oct. 26, 1999 | 2.0 | | | | | | | | | | | |
| 431 | HOHBY44 | PTA-867 | pCMVSport | 829 | 1063 | 533 | 1063 | | 2 | 1766 | 1 | 1 | 2 | 77 |
| | | Oct. 26, 1999 | 2.0 | | | | | | | | | | | |
| 431 | HOHBY44 | PTA-867 | pCMVSport | 830 | 1178 | 1 | 1178 | | 54 | 1767 | 1 | 1 | 2 | 84 |
| | | Oct. 26, 1999 | 2.0 | | | | | | | | | | | |
| 432 | HOHCC74 | 209346 | pCMVSport | 442 | 558 | 1 | 558 | 327 | 327 | 1379 | 1 | 20 | 21 | 48 |
| | | Oct. 09, 1997 | 2.0 | | | | | | | | | | | |
| 433 | HOHCH55 | 203331 | pCMVSport | 443 | 2499 | 1 | 2499 | 221 | 221 | 1380 | 1 | 23 | 24 | 494 |
| | | Oct. 08, 1998 | 2.0 | | | | | | | | | | | |
| 433 | HOHCH55 | 203331 | pCMVSport | 831 | 2522 | 1 | 2522 | 230 | 230 | 1768 | 1 | 23 | 24 | 469 |
| | | Oct. 08, 1998 | 2.0 | | | | | | | | | | | |
| 434 | HONAH29 | 209138 | pBluescript | 444 | 1623 | 1 | 1623 | 136 | 136 | 1381 | 1 | 25 | 26 | 211 |
| | | Jul. 03, 1997 | SK− | | | | | | | | | | | |
| 434 | HONAH29 | 209138 | pBluescript | 832 | 1637 | 17 | 1632 | 144 | 144 | 1769 | 1 | 25 | 26 | 211 |
| | | Jul. 03, 1997 | SK− | | | | | | | | | | | |
| 435 | HOSDJ25 | 209423 | Uni-ZAP XR | 445 | 2214 | 985 | 2214 | 1076 | 1076 | 1382 | 1 | 18 | 19 | 40 |
| | | Oct. 30, 1997 | | | | | | | | | | | | |
| 435 | HOSDJ25 | 209423 | Uni-ZAP XR | 833 | 1258 | 1 | 1258 | 146 | 146 | 1770 | 1 | 18 | 19 | 40 |
| | | Oct. 30, 1997 | | | | | | | | | | | | |
| 436 | HOSEG51 | 209324 | Uni-ZAP XR | 446 | 590 | 48 | 590 | 232 | 232 | 1383 | 1 | 31 | 32 | 102 |
| | | Oct. 02, 1997 | | | | | | | | | | | | |
| 437 | HOSFD58 | 97957 | Uni-ZAP XR | 447 | 2527 | 290 | 1747 | 56 | 56 | 1384 | 1 | 30 | 31 | 624 |
| | | Mar. 13, 1997 | | | | | | | | | | | | |
| | | 209073 | | | | | | | | | | | | |
| | | May 22, 1997 | | | | | | | | | | | | |
| 437 | HOSFD58 | 97957 | Uni-ZAP XR | 834 | 2527 | 288 | 1747 | 477 | 477 | 1771 | 1 | 32 | 33 | 61 |
| | | Mar. 13, 1997 | | | | | | | | | | | | |
| | | 209073 | | | | | | | | | | | | |
| | | May 22, 1997 | | | | | | | | | | | | |
| 438 | HOUCQ17 | 209086 | Uni-ZAP XR | 448 | 4712 | 1 | 4693 | 508 | 508 | 1385 | 1 | 51 | 52 | 967 |
| | | May 29, 1997 | | | | | | | | | | | | |
| 439 | HOUDK26 | 209423 | Uni-ZAP XR | 449 | 1051 | 1 | 1051 | 214 | 214 | 1386 | 1 | 30 | 31 | 174 |
| | | Oct. 30, 1997 | | | | | | | | | | | | |
| 440 | HOVCA92 | 209299 | pSport1 | 450 | 707 | 1 | 488 | 181 | 181 | 1387 | 1 | 20 | 21 | 62 |
| | | Sep. 25, 1997 | | | | | | | | | | | | |
| 441 | HPASA81 | 203181 | Uni-ZAP XR | 451 | 1945 | 1 | 1945 | 19 | 19 | 1388 | 1 | 17 | 18 | 600 |
| | | Sep. 09, 1998 | | | | | | | | | | | | |
| 441 | HPASA81 | 203181 | Uni-ZAP XR | 835 | 1971 | 2 | 1971 | 14 | 14 | 1772 | 1 | 17 | 18 | 315 |
| | | Sep. 09, 1998 | | | | | | | | | | | | |
| 441 | HPASA81 | 203181 | Uni-ZAP XR | 836 | 2081 | 1 | 2081 | 124 | 124 | 1773 | 1 | 17 | 18 | 72 |
| | | Sep. 09, 1998 | | | | | | | | | | | | |
| 442 | HPBCU51 | 97977 | pBluescript | 452 | 599 | 1 | 599 | 86 | 86 | 1389 | 1 | 27 | 28 | 119 |
| | | Apr. 04, 1997 | SK− | | | | | | | | | | | |
| | | 209082 | | | | | | | | | | | | |
| | | May 29, 1997 | | | | | | | | | | | | |
| 443 | HPDDC77 | 209012 | pBluescript | 453 | 978 | 1 | 978 | 51 | 51 | 1390 | 1 | 29 | 30 | 131 |
| | | Apr. 28, 1997 | SK− | | | | | | | | | | | |
| | | 209089 | | | | | | | | | | | | |
| | | Jun. 05, 1997 | | | | | | | | | | | | |
| 443 | HPDDC77 | 209012 | pBluescript | 837 | 2361 | 455 | 1442 | 510 | 510 | 1774 | 1 | 29 | 30 | 131 |
| | | Apr. 28, 1997 | SK− | | | | | | | | | | | |
| | | 209089 | | | | | | | | | | | | |
| | | Jun. 05, 1997 | | | | | | | | | | | | |
| 444 | HPDWP28 | PTA-2076 | pSport1 | 454 | 528 | 1 | 528 | 143 | 143 | 1391 | 1 | 29 | 30 | 49 |
| | | Jun. 09, 2000 | | | | | | | | | | | | |
| 444 | HPDWP28 | PTA-2076 | pSport1 | 838 | 510 | 1 | 500 | 133 | 133 | 1775 | 1 | 29 | 30 | 49 |
| | | Jun. 09, 2000 | | | | | | | | | | | | |
| 445 | HPEAD48 | 209244 | Uni-ZAP XR | 455 | 625 | 1 | 625 | 203 | 203 | 1392 | 1 | 18 | 19 | 97 |
| | | Sep. 12, 1997 | | | | | | | | | | | | |
| 446 | HPEBE79 | 209241 | Uni-ZAP XR | 456 | 597 | 1 | 597 | 79 | 79 | 1393 | 1 | 11 | 12 | 15 |
| | | Sep. 12, 1997 | | | | | | | | | | | | |
| 447 | HPFCL43 | 209299 | Uni-ZAP XR | 457 | 665 | 1 | 665 | 21 | 21 | 1394 | 1 | 17 | 18 | 79 |
| | | Sep. 25, 1997 | | | | | | | | | | | | |
| 448 | HPFDG48 | 209324 | Uni-ZAP XR | 458 | 723 | 165 | 700 | 283 | 283 | 1395 | 1 | 18 | 19 | 47 |
| | | Oct. 02, 1997 | | | | | | | | | | | | |
| 449 | HPIAQ68 | 203517 | Uni-ZAP XR | 459 | 2466 | 1 | 2466 | 20 | 20 | 1396 | 1 | 22 | 23 | 62 |
| | | Dec. 10, 1998 | | | | | | | | | | | | |
| 450 | HPIBO15 | 209563 | Uni-ZAP XR | 460 | 1739 | 1 | 1739 | 128 | 128 | 1397 | 1 | 18 | 19 | 211 |
| | | Dec. 18, 1997 | | | | | | | | | | | | |
| 450 | HPIBO15 | 209563 | Uni-ZAP XR | 839 | 1739 | 1 | 1739 | 127 | 127 | 1776 | 1 | 18 | 19 | 173 |
| | | Dec. 18, 1997 | | | | | | | | | | | | |
| 451 | HPICB53 | PTA-846 | Uni-ZAP XR | 461 | 1139 | 1 | 1139 | 170 | 170 | 1398 | 1 | 23 | 24 | 51 |
| | | Oct. 13, 1999 | | | | | | | | | | | | |
| 451 | HPICB53 | PTA-846 | Uni-ZAP XR | 840 | 438 | 1 | 438 | 163 | 163 | 1777 | 1 | 23 | 24 | 51 |
| | | Oct. 13, 1999 | | | | | | | | | | | | |
| 452 | HPJBK12 | PTA-855 | Uni-ZAP XR | 462 | 2648 | 1 | 2648 | 126 | 126 | 1399 | 1 | 18 | 19 | 48 |
| | | Oct. 18, 1999 | | | | | | | | | | | | |
| 452 | HPJBK12 | PTA-855 | Uni-ZAP XR | 841 | 538 | 1 | 538 | 119 | 119 | 1778 | 1 | 18 | 19 | 48 |
| | | Oct. 18, 1999 | | | | | | | | | | | | |
| 452 | HPJBK12 | PTA-855 | Uni-ZAP XR | 842 | 1346 | 1 | 1346 | | 969 | 1779 | 1 | | | 10 |
| | | Oct. 18, 1999 | | | | | | | | | | | | |
| 452 | HPJBK12 | PTA-855 | Uni-ZAP XR | 843 | 912 | 1 | 912 | 509 | 509 | 1780 | 1 | | | 4 |
| | | Oct. 18, 1999 | | | | | | | | | | | | |
| 453 | HPJCL22 | PTA-2071 | Uni-ZAP XR | 463 | 3107 | 1 | 3107 | 86 | 86 | 1400 | 1 | 35 | 36 | 80 |
| | | Jun. 09, 2000 | | | | | | | | | | | | |
| 453 | HPJCL22 | PTA-2071 | Uni-ZAP XR | 844 | 995 | 58 | 995 | 136 | 136 | 1781 | 1 | 35 | 36 | 80 |
| | | Jun. 09, 2000 | | | | | | | | | | | | |
| 453 | HPJCL22 | PTA-2071 | Uni-ZAP XR | 845 | 751 | 183 | 751 | | 232 | 1782 | 1 | 1 | 2 | 145 |
| | | Jun. 09, 2000 | | | | | | | | | | | | |
| 454 | HPJCW04 | 209551 | Uni-ZAP XR | 464 | 1466 | 1 | 1466 | 44 | 44 | 1401 | 1 | 19 | 20 | 57 |
| | | Dec. 12, 1997 | | | | | | | | | | | | |
| 455 | HPJEX20 | PTA-872 | Uni-ZAP XR | 465 | 566 | 1 | 566 | 23 | 23 | 1402 | 1 | 26 | 27 | 174 |
| | | Oct. 26, 1999 | | | | | | | | | | | | |
| 455 | HPJEX20 | PTA-872 | Uni-ZAP XR | 846 | 1823 | 1 | 1823 | 31 | 31 | 1783 | 1 | 23 | 24 | 115 |
| | | Oct. 26, 1999 | | | | | | | | | | | | |
| 455 | HPJEX20 | PTA-872 | Uni-ZAP XR | 847 | 1964 | 1 | 1964 | 170 | 170 | 1784 | 1 | 23 | 24 | 174 |
| | | Oct. 26, 1999 | | | | | | | | | | | | |
| 455 | HPJEX20 | PTA-872 | Uni-ZAP XR | 848 | 769 | 1 | 769 | 84 | 84 | 1785 | 1 | 23 | 24 | 228 |
| | | Oct. 26, 1999 | | | | | | | | | | | | |
| 455 | HPJEX20 | PTA-872 | Uni-ZAP XR | 849 | 818 | 1 | 818 | | 565 | 1786 | 1 | 1 | 2 | 84 |
| | | Oct. 26, 1999 | | | | | | | | | | | | |
| 456 | HPMAI22 | 209683 | Uni-ZAP XR | 466 | 1274 | 334 | 1274 | 483 | 483 | 1403 | 1 | 16 | 17 | 59 |
| | | Mar. 20, 1998 | | | | | | | | | | | | |
| 457 | HPMFP40 | 209628 | Uni-ZAP XR | 467 | 1217 | 1 | 1217 | 37 | 37 | 1404 | 1 | 24 | 25 | 44 |
| | | Feb. 12, 1998 | | | | | | | | | | | | |
| 458 | HPMGJ45 | 203105 | Uni-ZAP XR | 468 | 1656 | 1 | 1656 | 119 | 119 | 1405 | 1 | 25 | 26 | 48 |
| | | Aug. 13, 1998 | | | | | | | | | | | | |
| 459 | HPQAC69 | 97979 | Lambda ZAP | 469 | 990 | 1 | 988 | 82 | 82 | 1406 | 1 | 19 | 20 | 37 |
| | | Mar. 27, 1997 | | | | | | | | | | | | |
| 460 | HPRBC80 | 209852 | Uni-ZAP XR | 470 | 2543 | 1245 | 2543 | 94 | 94 | 1407 | 1 | 30 | 31 | 387 |
| | | May 07, 1998 | | | | | | | | | | | | |
| 460 | HPRBC80 | 209852 | Uni-ZAP XR | 850 | 2052 | 275 | 2032 | 404 | 404 | 1787 | 1 | 26 | 27 | 69 |
| | | May 07, 1998 | | | | | | | | | | | | |
| 461 | HPRBF19 | 203517 | Uni-ZAP XR | 471 | 1461 | 1 | 1461 | 63 | 63 | 1408 | 1 | 31 | 32 | 190 |
| | | Dec. 10, 1998 | | | | | | | | | | | | |
| 462 | HPTTG19 | 209628 | Uni-ZAP XR | 472 | 559 | 1 | 559 | 215 | 215 | 1409 | 1 | 16 | 17 | 49 |
| | | Feb. 12, 1998 | | | | | | | | | | | | |
| 463 | HPTVX32 | 209628 | pBluescript | 473 | 803 | 215 | 803 | 318 | 318 | 1410 | 1 | 26 | 27 | 80 |
| | | Feb. 12, 1998 | | | | | | | | | | | | |
| 464 | HPVAB94 | 209244 | Uni-ZAP XR | 474 | 819 | 1 | 819 | 80 | 80 | 1411 | 1 | 25 | 26 | 44 |
| | | Sep. 12, 1997 | | | | | | | | | | | | |
| 465 | HPWAY46 | PTA-843 | Uni-ZAP XR | 475 | 1414 | 1 | 1414 | 468 | 468 | 1412 | 1 | 30 | 31 | 52 |
| | | Oct. 13, 1999 | | | | | | | | | | | | |
| 465 | HPWAY46 | PTA-843 | Uni-ZAP XR | 851 | 891 | 1 | 891 | 474 | 474 | 1788 | 1 | 30 | 31 | 52 |
| | | Oct. 13, 1999 | | | | | | | | | | | | |
| 465 | HPWAY46 | PTA-843 | Uni-ZAP XR | 852 | 501 | 120 | 501 | | 178 | 1789 | 1 | 1 | 2 | 86 |
| | | Oct. 13, 1999 | | | | | | | | | | | | |
| 466 | HPWDJ42 | 209852 | Uni-ZAP XR | 476 | 1340 | 1 | 1340 | 149 | 149 | 1413 | 1 | 18 | 19 | 54 |
| | | May 07, 1998 | | | | | | | | | | | | |
| 466 | HPWDJ42 | 209852 | Uni-ZAP XR | 853 | 1340 | 1 | 1340 | 149 | 149 | 1790 | 1 | 21 | 22 | 54 |
| | | May 07, 1998 | | | | | | | | | | | | |
| 466 | HPWDJ42 | 209852 | Uni-ZAP XR | 854 | 813 | 1 | 813 | 161 | 161 | 1791 | 1 | 18 | 19 | 47 |
| | | May 07, 1998 | | | | | | | | | | | | |
| 467 | HPZAB47 | 209511 | pBluescript | 477 | 1676 | 1 | 1676 | 34 | 34 | 1414 | 1 | 18 | 19 | 47 |
| | | Dec. 03, 1997 | | | | | | | | | | | | |
| 468 | HRAAB15 | 209651 | pCMVSport | 478 | 1747 | 1 | 1747 | 35 | 35 | 1415 | 1 | 14 | 15 | 159 |
| | | Mar. 04, 1998 | 3.0 | | | | | | | | | | | |
| 469 | HRABA80 | 209889 | pCMVSport | 479 | 1251 | 1 | 1251 | 144 | 144 | 1416 | 1 | 27 | 28 | 102 |
| | | May 22, 1998 | 3.0 | | | | | | | | | | | |
| 469 | HRABA80 | 209889 | pCMVSport | 855 | 1237 | 1 | 1237 | 130 | 130 | 1792 | 1 | 27 | 28 | 102 |
| | | May 22, 1998 | 3.0 | | | | | | | | | | | |
| 470 | HRACD15 | 209852 | pCMVSport | 480 | 1539 | 24 | 1539 | 252 | 252 | 1417 | 1 | 40 | 41 | 53 |
| | | May 07, 1998 | 3.0 | | | | | | | | | | | |
| 470 | HRACD15 | 209852 | pCMVSport | 856 | 1681 | 24 | 1453 | 252 | 252 | 1793 | 1 | 40 | 41 | 53 |
| | | May 07, 1998 | 3.0 | | | | | | | | | | | |
| 471 | HRACD80 | 209889 | pCMVSport | 481 | 1941 | 1 | 1941 | 196 | 196 | 1418 | 1 | 16 | 17 | 575 |
| | | May 22, 1998 | 3.0 | | | | | | | | | | | |
| 471 | HRACD80 | 209889 | pCMVSport | 857 | 1934 | 1 | 1934 | 191 | 191 | 1794 | 1 | 16 | 17 | 575 |
| | | May 22, 1998 | 3.0 | | | | | | | | | | | |
| 471 | HRACD80 | 209889 | pCMVSport | 858 | 1958 | 1 | 1958 | 191 | 191 | 1795 | 1 | 16 | 17 | 146 |
| | | May 22, 1998 | 3.0 | | | | | | | | | | | |
| 472 | HRDDV47 | 209628 | Uni-ZAP XR | 482 | 1510 | 1 | 1510 | 146 | 146 | 1419 | 1 | 30 | 31 | 276 |
| | | Feb. 12, 1998 | | | | | | | | | | | | |
| 473 | HRDFD27 | 209423 | Uni-ZAP XR | 483 | 805 | 1 | 805 | 82 | 82 | 1420 | 1 | 35 | 36 | 83 |
| | | Oct. 30, 1997 | | | | | | | | | | | | |
| 474 | HROAJ03 | 209423 | Uni-ZAP XR | 484 | 1182 | 1 | 1182 | 19 | 19 | 1421 | 1 | 20 | 21 | 192 |
| | | Oct. 30, 1997 | | | | | | | | | | | | |
| 475 | HRTAE58 | 209241 | pBluescript | 485 | 600 | 1 | 600 | 244 | 244 | 1422 | 1 | 18 | 19 | 58 |
| | | Sep. 12, 1997 | SK− | | | | | | | | | | | |
| 476 | HSATR82 | 209299 | Uni-ZAP XR | 486 | 777 | 1 | 777 | 74 | 74 | 1423 | 1 | 15 | 16 | 41 |
| | | Sep. 25, 1997 | | | | | | | | | | | | |
| 477 | HSAUK57 | 209148 | Uni-ZAP XR | 487 | 1037 | 1 | 1037 | 322 | 322 | 1424 | 1 | 26 | 27 | 83 |
| | | Jul. 17, 1997 | | | | | | | | | | | | |
| 477 | HSAUK57 | 209148 | Uni-ZAP XR | 859 | 1070 | 1 | 1070 | 327 | 327 | 1796 | 1 | 26 | 27 | 48 |
| | | Jul. 17, 1997 | | | | | | | | | | | | |
| 478 | HSAUL82 | 209148 | Uni-ZAP XR | 488 | 727 | 1 | 727 | 140 | 140 | 1425 | 1 | 25 | 26 | 49 |
| | | Jul. 17, 1997 | | | | | | | | | | | | |
| 479 | HSAVH65 | 209651 | Uni-ZAP XR | 489 | 600 | 1 | 600 | 104 | 104 | 1426 | 1 | 21 | 22 | 100 |
| | | Mar. 04, 1998 | | | | | | | | | | | | |
| 480 | HSAVK10 | 209368 | Uni-ZAP XR | 490 | 1242 | 1 | 1242 | 131 | 131 | 1427 | 1 | 32 | 33 | 40 |
| | | Oct. 16, 1997 | | | | | | | | | | | | |
| 481 | HSAWD74 | 209126 | Uni-ZAP XR | 491 | 970 | 106 | 970 | 142 | 142 | 1428 | 1 | 26 | 27 | 142 |
| | | Jun. 19, 1997 | | | | | | | | | | | | |
| 481 | HSAWD74 | 209126 | Uni-ZAP XR | 860 | 646 | 1 | 646 | 122 | 122 | 1797 | 1 | 29 | 30 | 45 |
| | | Jun. 19, 1997 | | | | | | | | | | | | |
| 482 | HSAWZ41 | 209463 | Uni-ZAP XR | 492 | 1388 | 1 | 1388 | 98 | 98 | 1429 | 1 | 24 | 25 | 57 |
| | | Nov. 14, 1997 | | | | | | | | | | | | |
| 483 | HSAXA83 | 209324 | Uni-ZAP XR | 493 | 649 | 1 | 649 | 92 | 92 | 1430 | 1 | 22 | 23 | 74 |
| | | Oct. 02, 1997 | | | | | | | | | | | | |
| 484 | HSAYB43 | 209568 | Uni-ZAP XR | 494 | 1699 | 37 | 1699 | 89 | 89 | 1431 | 1 | 14 | 15 | 45 |
| | | Jan. 06, 1998 | | | | | | | | | | | | |
| 485 | HSAYM40 | 209139 | Uni-ZAP XR | 495 | 433 | 1 | 433 | 190 | 190 | 1432 | 1 | 19 | 20 | 63 |
| | | Jul. 03, 1997 | | | | | | | | | | | | |
| 486 | HSDAJ46 | 209746 | Uni-ZAP XR | 496 | 1537 | 92 | 1537 | 299 | 299 | 1433 | 1 | 18 | 19 | 262 |
| | | Apr. 07, 1998 | | | | | | | | | | | | |
| 487 | HSDEK49 | 209603 | Uni-ZAP XR | 497 | 1782 | 1 | 1782 | 60 | 60 | 1434 | 1 | 19 | 20 | 399 |
| | | Jan. 29, 1998 | | | | | | | | | | | | |
| 487 | HSDEK49 | 209603 | Uni-ZAP XR | 861 | 1590 | 96 | 1590 | 126 | 126 | 1798 | 1 | 21 | 22 | 305 |
| | | Jan. 29, 1998 | | | | | | | | | | | | |
| 488 | HSDER95 | 209683 | Uni-ZAP XR | 498 | 574 | 1 | 574 | 72 | 72 | 1435 | 1 | 25 | 26 | 71 |
| | | Mar. 20, 1998 | | | | | | | | | | | | |
| 489 | HSDEZ20 | 209852 | Uni-ZAP XR | 499 | 795 | 1 | 795 | 58 | 58 | 1436 | 1 | 41 | 42 | 122 |
| | | May 07, 1998 | | | | | | | | | | | | |
| 489 | HSDEZ20 | 209852 | Uni-ZAP XR | 862 | 1540 | 1 | 1540 | 66 | 66 | 1799 | 1 | 41 | 42 | 97 |
| | | May 07, 1998 | | | | | | | | | | | | |
| 490 | HSDFW45 | 209551 | Uni-ZAP XR | 500 | 1742 | 1 | 1742 | 118 | 118 | 1437 | 1 | 19 | 20 | 70 |
| | | Dec. 12, 1997 | | | | | | | | | | | | |
| 491 | HSDJA15 | 203081 | Uni-ZAP XR | 501 | 1443 | 1 | 1443 | 247 | 247 | 1438 | 1 | 20 | 21 | 152 |
| | | Jul. 30, 1998 | | | | | | | | | | | | |
| 492 | HSDJJ82 | 209126 | Uni-ZAP XR | 502 | 462 | 1 | 462 | 79 | 79 | 1439 | 1 | 32 | 33 | 52 |
| | | Jun. 19, 1997 | | | | | | | | | | | | |
| 493 | HSDJL42 | PTA-884 | Uni-ZAP XR | 503 | 2541 | 1 | 2523 | 84 | 84 | 1440 | 1 | 33 | 34 | 217 |
| | | Oct. 28, 1999 | | | | | | | | | | | | |
| 493 | HSDJL42 | PTA-884 | Uni-ZAP XR | 863 | 2467 | 1 | 2467 | 27 | 27 | 1800 | 1 | 35 | 36 | 219 |
| | | Oct. 28, 1999 | | | | | | | | | | | | |
| 493 | HSDJL42 | PTA-884 | Uni-ZAP XR | 864 | 2541 | 1 | 2523 | 78 | 78 | 1801 | 1 | 35 | 36 | 219 |
| | | Oct. 28, 1999 | | | | | | | | | | | | |
| 494 | HSDJM31 | 209148 | Uni-ZAP XR | 504 | 561 | 1 | 561 | 351 | 351 | 1441 | 1 | 25 | 26 | 40 |
| | | Jul. 17, 1997 | | | | | | | | | | | | |
| 495 | HSDSB09 | 209145 | pBluescript | 505 | 809 | 1 | 809 | 16 | 16 | 1442 | 1 | 17 | 18 | 135 |
| | | Jul. 17, 1997 | | | | | | | | | | | | |
| 495 | HSDSB09 | 209145 | pBluescript | 865 | 819 | 1 | 819 | 22 | 22 | 1802 | 1 | 17 | 18 | 121 |
| | | Jul. 17, 1997 | | | | | | | | | | | | |
| 496 | HSDSE75 | 209324 | pBluescript | 506 | 1151 | 1 | 1151 | 160 | 160 | 1443 | 1 | 18 | 19 | 181 |
| | | Oct. 02, 1997 | | | | | | | | | | | | |
| 497 | HSDZR57 | 209641 | pBluescript | 507 | 308 | 1 | 308 | 27 | 27 | 1444 | 1 | 27 | 28 | 61 |
| | | Feb. 25, 1998 | | | | | | | | | | | | |
| 498 | HSHAX21 | 209853 | Uni-ZAP XR | 508 | 1986 | 1 | 1986 | 177 | 177 | 1445 | 1 | 13 | 14 | 72 |
| | | May 07, 1998 | | | | | | | | | | | | |
| 499 | HSIAS17 | 209226 | Uni-ZAP XR | 509 | 1781 | 1 | 1781 | 431 | 431 | 1446 | 1 | 22 | 23 | 257 |
| | | Aug. 28, 1997 | | | | | | | | | | | | |
| 499 | HSIAS17 | 209226 | Uni-ZAP XR | 866 | 1448 | 1 | 1224 | 108 | 108 | 1803 | 1 | 23 | 24 | 218 |
| | | Aug. 28, 1997 | | | | | | | | | | | | |
| 500 | HSICV24 | 209580 | Uni-ZAP XR | 510 | 1410 | 1 | 1410 | 117 | 117 | 1447 | 1 | 16 | 17 | 256 |
| | | Jan. 14, 1998 | | | | | | | | | | | | |
| 500 | HSICV24 | 209580 | Uni-ZAP XR | 867 | 1450 | 1 | 1450 | 150 | 150 | 1804 | 1 | 15 | 16 | 58 |
| | | Jan. 14, 1998 | | | | | | | | | | | | |
| 501 | HSIDJ81 | 209551 | Uni-ZAP XR | 511 | 1303 | 1 | 1303 | 8 | 8 | 1448 | 1 | 22 | 23 | 58 |
| | | Dec. 12, 1997 | | | | | | | | | | | | |
| 502 | HSIDX71 | PTA-843 | Uni-ZAP XR | 512 | 2118 | 1 | 2118 | 200 | 200 | 1449 | 1 | 41 | 42 | 59 |
| | | Oct. 13, 1999 | | | | | | | | | | | | |
| 502 | HSIDX71 | PTA-843 | Uni-ZAP XR | 868 | 1868 | 1 | 1868 | 200 | 200 | 1805 | 1 | 41 | 42 | 59 |
| | | Oct. 13, 1999 | | | | | | | | | | | | |
| 503 | HSJBQ79 | 97924 | Uni-ZAP XR | 513 | 587 | 1 | 587 | 41 | 41 | 1450 | 1 | 23 | 24 | 182 |
| | | Mar. 07, 1997 | | | | | | | | | | | | |
| 503 | HSJBQ79 | 97924 | Uni-ZAP XR | 869 | 1507 | 164 | 608 | 57 | 57 | 1806 | 1 | 19 | 20 | 327 |
| | | Mar. 07, 1997 | | | | | | | | | | | | |
| 503 | HSJBQ79 | 97924 | Uni-ZAP XR | 870 | 586 | 4 | 586 | 35 | 35 | 1807 | 1 | 23 | 24 | 184 |
| | | Mar. 07, 1997 | | | | | | | | | | | | |
| 504 | HSKCP69 | 209009 | Uni-ZAP XR | 514 | 1251 | 219 | 1120 | 49 | 49 | 1451 | 1 | 27 | 28 | 286 |
| | | Apr. 28, 1997 | | | | | | | | | | | | |
| 504 | HSKCP69 | 209009 | Uni-ZAP XR | 871 | 1250 | 223 | 1250 | 393 | 393 | 1808 | 1 | 31 | 32 | 171 |
| | | Apr. 28, 1997 | | | | | | | | | | | | |
| 505 | HSKDA27 | PTA-322 | Uni-ZAP XR | 515 | 4412 | 1 | 4412 | 786 | 786 | 1452 | 1 | 24 | 25 | 950 |
| | | Jul. 09, 1999 | | | | | | | | | | | | |
| 505 | HSKDA27 | PTA-322 | Uni-ZAP XR | 872 | 1792 | 134 | 1792 | 127 | 127 | 1809 | 1 | 21 | 22 | 509 |
| | | Jul. 09, 1999 | | | | | | | | | | | | |
| 505 | HSKDA27 | PTA-322 | Uni-ZAP XR | 873 | 1673 | 1 | 1673 | 12 | 12 | 1810 | 1 | 21 | 22 | 554 |
| | | Jul. 09, 1999 | | | | | | | | | | | | |
| 506 | HSKHZ81 | 209346 | pBluescript | 516 | 969 | 1 | 969 | 64 | 64 | 1453 | 1 | 27 | 28 | 247 |
| | | Oct. 09, 1997 | | | | | | | | | | | | |
| 506 | HSKHZ81 | 209346 | pBluescript | 874 | 988 | 1 | 967 | 57 | 57 | 1811 | 1 | 27 | 28 | 247 |
| | | Oct. 09, 1997 | | | | | | | | | | | | |
| 507 | HSKNB56 | 209346 | pBluescript | 517 | 1334 | 449 | 1334 | 484 | 484 | 1454 | 1 | 25 | 26 | 85 |
| | | Oct. 09, 1997 | | | | | | | | | | | | |
| 508 | HSLCQ82 | 209551 | Uni-ZAP XR | 518 | 1476 | 1 | 1476 | 226 | 226 | 1455 | 1 | 28 | 29 | 84 |
| | | Dec. 12, 1997 | | | | | | | | | | | | |
| 508 | HSLCQ82 | 209551 | Uni-ZAP XR | 875 | 1501 | 1 | 1501 | 233 | 233 | 1812 | 1 | 22 | 23 | 57 |
| | | Dec. 12, 1997 | | | | | | | | | | | | |
| 509 | HSLJG37 | PTA-855 | Uni-ZAP XR | 519 | 2126 | 1 | 2126 | 114 | 114 | 1456 | 1 | 16 | 17 | 42 |
| | | Oct. 18, 1999 | | | | | | | | | | | | |
| 509 | HSLJG37 | PTA-855 | Uni-ZAP XR | 876 | 1083 | 1 | 1083 | 206 | 206 | 1813 | 1 | 16 | 17 | 42 |
| | | Oct. 18, 1999 | | | | | | | | | | | | |
| 509 | HSLJG37 | PTA-855 | Uni-ZAP XR | 877 | 1904 | 1 | 1904 | | 1331 | 1814 | 1 | | | 6 |
| | | Oct. 18, 1999 | | | | | | | | | | | | |
| 510 | HSODE04 | PTA-855 | Uni-ZAP XR | 520 | 1370 | 1 | 1370 | 202 | 202 | 1457 | 1 | 20 | 21 | 41 |
| | | Oct. 18, 1999 | | | | | | | | | | | | |
| 510 | HSODE04 | PTA-855 | Uni-ZAP XR | 878 | 1937 | 1 | 1937 | 300 | 300 | 1815 | 1 | 20 | 21 | 41 |
| | | Oct. 18, 1999 | | | | | | | | | | | | |
| 511 | HSPBF70 | 203105 | pSport1 | 521 | 1397 | 288 | 1397 | 429 | 429 | 1458 | 1 | 19 | 20 | 97 |
| | | Aug. 13, 1998 | | | | | | | | | | | | |
| 512 | HSQEO84 | 97974 | Uni-ZAP XR | 522 | 931 | 1 | 931 | 87 | 87 | 1459 | 1 | 20 | 21 | 218 |
| | | Apr. 04, 1997 | | | | | | | | | | | | |
| | | 209080 | | | | | | | | | | | | |
| | | May 29, 1997 | | | | | | | | | | | | |
| 512 | HSQEO84 | 97974 | Uni-ZAP XR | 879 | 971 | 13 | 971 | 91 | 91 | 1816 | 1 | 19 | 20 | 218 |
| | | Apr. 04, 1997 | | | | | | | | | | | | |
| | | 209080 | | | | | | | | | | | | |
| | | May 29, 1997 | | | | | | | | | | | | |
| 512 | HSQEO84 | 97974 | Uni-ZAP XR | 880 | 968 | 8 | 968 | 86 | 86 | 1817 | 1 | 20 | 21 | 56 |
| | | Apr. 04, 1997 | | | | | | | | | | | | |
| | | 209080 | | | | | | | | | | | | |
| | | May 29, 1997 | | | | | | | | | | | | |
| 513 | HSSAJ29 | 209626 | Uni-ZAP XR | 523 | 1044 | 1 | 1044 | 103 | 103 | 1460 | 1 | 25 | 26 | 47 |
| | | Feb. 12, 1998 | | | | | | | | | | | | |
| 514 | HSSDX51 | 209683 | Uni-ZAP XR | 524 | 1143 | 1 | 1143 | 133 | 133 | 1461 | 1 | 20 | 21 | 50 |
| | | Mar. 20, 1998 | | | | | | | | | | | | |
| 515 | HSSFT08 | 209551 | Uni-ZAP XR | 525 | 791 | 1 | 791 | 125 | 125 | 1462 | 1 | 34 | 35 | 58 |
| | | Dec. 12, 1997 | | | | | | | | | | | | |
| 516 | HSSGD52 | PTA-1543 | Uni-ZAP XR | 526 | 2425 | 1 | 2425 | 344 | 344 | 1463 | 1 | 32 | 33 | 606 |
| | | Mar. 21, 2000 | | | | | | | | | | | | |
| 516 | HSSGD52 | PTA-1543 | Uni-ZAP XR | 881 | 2460 | 105 | 2460 | 338 | 338 | 1818 | 1 | 27 | 28 | 606 |
| | | Mar. 21, 2000 | | | | | | | | | | | | |
| 517 | HSSGG82 | 209580 | Uni-ZAP XR | 527 | 1543 | 186 | 1543 | 203 | 203 | 1464 | 1 | 17 | 18 | 62 |
| | | Jan. 14, 1998 | | | | | | | | | | | | |
| 518 | HSSJC35 | 209853 | Uni-ZAP XR | 528 | 1174 | 1 | 1174 | 62 | 62 | 1465 | 1 | 28 | 29 | 295 |
| | | May 07, 1998 | | | | | | | | | | | | |
| 518 | HSSJC35 | 209853 | Uni-ZAP XR | 882 | 1163 | 1 | 1163 | 55 | 55 | 1819 | 1 | 30 | 31 | 295 |
| | | May 07, 1998 | | | | | | | | | | | | |
| 518 | HSSJC35 | 209853 | Uni-ZAP XR | 883 | 1183 | 1 | 1183 | 66 | 66 | 1820 | 1 | 30 | 31 | 37 |
| | | May 07, 1998 | | | | | | | | | | | | |
| 519 | HSTBJ86 | 203027 | Uni-ZAP XR | 529 | 1766 | 1 | 1766 | 120 | 120 | 1466 | 1 | 24 | 25 | 83 |
| | | Jun. 26, 1998 | | | | | | | | | | | | |
| 520 | HSUBW09 | 209007 | Uni-ZAP XR | 530 | 1021 | 1 | 1021 | 153 | 153 | 1467 | 1 | 31 | 32 | 56 |
| | | Apr. 28, 1997 | | | | | | | | | | | | |
| | | 209083 | | | | | | | | | | | | |
| | | May 29, 1997 | | | | | | | | | | | | |
| 521 | HSVAM10 | 209244 | Uni-ZAP XR | 531 | 433 | 1 | 433 | 46 | 46 | 1468 | 1 | 27 | 28 | 51 |
| | | Sep. 12, 1997 | | | | | | | | | | | | |
| 522 | HSVAT68 | 209641 | Uni-ZAP XR | 532 | 1155 | 1 | 1155 | 63 | 63 | 1469 | 1 | 25 | 26 | 88 |
| | | Feb. 25, 1998 | | | | | | | | | | | | |
| 523 | HSVBU91 | 209603 | Uni-ZAP XR | 533 | 727 | 1 | 727 | 256 | 256 | 1470 | 1 | 18 | 19 | 90 |
| | | Jan. 29, 1998 | | | | | | | | | | | | |
| 524 | HSXCG83 | 203570 | Uni-ZAP XR | 534 | 2112 | 233 | 1573 | 101 | 101 | 1471 | 1 | 45 | 46 | 267 |
| | | Jan. 11, 1999 | | | | | | | | | | | | |
| 524 | HSXCG83 | 203570 | Uni-ZAP XR | 884 | 1938 | 58 | 1399 | 211 | 211 | 1821 | 1 | 22 | 23 | 172 |
| | | Jan. 11, 1999 | | | | | | | | | | | | |
| 525 | HSXEQ06 | PTA-847 | Uni-ZAP XR | 535 | 1598 | 1 | 1598 | 123 | 123 | 1472 | 1 | 24 | 25 | 60 |
| | | Oct. 13, 1999 | | | | | | | | | | | | |
| 525 | HSXEQ06 | PTA-847 | Uni-ZAP XR | 885 | 768 | 21 | 768 | 136 | 136 | 1822 | 1 | 24 | 25 | 60 |
| | | Oct. 13, 1999 | | | | | | | | | | | | |
| 525 | HSXEQ06 | PTA-847 | Uni-ZAP XR | 886 | 1392 | 1 | 1392 | | 1271 | 1823 | 1 | 9 | 10 | 17 |
| | | Oct. 13, 1999 | | | | | | | | | | | | |
| 526 | HSXGI47 | PTA-499 | Uni-ZAP XR | 536 | 1256 | 1 | 1256 | 87 | 87 | 1473 | 1 | 21 | 22 | 57 |
| | | Aug. 11, 1999 | | | | | | | | | | | | |
| 527 | HSYAV50 | PTA-1544 | pCMVSport | 537 | 2801 | 1 | 2801 | 155 | 155 | 1474 | 1 | 23 | 24 | 672 |
| | | Mar. 21, 2000 | 3.0 | | | | | | | | | | | |
| 528 | HSYAV66 | 209746 | pCMVSport | 538 | 1407 | 1 | 1407 | 186 | 186 | 1475 | 1 | 28 | 29 | 69 |
| | | Apr. 07, 1998 | 3.0 | | | | | | | | | | | |
| 529 | HSYAZ50 | PTA-849 | pCMVSport | 539 | 1097 | 1 | 1097 | 131 | 131 | 1476 | 1 | 18 | 19 | 56 |
| | | Oct. 13, 1999 | 3.0 | | | | | | | | | | | |
| 529 | HSYAZ50 | PTA-849 | pCMVSport | 887 | 768 | 226 | 768 | 345 | 345 | 1824 | 1 | 18 | 19 | 56 |
| | | Oct. 13, 1999 | 3.0 | | | | | | | | | | | |
| 529 | HSYAZ50 | PTA-849 | pCMVSport | 888 | 2087 | 770 | 875 | | 723 | 1825 | 1 | 1 | 2 | 106 |
| | | Oct. 13, 1999 | 3.0 | | | | | | | | | | | |
| 529 | HSYAZ50 | PTA-849 | pCMVSport | 889 | 2096 | 1767 | 2050 | | 2 | 1826 | 1 | 1 | 2 | 279 |
| | | Oct. 13, 1999 | 3.0 | | | | | | | | | | | |
| 530 | HSYAZ63 | PTA-163 | pCMVSport | 540 | 3466 | 1655 | 3347 | 448 | 448 | 1477 | 1 | 30 | 31 | 434 |
| | | Jun. 01, 1999 | 3.0 | | | | | | | | | | | |
| 530 | HSYAZ63 | PTA-163 | pCMVSport | 890 | 1707 | 1 | 1707 | 215 | 215 | 1827 | 1 | 21 | 22 | 40 |
| | | Jun. 01, 1999 | 3.0 | | | | | | | | | | | |
| 531 | HSYBG37 | 209463 | pCMVSport | 541 | 1238 | 1 | 1238 | 47 | 47 | 1478 | 1 | 24 | 25 | 305 |
| | | Nov. 14, 1997 | 3.0 | | | | | | | | | | | |
| 531 | HSYBG37 | 209463 | pCMVSport | 891 | 1239 | 1 | 1239 | 48 | 48 | 1828 | 1 | 24 | 25 | 305 |
| | | Nov. 14, 1997 | 3.0 | | | | | | | | | | | |
| 532 | HSZAF47 | 209124 | Uni-ZAP XR | 542 | 1304 | 1 | 1304 | 106 | 106 | 1479 | 1 | 16 | 17 | 289 |
| | | Jun. 19, 1997 | | | | | | | | | | | | |
| 532 | HSZAF47 | 209124 | Uni-ZAP XR | 892 | 1333 | 2 | 1333 | 107 | 107 | 1829 | 1 | 18 | 19 | 127 |
| | | Jun. 19, 1997 | | | | | | | | | | | | |
| 533 | HT3SF53 | PTA-499 | Uni-ZAP XR | 543 | 1926 | 1 | 1926 | 184 | 184 | 1480 | 1 | 27 | 28 | 68 |
| | | Aug. 11, 1999 | | | | | | | | | | | | |
| 534 | HT5GJ57 | 209889 | Uni-ZAP XR | 544 | 1773 | 1 | 1773 | 105 | 105 | 1481 | 1 | 25 | 26 | 243 |
| | | May 22, 1998 | | | | | | | | | | | | |
| 534 | HT5GJ57 | 209889 | Uni-ZAP XR | 893 | 1797 | 92 | 1797 | 122 | 122 | 1830 | 1 | 25 | 26 | 190 |
| | | May 22, 1998 | | | | | | | | | | | | |
| 535 | HTADW91 | PTA-1543 | Uni-ZAP XR | 545 | 1481 | 54 | 1481 | 59 | 59 | 1482 | 1 | 32 | 33 | 364 |
| | | Mar 21, 2000 | | | | | | | | | | | | |
| 536 | HTADX17 | 209124 | Uni-ZAP XR | 546 | 1147 | 0 | 1148 | 92 | 92 | 1483 | 1 | 23 | 24 | 142 |
| | | Jun. 19, 1997 | | | | | | | | | | | | |
| 536 | HTADX17 | 209124 | Uni-ZAP XR | 894 | 1140 | 22 | 1140 | 84 | 84 | 1831 | 1 | 19 | 20 | 142 |
| | | Jun. 19, 1997 | | | | | | | | | | | | |
| 537 | HTAEE28 | PTA-843 | Uni-ZAP XR | 547 | 1341 | 1 | 1341 | 319 | 319 | 1484 | 1 | 33 | 34 | 282 |
| | | Oct. 13, 1999 | | | | | | | | | | | | |
| 537 | HTAEE28 | PTA-843 | Uni-ZAP XR | 895 | 738 | 159 | 738 | 372 | 372 | 1832 | 1 | 33 | 34 | 122 |
| | | Oct. 13, 1999 | | | | | | | | | | | | |
| 537 | HTAEE28 | PTA-843 | Uni-ZAP XR | 896 | 935 | 1 | 807 | | 124 | 1833 | 1 | 1 | 2 | 216 |
| | | Oct. 13, 1999 | | | | | | | | | | | | |
| 538 | HTDAF28 | 97974 | pSport1 | 548 | 912 | 1 | 912 | 38 | 38 | 1485 | 1 | 22 | 23 | 87 |
| | | Apr. 04, 1997 | | | | | | | | | | | | |
| | | 209080 | | | | | | | | | | | | |
| | | May 29, 1997 | | | | | | | | | | | | |
| 539 | HTEAF65 | PTA-322 | Uni-ZAP XR | 549 | 563 | 1 | 563 | 135 | 135 | 1486 | 1 | 19 | 20 | 75 |
| | | Jul. 09, 1999 | | | | | | | | | | | | |
| 540 | HTEBI28 | 209177 | Uni-ZAP XR | 550 | 413 | 1 | 413 | 43 | 43 | 1487 | 1 | 20 | 21 | 67 |
| | | Jul. 24, 1997 | | | | | | | | | | | | |
| 541 | HTEDF80 | 209511 | Uni-ZAP XR | 551 | 1306 | 1 | 1306 | 696 | 696 | 1488 | 1 | 21 | 22 | 126 |
| | | Dec. 03, 1997 | | | | | | | | | | | | |
| 542 | HTEDY42 | 209241 | Uni-ZAP XR | 552 | 754 | 1 | 754 | 19 | 19 | 1489 | 1 | 23 | 24 | 233 |
| | | Sep. 12, 1997 | | | | | | | | | | | | |
| 542 | HTEDY42 | 209241 | Uni-ZAP XR | 897 | 810 | 1 | 810 | 19 | 19 | 1834 | 1 | 23 | 24 | 77 |
| | | Sep. 12, 1997 | | | | | | | | | | | | |
| 543 | HTEFU65 | 209324 | Uni-ZAP XR | 553 | 1028 | 1 | 1028 | 231 | 231 | 1490 | 1 | 24 | 25 | 46 |
| | | Oct. 02, 1997 | | | | | | | | | | | | |
| 544 | HTEGA76 | 97958 | Uni-ZAP XR | 554 | 450 | 1 | 450 | 90 | 90 | 1491 | 1 | 43 | 44 | 65 |
| | | Mar. 13, 1997 | | | | | | | | | | | | |
| | | 209072 | | | | | | | | | | | | |
| | | May 22, 1997 | | | | | | | | | | | | |
| 545 | HTEGI42 | PTA-842 | Uni-ZAP XR | 555 | 978 | 1 | 978 | 26 | 26 | 1492 | 1 | 19 | 20 | 257 |
| | | Oct. 13, 1999 | | | | | | | | | | | | |
| 545 | HTEGI42 | PTA-842 | Uni-ZAP XR | 898 | 1092 | 1 | 1092 | 145 | 145 | 1835 | 1 | 19 | 20 | 257 |
| | | Oct. 13, 1999 | | | | | | | | | | | | |
| 545 | HTEGI42 | PTA-842 | Uni-ZAP XR | 899 | 284 | 1 | 133 | | 1 | 1836 | 1 | 1 | 2 | 94 |
| | | Oct. 13, 1999 | | | | | | | | | | | | |
| 545 | HTEGI42 | PTA-842 | Uni-ZAP XR | 900 | 1494 | 754 | 937 | | 1081 | 1837 | 1 | 1 | 2 | 82 |
| | | Oct. 13, 1999 | | | | | | | | | | | | |
| 545 | HTEGI42 | PTA-842 | Uni-ZAP XR | 901 | 1014 | 1 | 806 | | 670 | 1838 | 1 | 1 | 2 | 60 |
| | | Oct. 13, 1999 | | | | | | | | | | | | |
| 546 | HTEHR24 | 209224 | Uni-ZAP XR | 556 | 1075 | 50 | 1075 | 84 | 84 | 1493 | 1 | 29 | 30 | 163 |
| | | Aug. 28, 1997 | | | | | | | | | | | | |
| 546 | HTEHR24 | 209224 | Uni-ZAP XR | 902 | 1038 | 1 | 1038 | 41 | 41 | 1839 | 1 | 28 | 29 | 124 |
| | | Aug. 28, 1997 | | | | | | | | | | | | |
| 547 | HTEHU93 | 209090 | Uni-ZAP XR | 557 | 738 | 1 | 738 | 188 | 188 | 1494 | 1 | 24 | 25 | 142 |
| | | Jun. 05, 1997 | | | | | | | | | | | | |
| 547 | HTEHU93 | 209090 | Uni-ZAP XR | 903 | 745 | 1 | 745 | 187 | 187 | 1840 | 1 | 24 | 25 | 113 |
| | | Jun. 05, 1997 | | | | | | | | | | | | |
| 548 | HTEIP36 | 209244 | Uni-ZAP XR | 558 | 752 | 1 | 752 | 22 | 22 | 1495 | 1 | 19 | 20 | 58 |
| | | Sep. 12, 1997 | | | | | | | | | | | | |
| 549 | HTEIV80 | 209511 | Uni-ZAP XR | 559 | 1748 | 1 | 1748 | 203 | 203 | 1496 | 1 | 14 | 15 | 47 |
| | | Dec. 03, 1997 | | | | | | | | | | | | |
| 550 | HTEJN13 | 97958 | Uni-ZAP XR | 560 | 1094 | 1 | 1094 | 156 | 156 | 1497 | 1 | 15 | 16 | 208 |
| | | Mar. 13, 1997 | | | | | | | | | | | | |
| | | 209072 | | | | | | | | | | | | |
| | | May 22, 1997 | | | | | | | | | | | | |
| 550 | HTEJN13 | 97958 | Uni-ZAP XR | 904 | 1147 | 1 | 1147 | 163 | 163 | 1841 | 1 | 15 | 16 | 159 |
| | | Mar. 13, 1997 | | | | | | | | | | | | |
| | | 209072 | | | | | | | | | | | | |
| | | May 22, 1997 | | | | | | | | | | | | |
| 550 | HTEJN13 | 97958 | Uni-ZAP XR | 905 | 1134 | 1 | 1134 | 155 | 155 | 1842 | 1 | 19 | 20 | 71 |
| | | Mar. 13, 1997 | | | | | | | | | | | | |
| | | 209072 | | | | | | | | | | | | |
| | | May 22, 1997 | | | | | | | | | | | | |
| 551 | HTELM16 | 203648 | Uni-ZAP XR | 561 | 531 | 1 | 531 | 121 | 121 | 1498 | 1 | 21 | 22 | 84 |
| | | Feb. 09, 1999 | | | | | | | | | | | | |
| 552 | HTEPG70 | 203570 | Uni-ZAP XR | 562 | 813 | 1 | 813 | 365 | 365 | 1499 | 1 | 27 | 28 | 89 |
| | | Jan. 11, 1999 | | | | | | | | | | | | |
| 553 | HTGAU75 | 209563 | Uni-ZAP XR | 563 | 1713 | 1 | 1713 | 149 | 149 | 1500 | 1 | 33 | 34 | 142 |
| | | Dec. 18, 1997 | | | | | | | | | | | | |
| 554 | HTGEP89 | 97977 | Uni-ZAP XR | 564 | 703 | 1 | 703 | 285 | 285 | 1501 | 1 | 29 | 30 | 94 |
| | | Apr. 04, 1997 | | | | | | | | | | | | |
| | | 209082 | | | | | | | | | | | | |
| | | May 29, 1997 | | | | | | | | | | | | |
| 555 | HTHBG43 | PTA-843 | Uni-ZAP XR | 565 | 848 | 1 | 848 | 47 | 47 | 1502 | 1 | | | 39 |
| | | Oct. 13, 1999 | | | | | | | | | | | | |
| 555 | HTHBG43 | PTA-843 | Uni-ZAP XR | 906 | 632 | 103 | 632 | 149 | 149 | 1843 | 1 | | | 39 |
| | | Oct. 13, 1999 | | | | | | | | | | | | |
| 556 | HTHCA18 | PTA-844 | Uni-ZAP XR | 566 | 1818 | 1 | 1818 | 231 | 231 | 1503 | 1 | 15 | 16 | 38 |
| | | Oct. 13, 1999 | | | | | | | | | | | | |
| 556 | HTHCA18 | PTA-844 | Uni-ZAP XR | 907 | 2036 | 1 | 2036 | 224 | 224 | 1844 | 1 | 15 | 16 | 38 |
| | | Oct. 13, 1999 | | | | | | | | | | | | |
| 557 | HTHDJ94 | 209746 | Uni-ZAP XR | 567 | 1632 | 20 | 1632 | 66 | 66 | 1504 | 1 | 26 | 27 | 292 |
| | | Apr. 07, 1998 | | | | | | | | | | | | |
| 558 | HTHDS25 | 203071 | Uni-ZAP XR | 568 | 1061 | 1 | 1061 | 70 | 70 | 1505 | 1 | 15 | 16 | 90 |
| | | Jul. 27, 1998 | | | | | | | | | | | | |
| 559 | HTJMA95 | 209853 | pCMVSport | 569 | 1650 | 198 | 1569 | 527 | 527 | 1506 | 1 | 22 | 23 | 181 |
| | | May 07, 1998 | 2.0 | | | | | | | | | | | |
| 560 | HTJML75 | PTA-868 | pCMVSport | 570 | 2762 | 1 | 2762 | 30 | 30 | 1507 | 1 | 1 | 2 | 822 |
| | | Oct. 26, 1999 | 2.0 | | | | | | | | | | | |
| 560 | HTJML75 | PTA-868 | pCMVSport | 908 | 2694 | 21 | 2694 | | 335 | 1845 | 1 | 20 | 21 | 64 |
| | | Oct. 26, 1999 | 2.0 | | | | | | | | | | | |
| 561 | HTLAA40 | 209241 | Uni-ZAP XR | 571 | 956 | 1 | 956 | 33 | 33 | 1508 | 1 | 28 | 29 | 71 |
| | | Sep. 12, 1997 | | | | | | | | | | | | |
| 562 | HTLBE23 | PTA-842 | Uni-ZAP XR | 572 | 1216 | 1 | 1216 | 129 | 129 | 1509 | 1 | 17 | 18 | 45 |
| | | Oct. 13, 1999 | | | | | | | | | | | | |
| 562 | HTLBE23 | PTA-842 | Uni-ZAP XR | 909 | 810 | 286 | 810 | | 205 | 1846 | 1 | | | 5 |
| | | Oct. 13, 1999 | | | | | | | | | | | | |
| 563 | HTLEP53 | 209641 | Uni-ZAP XR | 573 | 818 | 1 | 818 | 73 | 73 | 1510 | 1 | 43 | 44 | 101 |
| | | Feb. 25, 1998 | | | | | | | | | | | | |
| 564 | HTLFE42 | 209138 | Uni-ZAP XR | 574 | 712 | 1 | 712 | 116 | 116 | 1511 | 1 | 22 | 23 | 77 |
| | | Jul. 03, 1997 | | | | | | | | | | | | |
| 565 | HTLFE57 | PTA-1543 | Uni-ZAP XR | 575 | 2248 | 1 | 2248 | 124 | 124 | 1512 | 1 | 17 | 18 | 188 |
| | | Mar. 21, 2000 | | | | | | | | | | | | |
| 565 | HTLFE57 | PTA-1543 | Uni-ZAP XR | 910 | 2298 | 1157 | 2214 | 189 | 189 | 1847 | 1 | 18 | 19 | 170 |
| | | Mar. 21, 2000 | | | | | | | | | | | | |
| 565 | HTLFE57 | PTA-1543 | Uni-ZAP XR | 911 | 928 | 1 | 928 | 110 | 110 | 1848 | 1 | 18 | 19 | 170 |
| | | Mar. 21, 2000 | | | | | | | | | | | | |
| 566 | HTLGE31 | PTA-2081 | Uni-ZAP XR | 576 | 534 | 1 | 534 | 51 | 51 | 1513 | 1 | 17 | 18 | 86 |
| | | Jun. 09, 2000 | | | | | | | | | | | | |
| 567 | HTLHY14 | 203648 | Uni-ZAP XR | 577 | 1032 | 1 | 1032 | 36 | 36 | 1514 | 1 | 17 | 18 | 246 |
| | | Feb. 09, 1999 | | | | | | | | | | | | |
| 568 | HTLIT32 | 203570 | Uni-ZAP XR | 578 | 1074 | 164 | 897 | 288 | 288 | 1515 | 1 | 26 | 27 | 246 |
| | | Jan. 11, 1999 | | | | | | | | | | | | |
| 569 | HTLIV19 | PTA-2081 | Uni-ZAP XR | 579 | 978 | 1 | 978 | 110 | 110 | 1516 | 1 | 33 | 34 | 84 |
| | | Jun. 09, 2000 | | | | | | | | | | | | |
| 570 | HTNBO91 | 209241 | pBluescript | 580 | 300 | 1 | 300 | 7 | 7 | 1517 | 1 | 26 | 27 | 40 |
| | | Sep. 12, 1997 | SK | | | | | | | | | | | |
| 571 | HTOAK16 | 209368 | Uni-ZAP XR | 581 | 1466 | 1 | 1466 | 87 | 87 | 1518 | 1 | 18 | 19 | 110 |
| | | Oct. 16, 1997 | | | | | | | | | | | | |
| 572 | HTODK73 | 209244 | Uni-ZAP XR | 582 | 1019 | 4 | 1019 | 43 | 43 | 1519 | 1 | 23 | 24 | 59 |
| | | Sep. 12, 1997 | | | | | | | | | | | | |
| 573 | HTODO72 | 209299 | Uni-ZAP XR | 583 | 973 | 1 | 973 | 183 | 183 | 1520 | 1 | 16 | 17 | 24 |
| | | Sep. 25, 1997 | | | | | | | | | | | | |
| 574 | HTOGR42 | 209603 | Uni-ZAP XR | 584 | 1430 | 1 | 1430 | 14 | 14 | 1521 | 1 | 18 | 19 | 56 |
| | | Jan. 29, 1998 | | | | | | | | | | | | |
| 574 | HTOGR42 | 209603 | Uni-ZAP XR | 912 | 1433 | 1 | 1433 | 13 | 13 | 1849 | 1 | 18 | 19 | 60 |
| | | Jan. 29, 1998 | | | | | | | | | | | | |
| 575 | HTOHM15 | PTA-843 | Uni-ZAP XR | 585 | 1949 | 1 | 1949 | 30 | 30 | 1522 | 1 | 20 | 21 | 61 |
| | | Oct. 13, 1999 | | | | | | | | | | | | |
| 575 | HTOHM15 | PTA-843 | Uni-ZAP XR | 913 | 408 | 1 | 408 | 23 | 23 | 1850 | 1 | 20 | 21 | 61 |
| | | Oct. 13, 1999 | | | | | | | | | | | | |
| 575 | HTOHM15 | PTA-843 | Uni-ZAP XR | 914 | 1299 | 982 | 1274 | | 71 | 1851 | 1 | 1 | 2 | 322 |
| | | Oct. 13, 1999 | | | | | | | | | | | | |
| 575 | HTOHM15 | PTA-843 | Uni-ZAP XR | 915 | 1669 | 1 | 1622 | | 1555 | 1852 | 1 | 9 | 10 | 13 |
| | | Oct. 13, 1999 | | | | | | | | | | | | |
| 576 | HTOHT18 | 209745 | Uni-ZAP XR | 586 | 1499 | 267 | 1499 | 433 | 433 | 1523 | 1 | 24 | 25 | 53 |
| | | Apr. 07, 1998 | | | | | | | | | | | | |
| 577 | HTOIY21 | 209852 | Uni-ZAP XR | 587 | 1558 | 1 | 1558 | 91 | 91 | 1524 | 1 | 14 | 15 | 231 |
| | | May 07, 1998 | | | | | | | | | | | | |
| 578 | HTOIZ02 | PTA-843 | Uni-ZAP XR | 588 | 549 | 1 | 549 | 243 | 243 | 1525 | 1 | 16 | 17 | 50 |
| | | Oct. 13, 1999 | | | | | | | | | | | | |
| 578 | HTOIZ02 | PTA-843 | Uni-ZAP XR | 916 | 1369 | 746 | 1345 | | 2 | 1853 | 1 | 1 | 2 | 240 |
| | | Oct. 13, 1999 | | | | | | | | | | | | |
| 579 | HTOJA73 | 203105 | Uni-ZAP XR | 589 | 1294 | 1 | 1294 | 100 | 100 | 1526 | 1 | 21 | 22 | 41 |
| | | Aug. 13, 1998 | | | | | | | | | | | | |
| 580 | HTOJK60 | 209324 | Uni-ZAP XR | 590 | 904 | 1 | 904 | 217 | 217 | 1527 | 1 | 18 | 19 | 32 |
| | | Oct. 02, 1997 | | | | | | | | | | | | |
| 581 | HTPBW79 | 209511 | Uni-ZAP XR | 591 | 1374 | 1 | 1374 | 178 | 178 | 1528 | 1 | 22 | 23 | 362 |
| | | Dec. 03, 1997 | | | | | | | | | | | | |
| 581 | HTPBW79 | 209511 | Uni-ZAP XR | 917 | 1515 | 118 | 1507 | 302 | 302 | 1854 | 1 | 24 | 25 | 362 |
| | | Dec. 03, 1997 | | | | | | | | | | | | |
| 581 | HTPBW79 | 209511 | Uni-ZAP XR | 918 | 1404 | 1 | 1404 | 92 | 92 | 1855 | 1 | 22 | 23 | 415 |
| | | Dec. 03, 1997 | | | | | | | | | | | | |
| 582 | HTSEW17 | 209138 | pBluescript | 592 | 652 | 1 | 652 | 170 | 170 | 1529 | 1 | 34 | 35 | 37 |
| | | Jul. 03, 1997 | | | | | | | | | | | | |
| 583 | HTTDB46 | 203484 | Uni-ZAP XR | 593 | 3059 | 1 | 3059 | 55 | 55 | 1530 | 1 | 17 | 18 | 318 |
| | | Nov. 17, 1998 | | | | | | | | | | | | |
| 583 | HTTDB46 | 203484 | Uni-ZAP XR | 919 | 2008 | 215 | 2008 | 153 | 153 | 1856 | 1 | 17 | 18 | 461 |
| | | Nov. 17, 1998 | | | | | | | | | | | | |
| 584 | HTWCT03 | 209086 | pSport1 | 594 | 1963 | 1 | 1963 | 334 | 334 | 1531 | 1 | 26 | 27 | 101 |
| | | May 29, 1997 | | | | | | | | | | | | |
| 585 | HTWDF76 | 209852 | pSport1 | 595 | 963 | 1 | 963 | 316 | 316 | 1532 | 1 | 24 | 25 | 85 |
| | | May 07, 1998 | | | | | | | | | | | | |
| 586 | HTXAJ12 | 209423 | Uni-ZAP XR | 596 | 675 | 1 | 675 | 91 | 91 | 1533 | 1 | 18 | 19 | 111 |
| | | Oct. 30, 1997 | | | | | | | | | | | | |
| 586 | HTXAJ12 | 209423 | Uni-ZAP XR | 920 | 675 | 1 | 675 | 91 | 91 | 1857 | 1 | 18 | 19 | 111 |
| | | Oct. 30, 1997 | | | | | | | | | | | | |
| 587 | HTXCV12 | 209423 | Uni-ZAP XR | 597 | 1134 | 1 | 1134 | 175 | 175 | 1534 | 1 | 27 | 28 | 102 |
| | | Oct. 30, 1997 | | | | | | | | | | | | |
| 587 | HTXCV12 | 209423 | Uni-ZAP XR | 921 | 1162 | 1 | 1162 | 183 | 183 | 1858 | 1 | 27 | 28 | 91 |
| | | Oct. 30, 1997 | | | | | | | | | | | | |
| 588 | HTXDW56 | 209746 | Uni-ZAP XR | 598 | 1583 | 1 | 1583 | 217 | 217 | 1535 | 1 | 21 | 22 | 201 |
| | | Apr. 07, 1998 | | | | | | | | | | | | |
| 589 | HTXFL30 | 209603 | Uni-ZAP XR | 599 | 1991 | 1 | 1991 | 30 | 30 | 1536 | 1 | 39 | 40 | 102 |
| | | Jan. 29, 1998 | | | | | | | | | | | | |
| 590 | HTXKF95 | PTA-622 | Uni-ZAP XR | 600 | 975 | 170 | 966 | 421 | 421 | 1537 | 1 | 28 | 29 | 78 |
| | | Sep. 02, 1999 | | | | | | | | | | | | |
| 590 | HTXKF95 | PTA-622 | Uni-ZAP XR | 922 | 884 | 79 | 875 | 330 | 330 | 1859 | 1 | 28 | 29 | 78 |
| | | Sep. 02, 1999 | | | | | | | | | | | | |
| 591 | HTXKP61 | 203364 | Uni-ZAP XR | 601 | 1209 | 1 | 1209 | 169 | 169 | 1538 | 1 | 33 | 34 | 42 |
| | | Oct. 19, 1998 | | | | | | | | | | | | |
| 592 | HUDBZ89 | 209407 | ZAP Express | 602 | 2135 | 1 | 2135 | 1085 | 1085 | 1539 | 1 | 17 | 18 | 73 |
| | | Oct. 23, 1997 | | | | | | | | | | | | |
| 592 | HUDBZ89 | 209407 | ZAP Express | 923 | 1265 | 1 | 1265 | 197 | 197 | 1860 | 1 | 17 | 18 | 54 |
| | | Oct. 23, 1997 | | | | | | | | | | | | |
| 593 | HUFBY15 | PTA-1543 | pSport1 | 603 | 1193 | 1 | 1193 | 49 | 49 | 1540 | 1 | 26 | 27 | 159 |
| | | Mar. 21, 2000 | | | | | | | | | | | | |
| 593 | HUFBY15 | PTA-1543 | pSport1 | 924 | 1012 | 1 | 1012 | 74 | 74 | 1861 | 1 | 26 | 27 | 145 |
| | | Mar. 21, 2000 | | | | | | | | | | | | |
| 594 | HUFEF62 | 209852 | pSport1 | 604 | 518 | 1 | 518 | 190 | 190 | 1541 | 1 | 28 | 29 | 68 |
| | | May 07, 1998 | | | | | | | | | | | | |
| 594 | HUFEF62 | 209852 | pSport1 | 925 | 539 | 1 | 539 | 182 | 182 | 1862 | 1 | 28 | 29 | 68 |
| | | May 07, 1998 | | | | | | | | | | | | |
| 595 | HUKAH51 | 209568 | Lambda ZAP | 605 | 853 | 1 | 853 | 286 | 286 | 1542 | 1 | 20 | 21 | 151 |
| | | Jan. 06, 1998 | II | | | | | | | | | | | |
| 595 | HUKAH51 | 209568 | Lambda ZAP | 926 | 754 | 1 | 754 | 144 | 144 | 1863 | 1 | 22 | 23 | 142 |
| | | Jan. 06, 1998 | II | | | | | | | | | | | |
| 595 | HUKAH51 | 209568 | Lambda ZAP | 927 | 667 | 1 | 667 | 55 | 55 | 1864 | 1 | 22 | 23 | 119 |
| | | Jan. 06, 1998 | II | | | | | | | | | | | |
| 596 | HUKBT29 | 209746 | Lambda ZAP | 606 | 1757 | 56 | 1757 | 74 | 74 | 1543 | 1 | 19 | 20 | 506 |
| | | Apr. 07, 1998 | II | | | | | | | | | | | |
| 597 | HUSIG64 | 209423 | pSport1 | 607 | 1010 | 1 | 1010 | 9 | 9 | 1544 | 1 | 21 | 22 | 334 |
| | | Oct. 30, 1997 | | | | | | | | | | | | |
| 598 | HUSXS50 | 209651 | pSport1 | 608 | 2561 | 1 | 2561 | 280 | 280 | 1545 | 1 | 19 | 20 | 522 |
| | | Mar. 04, 1998 | | | | | | | | | | | | |
| 598 | HUSXS50 | 209651 | pSport1 | 928 | 2025 | 1098 | 1997 | 281 | 281 | 1865 | 1 | 30 | 31 | 462 |
| | | Mar. 04, 1998 | | | | | | | | | | | | |
| 598 | HUSXS50 | 209651 | pSport1 | 929 | 1020 | 1 | 1020 | 179 | 179 | 1866 | 1 | 23 | 24 | 174 |
| | | Mar. 04, 1998 | | | | | | | | | | | | |
| 599 | HVARW53 | PTA-2076 | pSport1 | 609 | 1015 | 1 | 1015 | 111 | 111 | 1546 | 1 | 34 | 35 | 186 |
| | | Jun. 09, 2000 | | | | | | | | | | | | |
| 599 | HVARW53 | PTA-2076 | pSport1 | 930 | 1006 | 1 | 1006 | 96 | 96 | 1867 | 1 | 34 | 35 | 164 |
| | | Jun. 09, 2000 | | | | | | | | | | | | |
| 600 | HWAAD63 | 203570 | pCMVSport | 610 | 3308 | 1 | 3308 | 322 | 322 | 1547 | 1 | 30 | 31 | 168 |
| | | Jan. 11, 1999 | 3.0 | | | | | | | | | | | |
| 600 | HWAAD63 | 203570 | pCMVSport | 931 | 3306 | 1 | 3306 | 322 | 322 | 1868 | 1 | 30 | 31 | 53 |
| | | Jan. 11, 1999 | 3.0 | | | | | | | | | | | |
| 600 | HWAAD63 | 203570 | pCMVSport | 932 | 2194 | 1 | 2194 | 312 | 312 | 1869 | 1 | 30 | 31 | 169 |
| | | Jan. 11, 1999 | 3.0 | | | | | | | | | | | |
| 601 | HWABA81 | 209463 | pCMVSport | 611 | 866 | 1 | 866 | 57 | 57 | 1548 | 1 | 21 | 22 | 48 |
| | | Nov. 14, 1997 | 3.0 | | | | | | | | | | | |
| 602 | HWABY10 | 203071 | pCMVSport | 612 | 2950 | 78 | 2914 | 263 | 263 | 1549 | 1 | 22 | 23 | 168 |
| | | Jul. 27, 1998 | 3.0 | | | | | | | | | | | |
| 603 | HWADJ89 | PTA-1543 | pCMVSport | 613 | 1769 | 529 | 1769 | 581 | 581 | 1550 | 1 | 1 | 2 | 43 |
| | | Mar. 21, 2000 | 3.0 | | | | | | | | | | | |
| 604 | HWBAO62 | 209603 | pCMVSport | 614 | 1903 | 1 | 1903 | 52 | 52 | 1551 | 1 | 30 | 31 | 212 |
| | | Jan. 29, 1998 | 3.0 | | | | | | | | | | | |
| 604 | HWBAO62 | 209603 | pCMVSport | 933 | 1940 | 1 | 1940 | 81 | 81 | 1870 | 1 | 30 | 31 | 101 |
| | | Jan. 29, 1998 | 3.0 | | | | | | | | | | | |
| 605 | HWBAR88 | PTA-867 | pCMVSport | 615 | 1051 | 1 | 1051 | 156 | 156 | 1552 | 1 | 18 | 19 | 75 |
| | | Oct. 26, 1999 | 3.0 | | | | | | | | | | | |
| 606 | HWBCB89 | PTA-499 | pCMVSport | 616 | 1317 | 3 | 1317 | 37 | 37 | 1553 | 1 | 19 | 20 | 187 |
| | | Aug. 11, 1999 | 3.0 | | | | | | | | | | | |
| 606 | HWBCB89 | PTA-499 | pCMVSport | 934 | 1315 | 1 | 1315 | 35 | 35 | 1871 | 1 | 19 | 20 | 187 |
| | | Aug. 11, 1999 | 3.0 | | | | | | | | | | | |
| 607 | HWBCP79 | 209641 | pCMVSport | 617 | 1138 | 1 | 1138 | 243 | 243 | 1554 | 1 | 21 | 22 | 105 |
| | | Feb. 25, 1998 | 3.0 | | | | | | | | | | | |
| 607 | HWBCP79 | 209641 | pCMVSport | 935 | 1138 | 1 | 1138 | 233 | 233 | 1872 | 1 | 21 | 22 | 105 |
| | | Feb. 25, 1998 | 3.0 | | | | | | | | | | | |
| 608 | HWBDP28 | 209641 | pCMVSport | 618 | 1841 | 1 | 1841 | 1342 | 1342 | 1555 | 1 | 25 | 26 | 67 |
| | | Feb. 25, 1998 | 3.0 | | | | | | | | | | | |
| 608 | HWBDP28 | 209641 | pCMVSport | 936 | 314 | 1 | 314 | 132 | 132 | 1873 | 1 | 25 | 26 | 61 |
| | | Feb. 25, 1998 | 3.0 | | | | | | | | | | | |
| 609 | HWBFE57 | PTA-868 | pCMVSport | 619 | 1133 | 36 | 1133 | 227 | 227 | 1556 | 1 | 36 | 37 | 302 |
| | | Oct. 26, 1999 | 3.0 | | | | | | | | | | | |
| 609 | HWBFE57 | PTA-868 | pCMVSport | 937 | 5811 | 3302 | 5811 | | 3300 | 1874 | 1 | 16 | 17 | 37 |
| | | Oct. 26, 1999 | 3.0 | | | | | | | | | | | |
| 609 | HWBFE57 | PTA-868 | pCMVSport | 938 | 1012 | 1 | 1012 | | 622 | 1875 | 1 | 10 | 11 | 16 |
| | | Oct. 26, 1999 | 3.0 | | | | | | | | | | | |
| 610 | HWDAC39 | 209641 | pCMVSport | 620 | 753 | 1 | 753 | 96 | 96 | 1557 | 1 | 20 | 21 | 110 |
| | | Feb. 25, 1998 | 3.0 | | | | | | | | | | | |
| 610 | HWDAC39 | 209641 | pCMVSport | 939 | 734 | 1 | 734 | 85 | 85 | 1876 | 1 | 20 | 21 | 117 |
| | | Feb. 25, 1998 | 3.0 | | | | | | | | | | | |
| 611 | HWDAH38 | PTA-868 | pCMVSport | 621 | 1604 | 1 | 1604 | 255 | 255 | 1558 | 1 | 20 | 21 | 40 |
| | | Oct. 26, 1999 | 3.0 | | | | | | | | | | | |
| 611 | HWDAH38 | PTA-868 | pCMVSport | 940 | 796 | 1 | 796 | 319 | 319 | 1877 | 1 | 20 | 21 | 40 |
| | | Oct. 26, 1999 | 3.0 | | | | | | | | | | | |
| 612 | HWHGP71 | 203858 | pCMVSport | 622 | 1021 | 1 | 1021 | 389 | 389 | 1559 | 1 | 51 | 52 | 211 |
| | | Mar. 18, 1999 | 3.0 | | | | | | | | | | | |
| 612 | HWHGP71 | 203858 | pCMVSport | 941 | 1037 | 1 | 1037 | 394 | 394 | 1878 | 1 | 18 | 19 | 77 |
| | | Mar. 18, 1999 | 3.0 | | | | | | | | | | | |
| 613 | HWHGQ49 | 209641 | pCMVSport | 623 | 985 | 1 | 985 | 511 | 511 | 1560 | 1 | 17 | 18 | 90 |
| | | Feb. 25, 1998 | 3.0 | | | | | | | | | | | |
| 613 | HWHGQ49 | 209641 | pCMVSport | 942 | 1410 | 33 | 1410 | 306 | 306 | 1879 | 1 | 22 | 23 | 150 |
| | | Feb. 25, 1998 | 3.0 | | | | | | | | | | | |
| 614 | HWHGU54 | 209782 | pCMVSport | 624 | 1445 | 1 | 1445 | 145 | 145 | 1561 | 1 | 19 | 20 | 414 |
| | | Apr. 20, 1998 | 3.0 | | | | | | | | | | | |
| 615 | HWHGZ51 | PTA-499 | pCMVSport | 625 | 1699 | 1 | 1699 | 33 | 33 | 1562 | 1 | 30 | 31 | 346 |
| | | Aug. 11, 1999 | 3.0 | | | | | | | | | | | |
| 616 | HWHHL34 | 203181 | pCMVSport | 626 | 1529 | 95 | 1529 | 131 | 131 | 1563 | 1 | 30 | 31 | 188 |
| | | Sep. 09, 1998 | 3.0 | | | | | | | | | | | |
| 616 | HWHHL34 | 203181 | pCMVSport | 943 | 1796 | 1 | 1796 | 209 | 209 | 1880 | 1 | 31 | 32 | 102 |
| | | Sep. 09, 1998 | 3.0 | | | | | | | | | | | |
| 616 | HWHHL34 | 203181 | pCMVSport | 944 | 2136 | 1 | 2136 | 101 | 101 | 1881 | 1 | 30 | 31 | 188 |
| | | Sep. 09, 1998 | 3.0 | | | | | | | | | | | |
| 617 | HWLEV32 | PTA-884 | pSport1 | 627 | 1218 | 1 | 1218 | 39 | 39 | 1564 | 1 | 18 | 19 | 45 |
| | | Oct. 28, 1999 | | | | | | | | | | | | |
| 617 | HWLEV32 | PTA-884 | pSport1 | 945 | 1203 | 1 | 1203 | 29 | 29 | 1882 | 1 | 18 | 19 | 45 |
| | | Oct. 28, 1999 | | | | | | | | | | | | |
| 617 | HWLEV32 | PTA-884 | pSport1 | 946 | 1144 | 528 | 596 | | 3 | 1883 | 1 | 1 | 2 | 136 |
| | | Oct. 28, 1999 | | | | | | | | | | | | |
| 617 | HWLEV32 | PTA-884 | pSport1 | 947 | 1120 | 791 | 851 | | 1 | 1884 | 1 | 1 | 2 | 141 |
| | | Oct. 28, 1999 | | | | | | | | | | | | |
| 618 | HWLIH65 | 203081 | pSport1 | 628 | 831 | 1 | 831 | 129 | 129 | 1565 | 1 | 18 | 19 | 165 |
| | | Jul. 30, 1998 | | | | | | | | | | | | |
| 619 | HWTBK81 | 209138 | Uni-ZAP XR | 629 | 637 | 78 | 635 | 139 | 139 | 1566 | 1 | 23 | 24 | 155 |
| | | Jul. 03, 1997 | | | | | | | | | | | | |
| 620 | HYAAJ71 | 203517 | pCMVSport | 630 | 3337 | 1 | 3337 | 190 | 190 | 1567 | 1 | 31 | 32 | 62 |
| | | Dec. 10, 1998 | 3.0 | | | | | | | | | | | |
| 621 | HUSBA88 | PTA-623 | Lambda ZAP | 631 | 2733 | 27 | 2733 | 270 | 270 | 1569 | 1 | 15 | 16 | 615 |
| | | Sep. 02, 1999 | II | | | | | | | | | | | |

Table 1B (Comprised of Tables 1B.1 and 1B.2)

[0096] The first column in Table 1B.1 and Table 1B.2 provides the gene number in the application corresponding to the clone identifier. The second column in Table 1B.1 and Table 1B.2 provides a unique “Clone ID:” for the cDNA clone related to each contig sequence disclosed in Table 1B.1 and Table 1B.2. This clone ID references the cDNA clone which contains at least the 5′ most sequence of the assembled contig and at least a portion of SEQ ID NO:X as determined by directly sequencing the referenced clone. The referenced clone may have more sequence than described in the sequence listing or the clone may have less. In the vast majority of cases, however, the clone is believed to encode a full-length polypeptide. In the case where a clone is not full-length, a full-length cDNA can be obtained by methods described elsewhere herein. The third column in Table 1B.1 and Table 1B.2 provides a unique “Contig ID” identification for each contig sequence. The fourth column in Table 1B.1 and Table 1B.2 provides the “SEQ ID NO:” identifier for each of the contig polynucleotide sequences disclosed in Table 1B.

Table 1B.1

[0097] The fifth column in Table 1B.1, “ORF (From-To)”, provides the location (i.e., nucleotide position numbers) within the polynucleotide sequence “SEQ ID NO:X” that delineate the preferred open reading frame (ORF) shown in the sequence listing and referenced in Table 1B.1, column 6, as SEQ ID NO:Y. Where the nucleotide position number “To” is lower than the nucleotide position number “From”, the preferred ORF is the reverse complement of the referenced polynucleotide sequence. The sixth column in Table 1B.1 provides the corresponding SEQ ID NO:Y for the polypeptide sequence encoded by the preferred ORF delineated in column 5. In one embodiment, the invention provides an amino acid sequence comprising, or alternatively consisting of, a polypeptide encoded by the portion of SEQ ID NO:X delineated by “ORF (From-To)”. Also provided are polynucleotides encoding such amino acid sequences and the complementary strand thereto. Column 7 in Table 1B.1 lists residues comprising epitopes contained in the polypeptides encoded by the preferred ORF (SEQ ID NO:Y), as predicted using the algorithm of Jameson and Wolf, (1988) Comp. Appl. Biosci. 4:181-186. The Jameson-Wolf antigenic analysis was performed using the computer program PROTEAN (Version 3.11 for the Power MacIntosh, DNASTAR, Inc., 1228 South Park Street Madison, Wis.). In specific embodiments, polypeptides of the invention comprise, or alternatively consist of, at least one, two, three, four, five or more of the predicted epitopes as described in Table 1B. It will be appreciated that depending on the analytical criteria used to predict antigenic determinants, the exact address of the determinant may vary slightly.

[0098] Column 8 in Table 1B.1 provides a chromosomal map location for certain polynucleotides of the invention. Chromosomal location was determined by finding exact matches to EST and cDNA sequences contained in the NCBI (National Center for Biotechnology Information) UniGene database. Each sequence in the UniGene database is assigned to a “cluster”; all of the ESTs, cDNAs, and STSs in a cluster are believed to be derived from a single gene. Chromosomal mapping data is often available for one or more sequence(s) in a UniGene cluster; this data (if consistent) is then applied to the cluster as a whole. Thus, it is possible to infer the chromosomal location of a new polynucleotide sequence by determining its identity with a mapped UniGene cluster.

[0099] A modified version of the computer program BLASTN (Altshul, et al., J. Mol. Biol. 215:403-410 (1990), and Gish, and States, Nat. Genet. 3:266-272) (1993) was used to search the UniGene database for EST or cDNA sequences that contain exact or near-exact matches to a polynucleotide sequence of the invention (the ‘Query’). A sequence from the UniGene database (the ‘Subject’) was said to be an exact match if it contained a segment of 50 nucleotides in length such that 48 of those nucleotides were in the same order as found in the Query sequence. If all of the matches that met this criteria were in the same UniGene cluster, and mapping data was available for this cluster, it is indicated in Table 1B under the heading “Cytologic Band”. Where a cluster had been further localized to a distinct cytologic band, that band is disclosed; where no banding information was available, but the gene had been localized to a single chromosome, the chromosome is disclosed.

[0100] Once a presumptive chromosomal location was determined for a polynucleotide of the invention, an associated disease locus was identified by comparison with a database of diseases which have been experimentally associated with genetic loci. The database used was the Morbid Map, derived from OMIM™ and National Center for Biotechnology Information, National Library of Medicine (Bethesda, Md.) 2000. If the putative chromosomal location of a polynucleotide of the invention (Query sequence) was associated with a disease in the Morbid Map database, an OMIM reference identification number was noted in column 9, Table 1B.1, labelled “OMIM Disease Reference(s). Table 5 is a key to the OMIM reference identification numbers (column 1), and provides a description of the associated disease in Column 2.

[0101] Table 1B.2

[0102] Column 5, in Table 1B.2, provides an expression profile and library code:count for each of the contig sequences (SEQ ID NO:X) disclosed in Table 1B, which can routinely be combined with the information provided in Table 4 and used to determine the tissues, cells, and/or cell line libraries which predominantly express the polynucleotides of the invention. The first number in Table 1B.2, column 5 (preceding the colon), represents the tissue/cell source identifier code corresponding to the code and description provided in Table 4. The second number in column 5 (following the colon) represents the number of times a sequence corresponding to the reference polynucleotide sequence was identified in the corresponding tissue/cell source. Those tissue/cell source identifier codes in which the first two letters are “AR” designate information generated using DNA array technology. Utilizing this technology, cDNAs were amplified by PCR and then transferred, in duplicate, onto the array. Gene expression was assayed through hybridization of first strand cDNA probes to the DNA array. cDNA probes were generated from total RNA extracted from a variety of different tissues and cell lines. Probe synthesis was performed in the presence of ³³P dCTP, using oligo (dT) to prime reverse transcription. After hybridization, high stringency washing conditions were employed to remove non-specific hybrids from the array. The remaining signal, emanating from each gene target, was measured using a Phosphorimager. Gene expression was reported as Phosphor Stimulating Luminescence (PSL) which reflects the level of phosphor signal generated from the probe hybridized to each of the gene targets represented on the array. A local background signal subtraction was performed before the total signal generated from each array was used to normalize gene expression between the different hybridizations. The value presented after “[array code]:” represents the mean of the duplicate values, following background subtraction and probe normalization. One of skill in the art could routinely use this information to identify normal and/or diseased tissue(s) which show a predominant expression pattern of the corresponding polynucleotide of the invention or to identify polynucleotides which show predominant and/or specific tissue and/or cell expression.

LENGTHY TABLE REFERENCED HERE
US20070015696A1-20070118-T00001
Please refer to the end of the specification for access instructions.

[0103] Table 1C summarizes additional polynucleotides encompassed by the invention (including cDNA clones related to the sequences (Clone ID:), contig sequences (contig identifier (Contig ID:) contig nucleotide sequence identifiers (SEQ ID NO:X)), and genomic sequences (SEQ ID NO:B). The first column provides a unique clone identifier, “Clone ID:”, for a cDNA clone related to each contig sequence. The second column provides the sequence identifier, “SEQ ID NO:X”, for each contig sequence. The third column provides a unique contig identifier, “Contig ID:” for each contig sequence. The fourth column, provides a BAC identifier “BAC ID NO:A” for the BAC clone referenced in the corresponding row of the table. The fifth column provides the nucleotide sequence identifier, “SEQ ID NO:B” for a fragment of the BAC clone identified in column four of the corresponding row of the table. The sixth column, “Exon From-To”, provides the location (i.e., nucleotide position numbers) within the polynucleotide sequence of SEQ ID NO:B which delineate certain polynucleotides of the invention that are also exemplary members of polynucleotide sequences that encode polypeptides of the invention (e.g., polypeptides containing amino acid sequences encoded by the polynucleotide sequences delineated in column six, and fragments and variants thereof).

TABLE 1C

| | SEQ | | | SEQ | |
|---|---|---|---|---|---|
| | ID | | | ID | |
| cDNA Clone | NO: | | | NO: | EXON |
| ID | X | CONTIG ID: | BAC ID: A | B | From-To |
| HAGAN21 | 21 | 1026956 | AC011967 | 1885 | 1-839 |
| HAGAN21 | 21 | 1026956 | AC074370 | 1886 | 1-839 |
| HAGAN21 | 21 | 1026956 | AL355151 | 1887 | 1-837 |
| HAGAN21 | 21 | 1026956 | AL121796 | 1888 | 1-836 |
| HAGAN21 | 21 | 1026956 | AC011967 | 1889 | 1-367 |
| | | | | | 372-1167 |
| | | | | | 1180-1791 |
| | | | | | 3777-4078 |
| | | | | | 4113-4269 |
| HAGAN21 | 21 | 1026956 | AC074370 | 1890 | 1-366 |
| | | | | | 373-1167 |
| | | | | | 1180-1793 |
| | | | | | 3779-4081 |
| | | | | | 4117-4273 |
| HAGAN21 | 21 | 1026956 | AL355151 | 1891 | 1-364 |
| | | | | | 373-1166 |
| | | | | | 1179-1790 |
| | | | | | 3780-4082 |
| HAGAN21 | 21 | 1026956 | AL121796 | 1892 | 1-367 |
| | | | | | 374-1165 |
| | | | | | 1178-1791 |
| | | | | | 3767-4069 |
| | | | | | 4105-4262 |
| HAIBP89 | 31 | 727543 | AC005214 | 1893 | 1-228 |
| | | | | | 817-3471 |
| HAIBP89 | 31 | 727543 | AC005214 | 1894 | 1-539 |
| HBCPB32 | 56 | 1352403 | AC024191 | 1895 | 1-643 |
| | | | | | 1421-1636 |
| | | | | | 4917-5536 |
| HBCQL32 | 57 | 1134954 | AC069250 | 1896 | 1-461 |
| | | | | | 504-1011 |
| | | | | | 1964-2424 |
| | | | | | 2747-2859 |
| | | | | | 3098-3251 |
| | | | | | 4239-6717 |
| HBCQL32 | 57 | 1134954 | AC069250 | 1897 | 1-418 |
| HBINS58 | 62 | 1352386 | AL096774 | 1898 | 1-1023 |
| | | | | | 2010-2239 |
| | | | | | 2581-2962 |
| | | | | | 3153-3223 |
| | | | | | 3324-3493 |
| | | | | | 3973-4126 |
| HBINS58 | 62 | 1352386 | AL096774 | 1899 | 1-341 |
| HBINS58 | 62 | 1352386 | AL096774 | 1900 | 1-142 |
| HBMCI50 | 69 | 668268 | AL139132 | 1901 | 1-890 |
| HBMCI50 | 69 | 668268 | AL359179 | 1902 | 1-891 |
| HBMCI50 | 69 | 668268 | AL139132 | 1903 | 1-155 |
| HBMCI50 | 69 | 668268 | AL359179 | 1904 | 1-155 |
| HBOEG11 | 71 | 1300752 | AL139352 | 1905 | 1-253 |
| | | | | | 438-539 |
| | | | | | 2336-2801 |
| | | | | | 4986-5209 |
| | | | | | 5967-6439 |
| | | | | | 9014-9452 |
| | | | | | 9829-10084 |
| | | | | | 10404-10503 |
| | | | | | 12165-13255 |
| HBOEG11 | 71 | 1300752 | AL139352 | 1906 | 1-559 |
| HCEFB80 | 79 | 1143407 | AL022327 | 1907 | 1-2271 |
| | | | | | 3506-3658 |
| | | | | | 4643-4810 |
| | | | | | 9039-9164 |
| | | | | | 9382-9509 |
| | | | | | 10587-10720 |
| | | | | | 11135-11195 |
| | | | | | 11265-11716 |
| | | | | | 14644-15466 |
| | | | | | 17451-17526 |
| | | | | | 18012-18114 |
| | | | | | 20530-20632 |
| | | | | | 20957-21009 |
| | | | | | 23696-23785 |
| | | | | | 25338-25575 |
| | | | | | 25969-26166 |
| HCEWE17 | 83 | 941941 | AL139130 | 1908 | 1-170 |
| | | | | | 463-598 |
| | | | | | 623-1346 |
| | | | | | 1404-1523 |
| | | | | | 2059-2159 |
| | | | | | 2350-2616 |
| | | | | | 3068-3254 |
| | | | | | 3428-3878 |
| HCOOS80 | 96 | 1134974 | AC003688 | 1909 | 1-718 |
| | | | | | 1054-1158 |
| | | | | | 1660-1980 |
| | | | | | 4003-4073 |
| | | | | | 4364-4516 |
| | | | | | 4646-4749 |
| | | | | | 4852-4995 |
| | | | | | 5121-5213 |
| | | | | | 5354-5424 |
| | | | | | 5526-5669 |
| | | | | | 5759-5832 |
| | | | | | 5850-6176 |
| | | | | | 6756-6829 |
| | | | | | 7023-7175 |
| | | | | | 7259-7398 |
| | | | | | 7531-7711 |
| | | | | | 8134-8381 |
| | | | | | 8463-13585 |
| | | | | | 13691-14323 |
| | | | | | 14437-14918 |
| HCOOS80 | 96 | 1134974 | AC026954 | 1910 | 1-138 |
| | | | | | 273-453 |
| | | | | | 876-1123 |
| | | | | | 1205-4456 |
| HCOOS80 | 96 | 1134974 | AC003688 | 1911 | 1-125 |
| | | | | | 203-480 |
| | | | | | 1463-1647 |
| | | | | | 2048-2077 |
| | | | | | 2229-2323 |
| | | | | | 2725-3784 |
| | | | | | 3867-4682 |
| HCWGU37 | 103 | 1042325 | AC007459 | 1912 | 1-242 |
| HCWGU37 | 103 | 1042325 | AC022435 | 1913 | 1-218 |
| | | | | | 5587-5754 |
| HCWGU37 | 103 | 1042325 | AC022051 | 1914 | 1-294 |
| HCWGU37 | 103 | 1042325 | AC023672 | 1915 | 1-196 |
| HCWGU37 | 103 | 1042325 | AC011101 | 1916 | 1-100 |
| HCWGU37 | 103 | 1042325 | AC034243 | 1917 | 1-312 |
| | | | | | 2334-2364 |
| HCWGU37 | 103 | 1042325 | AC010454 | 1918 | 1-218 |
| | | | | | 5588-5755 |
| HCWGU37 | 103 | 1042325 | AC026144 | 1919 | 1-183 |
| HCWGU37 | 103 | 1042325 | AC009691 | 1920 | 1-292 |
| HCWGU37 | 103 | 1042325 | AL354696 | 1921 | 1-181 |
| HCWGU37 | 103 | 1042325 | AC073219 | 1922 | 1-123 |
| HCWGU37 | 103 | 1042325 | AC027414 | 1923 | 1-270 |
| HCWGU37 | 103 | 1042325 | AC010454 | 1924 | 1-303 |
| HDPWN93 | 140 | 992925 | AC004590 | 1925 | 1-276 |
| | | | | | 489-591 |
| | | | | | 866-988 |
| | | | | | 1106-1281 |
| | | | | | 1323-1444 |
| | | | | | 1632-1799 |
| | | | | | 1866-2016 |
| | | | | | 2109-2313 |
| | | | | | 2634-3205 |
| | | | | | 3360-3472 |
| | | | | | 3528-3744 |
| | | | | | 3820-5006 |
| | | | | | 6580-6919 |
| | | | | | 7076-7276 |
| | | | | | 8057-8153 |
| | | | | | 8318-8680 |
| HDPWN93 | 140 | 992925 | AC021491 | 1926 | 1-275 |
| | | | | | 488-590 |
| | | | | | 865-987 |
| | | | | | 1105-1280 |
| | | | | | 1322-1443 |
| | | | | | 1631-1798 |
| | | | | | 1865-2015 |
| | | | | | 2108-2312 |
| | | | | | 2633-3204 |
| | | | | | 3359-3471 |
| | | | | | 3527-3743 |
| | | | | | 3819-5005 |
| | | | | | 6579-6918 |
| | | | | | 7075-7275 |
| | | | | | 8054-8150 |
| | | | | | 8315-8677 |
| HDPWN93 | 140 | 992925 | AC004590 | 1927 | 1-303 |
| | | | | | 727-1252 |
| | | | | | 5721-5846 |
| HDPWN93 | 140 | 992925 | AC021491 | 1928 | 1-303 |
| | | | | | 727-1253 |
| | | | | | 5723-5848 |
| HDTEK44 | 146 | 1025421 | AC022100 | 1929 | 1-2932 |
| HDTEK44 | 146 | 1025421 | AC022100 | 1930 | 1-353 |
| HDTFE17 | 148 | 1043391 | AF196972 | 1931 | 1-74 |
| | | | | | 391-524 |
| | | | | | 1481-1536 |
| | | | | | 1623-1699 |
| | | | | | 2092-2448 |
| | | | | | 2537-2611 |
| | | | | | 3085-3179 |
| | | | | | 3315-3395 |
| | | | | | 6429-6514 |
| | | | | | 6997-7407 |
| | | | | | 7611-7693 |
| | | | | | 8316-8774 |
| | | | | | 9534-9680 |
| | | | | | 9770-9875 |
| | | | | | 10373-10876 |
| HDTFE17 | 148 | 1043391 | AF196972 | 1932 | 1-742 |
| HDTMK50 | 151 | 1011485 | AL354768 | 1933 | 1-1340 |
| HDTMK50 | 151 | 1011485 | AC012318 | 1934 | 1-147 |
| HDTMK50 | 151 | 1011485 | AL354768 | 1935 | 1-590 |
| HE8QV67 | 162 | 1050076 | AL133410 | 1936 | 1-765 |
| | | | | | 4403-4496 |
| | | | | | 4696-4813 |
| | | | | | 5112-5584 |
| | | | | | 5780-5830 |
| | | | | | 5850-7766 |
| | | | | | 7774-8284 |
| | | | | | 8479-8902 |
| | | | | | 8986-9110 |
| | | | | | 9305-9481 |
| | | | | | 9658-9944 |
| | | | | | 9998-10106 |
| | | | | | 10202-12718 |
| | | | | | 12797-12886 |
| | | | | | 12974-13063 |
| | | | | | 13259-14645 |
| | | | | | 14680-14941 |
| | | | | | 15625-15714 |
| | | | | | 15825-15895 |
| | | | | | 15965-16114 |
| | | | | | 16204-16772 |
| HE8QV67 | 162 | 1050076 | AL133410 | 1937 | 1-85 |
| | | | | | 1082-1951 |
| | | | | | 2761-3118 |
| HE8QV67 | 162 | 1050076 | AL133410 | 1938 | 1-26 |
| | | | | | 28-267 |
| | | | | | 828-3952 |
| | | | | | 4173-4837 |
| | | | | | 4930-6955 |
| | | | | | 7105-7230 |
| | | | | | 7451-7655 |
| | | | | | 7842-7947 |
| | | | | | 8245-8329 |
| | | | | | 8599-8756 |
| | | | | | 8855-8940 |
| | | | | | 9219-9356 |
| | | | | | 9728-9861 |
| | | | | | 10190-10231 |
| HEBBN36 | 172 | 486120 | AC005180 | 1939 | 1-341 |
| | | | | | 704-1559 |
| | | | | | 1704-3089 |
| | | | | | 3146-4166 |
| | | | | | 4768-4871 |
| | | | | | 5384-5485 |
| | | | | | 5535-6182 |
| | | | | | 6595-7328 |
| HEBBN36 | 172 | 486120 | AC002557 | 1940 | 1-1387 |
| HEBBN36 | 172 | 486120 | AC002557 | 1941 | 1-856 |
| HEBBN36 | 172 | 486120 | AC002557 | 1942 | 1-971 |
| HETLM70 | 193 | 1177512 | AC012314 | 1943 | 1-43 |
| | | | | | 861-1031 |
| | | | | | 1576-1743 |
| | | | | | 1924-2132 |
| | | | | | 2203-2432 |
| | | | | | 2473-2905 |
| | | | | | 3177-3360 |
| | | | | | 3651-4332 |
| | | | | | 4422-4583 |
| | | | | | 4830-4995 |
| | | | | | 5086-5365 |
| HETLM70 | 193 | 1177512 | AC009968 | 1944 | 1-43 |
| | | | | | 857-1027 |
| | | | | | 1570-1737 |
| | | | | | 1918-2126 |
| | | | | | 2197-2426 |
| | | | | | 2467-2899 |
| | | | | | 3171-3354 |
| | | | | | 3644-4326 |
| | | | | | 4416-4577 |
| | | | | | 4824-4989 |
| | | | | | 5080-5360 |
| HETLM70 | 193 | 1177512 | AC012314 | 1945 | 1-181 |
| | | | | | 1281-1463 |
| | | | | | 2719-2983 |
| | | | | | 3158-3411 |
| | | | | | 3804-6347 |
| | | | | | 6745-6879 |
| | | | | | 7118-7319 |
| | | | | | 7420-7521 |
| | | | | | 7859-8305 |
| | | | | | 8552-8602 |
| | | | | | 9988-10334 |
| | | | | | 10415-10778 |
| | | | | | 11003-11127 |
| | | | | | 11210-11303 |
| | | | | | 11334-11832 |
| | | | | | 13093-13145 |
| | | | | | 13703-13837 |
| | | | | | 13918-14152 |
| | | | | | 15415-15511 |
| | | | | | 15613-15742 |
| | | | | | 15998-16087 |
| | | | | | 16231-16307 |
| | | | | | 16447-17211 |
| | | | | | 18520-18796 |
| | | | | | 21777-22001 |
| HETLM70 | 193 | 1177512 | AC009968 | 1946 | 1-180 |
| | | | | | 1275-1457 |
| | | | | | 2712-2976 |
| | | | | | 3150-3403 |
| | | | | | 3796-6332 |
| | | | | | 6730-6864 |
| | | | | | 7103-7303 |
| | | | | | 7404-7505 |
| | | | | | 7843-8289 |
| | | | | | 8536-8586 |
| | | | | | 9970-10312 |
| | | | | | 10393-10756 |
| | | | | | 10981-11105 |
| | | | | | 11188-11805 |
| | | | | | 13068-13120 |
| | | | | | 13678-13812 |
| | | | | | 13905-13994 |
| HFIIZ70 | 202 | 1043350 | AC005005 | 1947 | 1-368 |
| | | | | | 1579-2971 |
| HFIIZ70 | 202 | 1043350 | AC005005 | 1948 | 1-484 |
| | | | | | 517-1142 |
| | | | | | 2842-3176 |
| | | | | | 3376-3493 |
| | | | | | 3575-3740 |
| | | | | | 3873-4227 |
| | | | | | 4728-4935 |
| | | | | | 5074-5351 |
| | | | | | 5446-5564 |
| | | | | | 5772-5960 |
| | | | | | 7287-7627 |
| | | | | | 7721-8097 |
| | | | | | 8218-9325 |
| | | | | | 12098-12161 |
| | | | | | 12780-13266 |
| | | | | | 13482-13666 |
| | | | | | 13748-13817 |
| | | | | | 14445-14519 |
| | | | | | 14595-14928 |
| | | | | | 15658-15754 |
| | | | | | 15848-15923 |
| | | | | | 16016-16112 |
| | | | | | 16512-16660 |
| | | | | | 21313-21448 |
| | | | | | 21710-21870 |
| | | | | | 21899-22470 |
| | | | | | 22634-22787 |
| | | | | | 23169-23307 |
| HFVGE32 | 215 | 854545 | AL160269 | 1949 | 1-1122 |
| HFVGE32 | 215 | 854545 | AL138754 | 1950 | 1-1120 |
| HHBCS39 | 232 | 1003028 | AL390960 | 1951 | 1-2979 |
| HHBCS39 | 232 | 1003028 | AL358992 | 1952 | 1-2983 |
| HHBCS39 | 232 | 1003028 | AL358992 | 1953 | 1-207 |
| HHEPD24 | 238 | 498227 | AC025937 | 1954 | 1-216 |
| HHGCM76 | 250 | 662329 | AC003665 | 1955 | 1-70 |
| | | | | | 304-609 |
| | | | | | 900-1090 |
| | | | | | 1240-1835 |
| | | | | | 2272-2490 |
| | | | | | 2581-3598 |
| HHGCM76 | 250 | 662329 | AC003665 | 1956 | 1-580 |
| | | | | | 851-995 |
| | | | | | 1224-1296 |
| | | | | | 1314-1663 |
| | | | | | 1930-1975 |
| | | | | | 2724-2905 |
| | | | | | 2968-3098 |
| | | | | | 3283-3328 |
| | | | | | 5121-5230 |
| | | | | | 5331-5689 |
| HJACG30 | 260 | 895505 | AC018512 | 1957 | 1-776 |
| HJACG30 | 260 | 895505 | AC022305 | 1958 | 1-878 |
| HJACG30 | 260 | 895505 | AC002518 | 1959 | 1-150 |
| HKACM93 | 277 | 1352383 | AL158848 | 1960 | 1-431 |
| | | | | | 4227-4418 |
| | | | | | 6907-7028 |
| | | | | | 12393-12788 |
| | | | | | 13026-13171 |
| | | | | | 14505-14634 |
| | | | | | 14659-14701 |
| | | | | | 15118-15405 |
| | | | | | 16371-16568 |
| | | | | | 17704-17888 |
| | | | | | 18408-18580 |
| | | | | | 18868-19021 |
| | | | | | 19843-20023 |
| | | | | | 21731-21911 |
| | | | | | 23724-25211 |
| HKACM93 | 277 | 1352383 | AL158848 | 1961 | 1-2833 |
| | | | | | 2990-3408 |
| | | | | | 3932-5958 |
| | | | | | 5960-6045 |
| | | | | | 6428-6501 |
| HKGAT94 | 283 | 762811 | AC025388 | 1962 | 1-1040 |
| | | | | | 1047-2356 |
| | | | | | 2415-3968 |
| HKGAT94 | 283 | 762811 | AL109945 | 1963 | 1-1040 |
| | | | | | 1047-2356 |
| | | | | | 2415-3968 |
| HKGAT94 | 283 | 762811 | AC022307 | 1964 | 1-1040 |
| | | | | | 1047-2356 |
| | | | | | 2415-3968 |
| HKGAT94 | 283 | 762811 | AC025388 | 1965 | 1-506 |
| HKGAT94 | 283 | 762811 | AL109945 | 1966 | 1-506 |
| HKGAT94 | 283 | 762811 | AL109945 | 1967 | 1-456 |
| HKGAT94 | 283 | 762811 | AC022307 | 1968 | 1-479 |
| HKGAT94 | 283 | 762811 | AC022307 | 1969 | 1-506 |
| HLHFR58 | 305 | 919888 | AC020749 | 1970 | 1-1006 |
| HLHFR58 | 305 | 919888 | AC020749 | 1971 | 1-336 |
| HNGBC07 | 372 | 1037631 | AL022339 | 1972 | 1-1583 |
| HNGIH43 | 380 | 410179 | AC018980 | 1973 | 1-83 |
| | | | | | 3147-4045 |
| | | | | | 4401-4443 |
| HNGIH43 | 380 | 410179 | AC018977 | 1974 | 1-604 |
| HNGIH43 | 380 | 410179 | AL356243 | 1975 | 1-83 |
| | | | | | 3146-4044 |
| | | | | | 4400-4442 |
| HNGIH43 | 380 | 410179 | AC018980 | 1976 | 1-872 |
| HNTSY18 | 409 | 1041383 | AC004877 | 1977 | 1-175 |
| | | | | | 342-474 |
| | | | | | 573-1883 |
| | | | | | 2536-2632 |
| | | | | | 2831-2894 |
| | | | | | 2999-3231 |
| | | | | | 5032-5164 |
| | | | | | 6664-6820 |
| | | | | | 7288-7881 |
| HNTSY18 | 409 | 1041383 | AC004877 | 1978 | 1-42 |
| | | | | | 1197-1333 |
| | | | | | 1575-1698 |
| | | | | | 1936-1984 |
| | | | | | 2246-2304 |
| HOEDE28 | 424 | 1036480 | AC058820 | 1979 | 1-150 |
| | | | | | 412-580 |
| | | | | | 1115-1724 |
| | | | | | 1821-2461 |
| | | | | | 2640-4410 |
| HOEDE28 | 424 | 1036480 | AC058820 | 1980 | 1-533 |
| | | | | | 676-947 |
| | | | | | 959-1251 |
| HOHBY44 | 441 | 873264 | AC074201 | 1981 | 1-5280 |
| | | | | | 5527-5989 |
| | | | | | 7392-7421 |
| HOHBY44 | 441 | 873264 | AC074201 | 1982 | 1-298 |
| HPDWP28 | 454 | 1094609 | AP000067 | 1983 | 1-818 |
| | | | | | 981-1337 |
| | | | | | 1583-1823 |
| | | | | | 2236-2371 |
| HPDWP28 | 454 | 1094609 | AP000067 | 1984 | 1-129 |
| HPICB53 | 461 | 1042309 | AC002351 | 1985 | 1-82 |
| | | | | | 959-2236 |
| HPICB53 | 461 | 1042309 | AC020997 | 1986 | 1-1329 |
| HPICB53 | 461 | 1042309 | AC002351 | 1987 | 1-115 |
| HPICB53 | 461 | 1042309 | AC020997 | 1988 | 1-201 |
| | | | | | 1064-1126 |
| | | | | | 1665-2153 |
| | | | | | 2308-3502 |
| HPJBK12 | 462 | 1011467 | AC022033 | 1989 | 1-2649 |
| HPJBK12 | 462 | 1011467 | AC013541 | 1990 | 1-2649 |
| HPJBK12 | 462 | 1011467 | AC022033 | 1991 | 1-190 |
| HPJBK12 | 462 | 1011467 | AC013541 | 1992 | 1-190 |
| HPJCL22 | 463 | 1146674 | AC037447 | 1993 | 1-102 |
| | | | | | 373-826 |
| | | | | | 995-1315 |
| | | | | | 1450-1567 |
| | | | | | 2189-2515 |
| | | | | | 2599-2778 |
| | | | | | 3138-4132 |
| | | | | | 4537-4681 |
| | | | | | 4864-4998 |
| | | | | | 5144-5324 |
| | | | | | 5394-6211 |
| | | | | | 6816-6941 |
| | | | | | 7472-7647 |
| | | | | | 7791-8885 |
| | | | | | 9056-9368 |
| | | | | | 9506-9733 |
| | | | | | 9799-10100 |
| | | | | | 10277-10988 |
| | | | | | 11213-11751 |
| | | | | | 11783-11838 |
| | | | | | 11875-12474 |
| | | | | | 12592-13077 |
| HPJCL22 | 463 | 1146674 | AC022400 | 1994 | 1-102 |
| | | | | | 373-826 |
| | | | | | 995-1315 |
| | | | | | 1450-1567 |
| | | | | | 2189-2515 |
| | | | | | 2599-2778 |
| | | | | | 3138-4132 |
| | | | | | 4537-4681 |
| | | | | | 4864-4998 |
| | | | | | 5144-5324 |
| | | | | | 5394-6211 |
| | | | | | 6816-6941 |
| | | | | | 7472-7647 |
| | | | | | 7791-8885 |
| | | | | | 9056-9368 |
| | | | | | 9506-9733 |
| | | | | | 9799-10100 |
| | | | | | 10277-10988 |
| | | | | | 11213-11751 |
| | | | | | 11783-11837 |
| | | | | | 11874-12473 |
| | | | | | 12591-13076 |
| HPJCL22 | 463 | 1146674 | AC037447 | 1995 | 1-207 |
| HPJCL22 | 463 | 1146674 | AC037447 | 1996 | 1-2124 |
| HPJCL22 | 463 | 1146674 | AC022400 | 1997 | 1-207 |
| HPJCL22 | 463 | 1146674 | AC022400 | 1998 | 1-2124 |
| | | | | | 2470-2567 |
| | | | | | 2865-2971 |
| HPJEX20 | 465 | 1352420 | AL080251 | 1999 | 1-1821 |
| HPJEX20 | 465 | 1352420 | AL139283 | 2000 | 1-1821 |
| HPJEX20 | 465 | 1352420 | AL080251 | 2001 | 1-313 |
| HPJEX20 | 465 | 1352420 | AL139283 | 2002 | 1-313 |
| HPWAY46 | 475 | 1001560 | AC019036 | 2003 | 1-1399 |
| HPWAY46 | 475 | 1001560 | AC067828 | 2004 | 1-1399 |
| HPWAY46 | 475 | 1001560 | AC019036 | 2005 | 1-788 |
| HPWAY46 | 475 | 1001560 | AC067828 | 2006 | 1-788 |
| HSAUK57 | 487 | 772554 | AC008860 | 2007 | 1-1344 |
| HSAUK57 | 487 | 772554 | AC025444 | 2008 | 1-1344 |
| HSAUK57 | 487 | 772554 | AC008860 | 2009 | 1-340 |
| HSAUK57 | 487 | 772554 | AC025444 | 2010 | 1-340 |
| HSAWD74 | 491 | 460527 | AC004951 | 2011 | 1-1651 |
| | | | | | 1740-2593 |
| HSAWD74 | 491 | 460527 | AC004951 | 2012 | 1-149 |
| HSAWD74 | 491 | 460527 | AC004951 | 2013 | 1-5057 |
| | | | | | 5082-8353 |
| | | | | | 8404-8996 |
| HSDJL42 | 503 | 1036471 | AC008676 | 2014 | 1-56 |
| | | | | | 571-2959 |
| HSLJG37 | 519 | 1016920 | AC022608 | 2015 | 1-2406 |
| HSLJG37 | 519 | 1016920 | AC022608 | 2016 | 1-53 |
| | | | | | 430-718 |
| HSLJG37 | 519 | 1016920 | AC022608 | 2017 | 1-351 |
| HSODE04 | 520 | 906081 | Z99289 | 2018 | 1-1365 |
| HSXEQ06 | 535 | 1016924 | AL390254 | 2019 | 1-159 |
| | | | | | 3226-4594 |
| | | | | | 5783-7254 |
| | | | | | 7340-7720 |
| | | | | | 8172-13712 |
| HSXEQ06 | 535 | 1016924 | AL356017 | 2020 | 1-73 |
| | | | | | 505-680 |
| | | | | | 1625-2403 |
| | | | | | 5814-5972 |
| | | | | | 9035-10403 |
| | | | | | 11592-13063 |
| | | | | | 13149-13529 |
| | | | | | 13981-19521 |
| HSXEQ06 | 535 | 1016924 | AL390254 | 2021 | 1-126 |
| HSXEQ06 | 535 | 1016924 | AL356017 | 2022 | 1-126 |
| HSXEQ06 | 535 | 1016924 | AL356017 | 2023 | 1-42 |
| | | | | | 674-828 |
| | | | | | 3271-3406 |
| | | | | | 4251-4326 |
| | | | | | 5040-5180 |
| | | | | | 7884-8230 |
| | | | | | 8404-8621 |
| | | | | | 8735-8892 |
| | | | | | 10277-10417 |
| HSYAZ50 | 539 | 1027673 | AC007378 | 2024 | 1-2471 |
| HSYAZ50 | 539 | 1027673 | AC073041 | 2025 | 1-2471 |
| HSYAZ50 | 539 | 1027673 | AC007378 | 2026 | 1-467 |
| HSYAZ50 | 539 | 1027673 | AC073041 | 2027 | 1-467 |
| HTHBG43 | 565 | 919911 | AL139257 | 2028 | 1-36 |
| | | | | | 130-201 |
| | | | | | 330-753 |
| | | | | | 1823-2214 |
| | | | | | 2331-2440 |
| | | | | | 2728-2834 |
| | | | | | 2920-3028 |
| | | | | | 3370-3514 |
| | | | | | 4153-5236 |
| | | | | | 5877-6744 |
| | | | | | 6813-7124 |
| | | | | | 8441-9280 |
| | | | | | 9527-9953 |
| | | | | | 10394-10536 |
| | | | | | 10945-11362 |
| | | | | | 11763-11843 |
| | | | | | 12653-12953 |
| | | | | | 13970-14183 |
| | | | | | 14223-14726 |
| | | | | | 15929-16299 |
| | | | | | 16328-16751 |
| | | | | | 17791-18093 |
| | | | | | 18095-18712 |
| | | | | | 18754-24628 |
| | | | | | 24879-25426 |
| HTHBG43 | 565 | 919911 | AL139257 | 2029 | 1-286 |
| HTHCA18 | 566 | 908144 | AP002439 | 2030 | 1-1800 |
| HTHCA18 | 566 | 908144 | AP002505 | 2031 | 1-1776 |
| HTHCA18 | 566 | 908144 | AP002439 | 2032 | 1-110 |
| HTHCA18 | 566 | 908144 | AP002505 | 2033 | 1-110 |
| HTJML75 | 570 | 1040047 | AC025036 | 2034 | 1-148 |
| HTJML75 | 570 | 1040047 | AC022232 | 2035 | 1-152 |
| HTJML75 | 570 | 1040047 | AC022231 | 2036 | 1-151 |
| HTJML75 | 570 | 1040047 | AC010694 | 2037 | 1-202 |
| HTJML75 | 570 | 1040047 | AC027300 | 2038 | 1-158 |
| HTJML75 | 570 | 1040047 | AC011953 | 2039 | 1-126 |
| HTJML75 | 570 | 1040047 | AC010694 | 2040 | 1-77 |
| HTLIV19 | 579 | 1046341 | AC055750 | 2041 | 1-964 |
| HTLIV19 | 579 | 1046341 | AC027463 | 2042 | 1-964 |
| HTLIV19 | 579 | 1046341 | AC055750 | 2043 | 1-236 |
| HTLIV19 | 579 | 1046341 | AC027463 | 2044 | 1-236 |
| HTOIZ02 | 588 | 826312 | AC023146 | 2045 | 1-2101 |
| | | | | | 3106-3722 |
| HTOIZ02 | 588 | 826312 | AC023146 | 2046 | 1-278 |
| HVARW53 | 609 | 1194812 | AC011298 | 2047 | 1-648 |
| | | | | | 1184-3022 |
| | | | | | 3943-4047 |
| | | | | | 5961-6504 |
| HVARW53 | 609 | 1194812 | AC011298 | 2048 | 1-397 |

[0104] Tables 1D: The polynucleotides or polypeptides, or agonists or antagonists of the present invention can be used in assays to test for one or more biological activities. If these polynucleotides and polypeptides do exhibit activity in a particular assay, it is likely that these molecules may be involved in the diseases associated with the biological activity. Thus, the polynucleotides or polypeptides, or agonists or antagonists could be used to treat the associated disease.

[0105] The present invention encompasses methods of detecting, preventing, diagnosing, prognosticating, treating, and/or ameliorating a disease or disorder. In preferred embodiments, the present invention encompasses a method of treating cancer and other hyperproliferative disorders comprising administering to a patient in which such detection, treatment, prevention, and/or amelioration is desired a protein, nucleic acid, or antibody of the invention (or fragment or variant thereof) in an amount effective to detect, prevent, diagnose, prognosticate, treat, and/or ameliorate the cancer and other hyperproliferative disorders.

[0106] In another embodiment, the present invention also encompasses methods of detecting, preventing, diagnosing, prognosticating, treating, and/or ameliorating cancer and other hyperproliferative disorders; comprising administering to a patient combinations of the proteins, nucleic acids, or antibodies of the invention (or fragments or variants thereof), sharing similar indications as shown in the corresponding rows in Column 3 of Table 1D.

[0107] Table 1D provides information related to biological activities for polynucleotides and polypeptides of the invention (including antibodies, agonists, and/or antagonists thereof). Table 1D also provides information related to assays which may be used to test polynucleotides and polypeptides of the invention (including antibodies, agonists, and/or antagonists thereof) for the corresponding biological activities. The first column (“Gene No.”) provides the gene number in the application for each clone identifier. The second column (“cDNA Clone ID:”) provides the unique clone identifier for each clone as previously described and indicated in Table 1A through Table 1D. The third column (“AA SEQ ID NO:Y”) indicates the Sequence Listing SEQ ID Number for polypeptide sequences encoded by the corresponding cDNA clones (also as indicated in Tables 1A, Table 1B, and Table 2). The fourth column (“Biological Activity”) indicates a biological activity corresponding to the indicated polypeptides (or polynucleotides encoding said polypeptides). The fifth column (“Exemplary Activity Assay”) further describes the corresponding biological activity and also provides information pertaining to the various types of assays which may be performed to test, demonstrate, or quantify the corresponding biological activity.

[0108] Table 1D describes the use of, inter alia, FMAT technology for testing or demonstrating various biological activities. Fluorometric microvolume assay technology (FMAT) is a fluorescence-based system which provides a means to perform nonradioactive cell- and bead-based assays to detect activation of cell signal transduction pathways. This technology was designed specifically for ligand binding and immunological assays. Using this technology, fluorescent cells or beads at the bottom of the well are detected as localized areas of concentrated fluorescence using a data processing system. Unbound flurophore comprising the background signal is ignored, allowing for a wide variety of homogeneous assays. FMAT technology may be used for peptide ligand binding assays, immunofluorescence, apoptosis, cytotoxicity, and bead-based immunocapture assays. See, Miraglia S et. al., “Homogeneous cell and bead based assays for highthroughput screening using flourometric microvolume assay technology,” Journal of Biomolecular Screening; 4:193-204 (1999). In particular, FMAT technology may be used to test, confirm, and/or identify the ability of polypeptides (including polypeptide fragments and variants) to activate signal transduction pathways. For example, FMAT technology may be used to test, confirm, and/or identify the ability of polypeptides to upregulate production of immunomodulatory proteins (such as, for example, interleukins, GM-CSF, Rantes, and Tumor Necrosis factors, as well as other cellular regulators (e.g. insulin)).

[0109] Table 1D also describes the use of kinase assays for testing, demonstrating, or quantifying biological activity. In this regard, the phosphorylation and de-phosphorylation of specific amino acid residues (e.g. Tyrosine, Serine, Threonine) on cell-signal transduction proteins provides a fast, reversible means for activation and de-activation of cellular signal transduction pathways. Moreover, cell signal transduction via phosphorylation/de-phosphorylation is crucial to the regulation of a wide variety of cellular processes (e.g. proliferation, differentiation, migration, apoptosis, etc.). Accordingly, kinase assays provide a powerful tool useful for testing, confirming, and/or identifying polypeptides (including polypeptide fragments and variants) that mediate cell signal transduction events via protein phosphorylation. See e.g., Forrer, P., Tamaskovic R., and Jaussi, R. “Enzyme-Linked Immunosorbent Assay for Measurement of JNK, ERK, and p38 Kinase Activities” Biol. Chem. 379(8-9): 1101-1110 (1998).

LENGTHY TABLE REFERENCED HERE
US20070015696A1-20070118-T00002
Please refer to the end of the specification for access instructions.

Table 1E

[0110] Polynucleotides encoding polypeptides of the present invention can be used in assays to test for one or more biological activities. One such biological activity which may be tested includes the ability of polynucleotides and polypeptides of the invention to stimulate up-regulation or down-regulation of expression of particular genes and proteins. Hence, if polynucleotides and polypeptides of the present invention exhibit activity in altering particular gene and protein expression patterns, it is likely that these polynucleotides and polypeptides of the present invention may be involved in, or capable of effecting changes in, diseases associated with the altered gene and protein expression profiles. Hence, polynucleotides, polypeptides, or antibodies of the present invention could be used to treat said associated diseases.

[0111] TaqMan® assays may be performed to assess the ability of polynucleotides (and polypeptides they encode) to alter the expression pattern of particular “target” genes. TaqMan® reactions are performed to evaluate the ability of a test agent to induce or repress expression of specific genes in different cell types. TaqMan® gene expression quantification assays (“TaqMan® assays”) are well known to, and routinely performed by, those of ordinary skill in the art. TaqMan® assays are performed in a two step reverse transcription/polymerase chain reaction (RT-PCR). In the first (RT) step, cDNA is reverse transcribed from total RNA samples using random hexamer primers. In the second (PCR) step, PCR products are synthesized from the cDNA using gene specific primers.

[0112] To quantify gene expression the Taqman® PCR reaction exploits the 5′ nuclease activity of AmpliTaq Gold® DNA Polymerase to cleave a Taqman® probe (distinct from the primers) during PCR. The Taqman® probe contains a reporter dye at the 5′-end of the probe and a quencher dye at the 3′ end of the probe. When the probe is intact, the proximity of the reporter dye to the quencher dye results in suppression of the reporter fluorescence. During PCR, if the target of interest is present, the probe specifically anneals between the forward and reverse primer sites. AmpliTaq Fold DNA Polymerase then cleaves the probe between the reporter and quencher when the probe hybridizes to the target, resulting in increased fluorescence of the reporter (see FIG. 2). Accumulation of PCR products is detected directly by monitoring the increase in fluorescence of the reporter dye.

[0113] After the probe fragments are displaced from the target, polymerization of the strand continues. The 3′-end of the probe is blocked to prevent extension of the probe during PCR. This process occurs in every cycle and does not interfere with the exponential accumulation of product. The increase in fluorescence signal is detected only if the target sequence is complementary to the probe and is amplified during PCR. Because of these requirements, any nonspecific amplification is not detected.

[0114] For test sample preparation, vector controls or constructs containing the coding sequence for the gene of interest are transfected into cells, such as for example 293T cells, and supernatants collected after 48 hours. For cell treatment and RNA isolation, multiple primary human cells or human cell lines are used; such cells may include but are not limited to, Normal Human Dermal Fibroblasts, Aortic Smooth Muscle, Human Umbilical Vein Endothelial Cells, HepG2, Daudi, Jurkat, U937, Caco, and THP-1 cell lines. Cells are plated in growth media and growth is arrested by culturing without media change for 3 days, or by switching cells to low serum media and incubating overnight. Cells are treated for 1, 6, or 24 hours with either vector control supernatant or sample supernatant (or purified/partially purified protein preparations in buffer). Total RNA is isolated; for example, by using Trizol extraction or by using the Ambion RNAqueous®-4PCR RNA isolation system. Expression levels of multiple genes are analyzed using TAQMAN, and expression in the test sample is compared to control vector samples to identify genes induced or repressed. Each of the above described techniques are well known to, and routinely performed by, those of ordinary skill in the art.

[0115] Table 1E indicates particular disease classes and preferred indications for which polynucleotides, polypeptides, or antibodies of the present invention may be used in detecting, diagnosing, preventing, treating and/or ameliorating said diseases and disorders based on “target” gene expression patterns which may be up- or down-regulated by polynucleotides (and the encoded polypeptides) corresponding to each indicated cDNA Clone ID (shown in Table 1E, Column 2).

[0116] Thus, in preferred embodiments, the present invention encompasses a method of detecting, diagnosing, preventing, treating, and/or ameliorating a disease or disorder listed in the “Disease Class” and/or “Preferred Indication” columns of Table 1E; comprising administering to a patient in which such detection, diagnosis, prevention, or treatment is desired a protein, nucleic acid, or antibody of the invention (or fragment or variant thereof) in an amount effective to detect, diagnose, prevent, treat, or ameliorate the disease or disorder. The first and second columns of Table 1D show the “Gene No.” and “cDNA Clone ID No.”, respectively, indicating certain nucleic acids and proteins (or antibodies against the same) of the invention (including polynucleotide, polypeptide, and antibody fragments or variants thereof) that may be used in detecting, diagnosing, preventing, treating, or ameliorating the disease(s) or disorder(s) indicated in the corresponding row in the “Disease Class” or “Preferred Indication” Columns of Table 1E.

[0117] In another embodiment, the present invention also encompasses methods of detecting, diagnosing, preventing, treating, or ameliorating a disease or disorder listed in the “Disease Class” or “Preferred Indication” Columns of Table 1E; comprising administering to a patient combinations of the proteins, nucleic acids, or antibodies of the invention (or fragments or variants thereof), sharing similar indications as shown in the corresponding rows in the “Disease Class” or “Preferred Indication” Columns of Table 1E.

[0118] The “Disease Class” Column of Table 1E provides a categorized descriptive heading for diseases, disorders, and/or conditions (more fully described below) that may be detected, diagnosed, prevented, treated, or ameliorated by a protein, nucleic acid, or antibody of the invention (or fragment or variant thereof).

[0119] The “Preferred Indication” Column of Table 1E describes diseases, disorders, and/or conditions that may be detected, diagnosed, prevented, treated, or ameliorated by a protein, nucleic acid, or antibody of the invention (or fragment or variant thereof).

[0120] The “Cell Line” and “Exemplary Targets” Columns of Table 1E indicate particular cell lines and target genes, respectively, which may show altered gene expression patterns (i.e., up- or down-regulation of the indicated target gene) in Taqman assays, performed as described above, utilizing polynucleotides of the cDNA Clone ID shown in the corresponding row. Alteration of expression patterns of the indicated “Exemplary Target” genes is correlated with a particular “Disease Class” and/or “Preferred Indication” as shown in the corresponding row under the respective column headings.

[0121] The “Exemplary Accessions” Column indicates GenBank Accessions (available online through the National Center for Biotechnology Information (NCBI) at http://www.ncbi.nlm.nih.gov/) which correspond to the “Exemplary Targets” shown in the adjacent row.

[0122] The recitation of “Cancer” in the “Disease Class” Column indicates that the corresponding nucleic acid and protein, or antibody against the same, of the invention (or fragment or variant thereof) may be used for example, to detect, diagnose, prevent, treat, and/or ameliorate neoplastic diseases and/or disorders (e.g., leukemias, cancers, etc., as described below under “Hyperproliferative Disorders”).

[0123] The recitation of “Immune” in the “Disease Class” column indicates that the corresponding nucleic acid and protein, or antibody against the same, of the invention (or fragment or variant thereof), may be used for example, to detect, diagnose, prevent, treat, and/or ameliorate diseases and/or disorders relating to neoplastic diseases (e.g., as described below under “Hyperproliferative Disorders”), blood disorders (e.g., as described below under “Immune Activity” “Cardiovascular Disorders” and/or “Blood-Related Disorders”), and infections (e.g., as described below under “Infectious Disease”).

[0124] The recitation of “Angiogenesis” in the “Disease Class” column indicates that the corresponding nucleic acid and protein, or antibody against the same, of the invention (or fragment or variant thereof), may be used for example, to detect, diagnose, treat, prevent, and/or ameliorate diseases and/or disorders relating to neoplastic diseases (e.g., as described below under “Hyperproliferative Disorders”), diseases and/or disorders of the cardiovascular system (e.g., as described below under “Cardiovascular Disorders”), diseases and/or disorders involving cellular and genetic abnormalities (e.g., as described below under “Diseases at the Cellular Level”), diseases and/or disorders involving angiogenesis (e.g., as described below under “Anti-Angiogenesis Activity”), to promote or inhibit cell or tissue regeneration (e.g., as described below under “Regeneration”), or to promote wound healing (e.g., as described below under “Wound Healing and Epithelial Cell Proliferation”).

[0125] The recitation of “Diabetes” in the “Disease Class” column indicates that the corresponding nucleic acid and protein, or antibody against the same, of the invention (or fragment or variant thereof), may be used for example, to detect, diagnose, treat, prevent, and/or ameliorate diabetes (including diabetes mellitus types I and II), as well as diseases and/or disorders associated with, or consequential to, diabetes (e.g. as described below under “Endocrine Disorders,” “Renal Disorders,” and “Gastrointestinal Disorders”).

TABLE 1E

| Gene No. | cDNA Clone ID | Disease Class | Preferred Indications | Cell Line | Exemplary Targets | Exemplary Accessions |
|---|---|---|---|---|---|---|
| 13 | HAGDG59 | Angiogenesis | Highly preferred indications include diagnosis, prevention, treatment, | AOSMC | Vegf1 | gb\|AF024710\| |
| | | | and/or amelioration of diseases and disorders involving angiogenesis, | | | AF024710 |
| | | | wound healing, neoplasia (particularly including, but not limited to, | | | |
| | | | tumor metastases), and cardiovascular diseases and disorders; as | | | |
| | | | described herein under the headings “Hyperproliferative Disorders,” | | | |
| | | | “Regeneration,” “Anti-Angiogenesis Activity,” “Diseases at the | | | |
| | | | Cellular Level,” and “Wound Healing and Epithelial Cell | | | |
| | | | Proliferation.” (AOSMC cells are aortic smooth muscle cells). | | | |
| 13 | HAGDG59 | Angiogenesis | Highly preferred indications include diagnosis, prevention, treatment, | HEK293 | TSP-1 | gb\|X04665\|HSTHROMR |
| | | | and/or amelioration of diseases and disorders involving angiogenesis, | | | |
| | | | wound healing, neoplasia (particularly including, but not limited to, | | | |
| | | | tumor metastases), and cardiovascular diseases and disorders; as | | | |
| | | | described herein under the headings “Hyperproliferative Disorders,” | | | |
| | | | “Regeneration,” “Anti-Angiogenesis Activity,” “Diseases at the | | | |
| | | | Cellular Level,” and “Wound Healing and Epithelial Cell | | | |
| | | | Proliferation.” (The HEK293 cell line is a human embryonal kidney | | | |
| | | | epithelial cell line available through the ATCC as cell line number CRL-1573). | | | |
| 13 | HAGDG59 | Angiogenesis | Highly preferred indications include diagnosis, prevention, treatment, | HUVEC | Vegf1 | gb\|AF024710\| |
| | | | and/or amelioration of diseases and disorders involving angiogenesis, | | | AF024710 |
| | | | wound healing, neoplasia (particularly including, but not limited to, | | | |
| | | | tumor metastases), and cardiovascular diseases and disorders; as | | | |
| | | | described herein under the headings “Hyperproliferative Disorders,” | | | |
| | | | “Regeneration,” “Anti-Angiogenesis Activity,” “Diseases at the | | | |
| | | | Cellular Level,” and “Wound Healing and Epithelial Cell | | | |
| | | | Proliferation.” (HUVEC cells are human umbilical vein endothelial cells). | | | |
| 13 | HAGDG59 | Angiogenesis | Highly preferred indications include diagnosis, prevention, treatment, | SK-N-MC | Cycloox | gb\|AF024710\| |
| | | | and/or amelioration of diseases and disorders involving angiogenesis, | neuroblastoma | Vegf1 | AF024710 |
| | | | wound healing, neoplasia (particularly including, but not limited to, | | | |
| | | | tumor metastases), and cardiovascular diseases and disorders; as | | | |
| | | | described herein under the headings “Hyperproliferative Disorders,” | | | |
| | | | “Regeneration,” “Anti-Angiogenesis Activity,” “Diseases at the | | | |
| | | | Cellular Level,” and “Wound Healing and Epithelial Cell | | | |
| | | | Proliferation.” (The SK-N-MC neuroblastoma cell line is a cell line | | | |
| | | | derived from human brain tissue available through the ATCC as cell line number HTB-10). | | | |
| 13 | HAGDG59 | Cancer | Highly preferred indications include neoplastic diseases (e.g. cancer) | Caco-2 | M1 RIBO R | gb\|X59543\|HSRIREM1 |
| | | | such as described herein under the heading “Hyperproliferative | | p53 | gb\|X60011\|HSP53002 |
| | | | Disordersî (particularly including, but not limited to, cancer involving | | TAA6 | gb\|I34297\|I34297 |
| | | | cells of the gastrointestinal tract). Highly preferred embodiments of | | | |
| | | | the invention include methods of preventing, detecting, diagnosing, | | | |
| | | | treating and/or ameliorating cancer and hyperproliferative disorders | | | |
| | | | involving the gastrointestinal tract. (The Caco-2 cell line is a human | | | |
| | | | colorectal adenocarcinoma cell line available through the ATCC as cell line number | | | |
| | | | HTB-37). | | | |
| 13 | HAGDG59 | Cancer | Highly preferred indications include neoplastic diseases (e.g. cancer) | HUVEC | bcl-2 | gb\|X06487\|HSBCL2IG |
| | | | such as described herein under the heading “Hyperproliferative | | Cyclin D | gb\|BC000076\| |
| | | | Disordersî (particularly including, but not limited to, cancers involving | | | BC000076 |
| | | | endothelial cells). Highly preferred embodiments of the invention | | | |
| | | | include methods of preventing, detecting, diagnosing, treating and/or | | | |
| | | | ameliorating cancer and hyperproliferative disorders involving | | | |
| | | | endothelial cells. (HUVEC cells are human umbilical vein endothelial cells). | | | |
| 13 | HAGDG59 | Cancer | Highly preferred indications include neoplastic diseases (e.g. cancer) | SK-N-MC | Bax | gb\|AF250190\| |
| | | | such as described herein under the heading “Hyperproliferative | neuroblastoma | bcl-2 | AF250190 |
| | | | Disordersî (particularly including, but not limited to cancers involving | | Cyclin D | gb\|X06487\|HSBCL2IG |
| | | | cells of the brain/central nervous system (e.g. neural epithelium)). | | | gb\|BC000076\| |
| | | | Highly preferred embodiments of the invention include methods of | | | BC000076 |
| | | | preventing, detecting, diagnosing, treating and/or ameliorating cancer | | | |
| | | | and hyperproliferative disorders involving the brain or central nervous | | | |
| | | | system. (The SK-N-MC neuroblastoma cell line is a cell line derived | | | |
| | | | from human brain tissue available through the ATCC as cell line | | | |
| | | | number HTB-10). | | | |
| 13 | HAGDG59 | Cancer | Highly preferred indications include neoplastic diseases (e.g. cancer) | U937 | beta- | gb\|AR034832\| |
| | | | such as described herein under the heading “Hyperproliferative | | catenin | AR034832 |
| | | | Disordersî (particularly including, but not limited to, cancers of | | Cyclin D3 | gb\|V00507\|HSDHFR |
| | | | immune cells, such as monocytes). Highly preferred embodiments of | | DHFR | gb\|X59543\|HSRIREM1 |
| | | | the invention include methods of preventing, detecting, diagnosing, | | M1 RIBO R | |
| | | | treating and/or ameliorating cancer and hyperproliferative disorders | | | |
| | | | involving cells of the immune system (such as monocytes). (The U-937 | | | |
| | | | cell line is a human monocyte cell line available through the ATCC as | | | |
| | | | cell line number CRL-1593.2) | | | |
| 13 | HAGDG59 | Immune | Highly preferred indications include immunological disorders such as | AOSMC | CIS3 | gb\|AB006967\| |
| | | | described herein under the heading “Immune Activity” and/or “Blood- | | GATA1 | AB006967 |
| | | | Related Disorders” (particularly including, but not limited to, immune | | IL1B | gb\|X17254\|HSERYF1 |
| | | | disorders involving muscle tissues and the cardiovascular system (e.g. | | | gb\|X02532\|HSIL1BR |
| | | | heart, lungs, circulatory system)). Highly preferred embodiments of | | | |
| | | | the invention include methods of preventing, detecting, diagnosing, | | | |
| | | | treating and/or ameliorating disorders of the immune system | | | |
| | | | (particularly including, but not limited to, immune disorders involving | | | |
| | | | muscle tissue or the cardiovascular system). (AOSMC cells are | | | |
| | | | human aortic smooth muscle cells). | | | |
| 13 | HAGDG59 | Immune | Highly preferred indications include immunological disorders such as | Caco-2 | TNF | gb\|AJ270944\| |
| | | | described herein under the heading “Immune Activity” and/or “Blood- | | | HSA27094 |
| | | | Related Disorders” (particularly including, but not limited to, immune | | | |
| | | | disorders involving the cells of the gastrointestinal tract). Highly | | | |
| | | | preferred embodiments of the invention include methods of | | | |
| | | | preventing, detecting, diagnosing, treating and/or ameliorating | | | |
| | | | disorders of the immune system (particularly including, but not limited | | | |
| | | | to, immune disorders involving cells of the gastrointestinal tract). (The | | | |
| | | | Caco-2 cell line is a human colorectal adenocarcinoma cell line | | | |
| | | | available through the ATCC as cell line number HTB-37). | | | |
| 13 | HAGDG59 | Immune | Highly preferred indications include immunological disorders such as | HEK293 | GATA3 | gb\|X55037\|HSGATA3 |
| | | | described herein under the heading “Immune Activity” and/or “Blood- | | | |
| | | | Related Disorders” (particularly including, but not limited to, immune | | | |
| | | | disorders involving epithelial cells or the renal system). Highly | | | |
| | | | preferred embodiments of the invention include methods of | | | |
| | | | preventing, detecting, diagnosing, treating and/or ameliorating | | | |
| | | | disorders of the immune system (particularly including, but not limited | | | |
| | | | to, immune disorders involving epithelial cells or the renal system). | | | |
| | | | (The 293 cell line is a human embryonal kidney epithelial cell line | | | |
| | | | available through the ATCC as cell line number CRL-1573). | | | |
| 13 | HAGDG59 | Immune | Highly preferred indications include immunological disorders such as | HUVEC | CD30 | gb\|X12705\|HSBCDFIA |
| | | | described herein under the heading “Immune Activity” and/or “Blood- | | HLA-c | gb\|AJ270944\| |
| | | | Related Disorders” (particularly including, but not limited to, immune | | IL5 | HSA27094 |
| | | | disorders involving endothelial cells). Highly preferred embodiments | | TNF | |
| | | | of the invention include methods of preventing, detecting, diagnosing, | | | |
| | | | treating and/or ameliorating disorders of the immune system | | | |
| | | | (particularly including, but not limited to, immune disorders involving | | | |
| | | | endothelial cells). (HUVEC cells are human umbilical vein endothelial cells). | | | |
| 13 | HAGDG59 | Immune | Highly preferred indications include immunological disorders such as | Jurkat | Rag1 | gb\|M29474\|HUMRAG1 |
| | | | described herein under the heading “Immune Activity” and/or “Blood- | | TNF | gb\|AJ270944\| |
| | | | Related Disorders” (particularly including, but not limited to, immune | | | HSA27094 |
| | | | disorders involving T-cells). Highly preferred embodiments of the | | | |
| | | | invention include methods of preventing, detecting, diagnosing, | | | |
| | | | treating and/or ameliorating disorders of the immune system | | | |
| | | | (particularly including, but not limited to, immune disorders involving | | | |
| | | | T-cells). (The Jurkat cell line is a human T lymphocyte cell line | | | |
| | | | available through the ATCC as cell line number TIB-152). | | | |
| 13 | HAGDG59 | Immune | Highly preferred indications include immunological disorders such as | Liver | LTBR | gb\|AK027080\| |
| | | | described herein under the heading “Immune Activity” and/or “Blood- | | | AK027080 |
| | | | Related Disorders” (particularly including, but not limited to, immune | | | |
| | | | disorders involving cells of the hepatic system). Highly preferred | | | |
| | | | embodiments of the invention include methods of preventing, | | | |
| | | | detecting, diagnosing, treating and/or ameliorating disorders of the | | | |
| | | | immune system (particularly including, but not limited to, immune | | | |
| | | | disorders involving cells of the hepatic system). | | | |
| 13 | HAGDG59 | Immune | Highly preferred indications include immunological disorders such as | SK-N-MC | CIS3 | gb\|AB006967\| |
| | | | described herein under the heading “Immune Activity” and/or “Blood- | neuroblastoma | GATA1 | AB006967 |
| | | | Related Disorders” (particularly including, but not limited to, immune | | HLA-c | gb\|X17254\|HSERYF1 |
| | | | disorders involving the central nervous system). Highly preferred | | | |
| | | | embodiments of the invention include methods of preventing, | | | |
| | | | detecting, diagnosing, treating and/or ameliorating disorders of the | | | |
| | | | immune system (particularly including, but not limited to, immune | | | |
| | | | disorders involving the central nervous sytem). (The SK-N-MC | | | |
| | | | neuroblastoma cell line is a cell line derived from human brain tissue | | | |
| | | | and is available through the ATCC as cell line number HTB-10). | | | |
| 13 | HAGDG59 | Immune | Highly preferred indications include immunological disorders such as | T-cell- | CD40 | gb\|AJ300189\| |
| | | | described herein under the heading “Immune Activity” and/or “Blood- | Mar. 31, 2000 | Granzyme B | HSA30018 |
| | | | Related Disorders” (particularly including, but not limited to, immune | | | gb\|J04071\|HUMCSE |
| | | | disorders involving T-cells). Highly preferred embodiments of the | | | |
| | | | invention include methods of preventing, detecting, diagnosing, | | | |
| | | | treating and/or ameliorating disorders of the immune system | | | |
| | | | (particularly including, but not limited to, immune disorders involving T-cells). | | | |
| 13 | HAGDG59 | Immune | Highly preferred indications include immunological disorders such as | U937 | CD69 | gb\|Z22576\|HSCD69GNA |
| | | | described herein under the heading “Immune Activity” and/or “Blood- | | TNF | gb\|AJ270944\| |
| | | | Related Disorders” (particularly including, but not limited to, immune | | | HSA27094 |
| | | | disorders involving monocytes). Highly preferred embodiments of the | | | |
| | | | invention include methods of preventing, detecting, diagnosing, | | | |
| | | | treating and/or ameliorating disorders of the immune system | | | |
| | | | (particularly including, but not limited to, immune disorders involving | | | |
| | | | monocytes). (The U937 cell line is a human monocyte cell line | | | |
| | | | available through the ATCC as cell line number CRL-1593.2). | | | |
| 79 | HCHNF25 | Angiogenesis | Highly preferred indications include diagnosis, prevention, treatment, | Caco-2 | ICAM | gb\|X06990\|HSICAM1 |
| | | | and/or amelioration of diseases and disorders involving angiogenesis, | | VCAM | gb\|A30922\|A30922 |
| | | | wound healing, neoplasia (particularly including, but not limited to, | | | |
| | | | tumor metastases), and cardiovascular diseases and disorders; as | | | |
| | | | described herein under the headings “Hyperproliferative Disorders,” | | | |
| | | | “Regeneration,” “Anti-Angiogenesis Activity,” “Diseases at the | | | |
| | | | Cellular Level,” and “Wound Healing and Epithelial Cell | | | |
| | | | Proliferation.” (The Caco-2 cell line is a human colorectal | | | |
| | | | adenocarcinoma cell line available through the ATCC as cell line | | | |
| | | | number HTB-37). | | | |
| 79 | HCHNF25 | Angiogenesis | Highly preferred indications include diagnosis, prevention, treatment, | Daudi | Vegf1 | gb\|AF024710\| |
| | | | and/or amelioration of diseases and disorders involving angiogenesis, | | | AF024710 |
| | | | wound healing, neoplasia (particularly including, but not limited to, | | | |
| | | | tumor metastases), and cardiovascular diseases and disorders; as | | | |
| | | | described herein under the headings “Hyperproliferative Disorders,” | | | |
| | | | “Regeneration,” “Anti-Angiogenesis Activity,” “Diseases at the | | | |
| | | | Cellular Level,” and “Wound Healing and Epithelial Cell | | | |
| | | | Proliferation.” (The Daudi cell line is a human B lymphoblast cell line | | | |
| | | | available through the ATCC as cell line number CCL-213). | | | |
| 79 | HCHNF25 | Angiogenesis | Highly preferred indications include diagnosis, prevention, treatment, | HUVEC | Vegf1 | gb\|AF024710\| |
| | | | and/or amelioration of diseases and disorders involving angiogenesis, | | | AF024710 |
| | | | wound healing, neoplasia (particularly including, but not limited to, | | | |
| | | | tumor metastases), and cardiovascular diseases and disorders; as | | | |
| | | | described herein under the headings “Hyperproliferative Disorders,” | | | |
| | | | “Regeneration,” “Anti-Angiogenesis Activity,” “Diseases at the | | | |
| | | | Cellular Level,” and “Wound Healing and Epithelial Cell | | | |
| | | | Proliferation.” (HUVEC cells are human umbilical vein endothelial cells). | | | |
| 79 | HCHNF25 | Angiogenesis | Highly preferred indications include diagnosis, prevention, treatment, | Jurkat | VCAM | gb\|A30922\|A30922 |
| | | | and/or amelioration of diseases and disorders involving angiogenesis, | | | |
| | | | wound healing, neoplasia (particularly including, but not limited to, | | | |
| | | | tumor metastases), and cardiovascular diseases and disorders; as | | | |
| | | | described herein under the headings “Hyperproliferative Disorders,” | | | |
| | | | “Regeneration,” “Anti-Angiogenesis Activity,” “Diseases at the | | | |
| | | | Cellular Level,” and “Wound Healing and Epithelial Cell | | | |
| | | | Proliferation.” (The Jurkat cell line is a human T lymphocyte cell line | | | |
| | | | available through the ATCC as cell line number TIB-152). | | | |
| 79 | HCHNF25 | Angiogenesis | Highly preferred indications include diagnosis, prevention, treatment, | NHDF | PAI | gb\|X12701\|HSENDPAI |
| | | | and/or amelioration of diseases and disorders involving angiogenesis, | | | |
| | | | wound healing, neoplasia (particularly including, but not limited to, | | | |
| | | | tumor metastases), and cardiovascular diseases and disorders; as | | | |
| | | | described herein under the headings “Hyperproliferative Disorders,” | | | |
| | | | “Regeneration,” “Anti-Angiogenesis Activity,” “Diseases at the | | | |
| | | | Cellular Level,” and “Wound Healing and Epithelial Cell | | | |
| | | | Proliferation.” (NHDF cells are normal human dermal fibroblasts). | | | |
| 79 | HCHNF25 | Angiogenesis | Highly preferred indications include diagnosis, prevention, treatment, | THP1 | Vegf1 | gb\|AF024710\| |
| | | | and/or amelioration of diseases and disorders involving angiogenesis, | | | AF024710 |
| | | | wound healing, neoplasia (particularly including, but not limited to, | | | |
| | | | tumor metastases), and cardiovascular diseases and disorders; as | | | |
| | | | described herein under the headings “Hyperproliferative Disorders,” | | | |
| | | | “Regeneration,” “Anti-Angiogenesis Activity,” “Diseases at the | | | |
| | | | Cellular Level,” and “Wound Healing and Epithelial Cell | | | |
| | | | Proliferation.” (The THP-1 cell line is a human monocyte cell line | | | |
| | | | available through the ATCC as cell line number TIB-202). | | | |
| 79 | HCHNF25 | Angiogenesis | Highly preferred indications include diagnosis, prevention, treatment, | U937 | VCAM | gb\|A30922\|A30922 |
| | | | and/or amelioration of diseases and disorders involving angiogenesis, | | | |
| | | | wound healing, neoplasia (particularly including, but not limited to, | | | |
| | | | tumor metastases), and cardiovascular diseases and disorders; as | | | |
| | | | described herein under the headings “Hyperproliferative Disorders,” | | | |
| | | | “Regeneration,” “Anti-Angiogenesis Activity,” “Diseases at the | | | |
| | | | Cellular Level,” and “Wound Healing and Epithelial Cell | | | |
| | | | Proliferation.” (The U937 cell line is a human monocyte cell line | | | |
| | | | available through the ATCC as cell line number CRL-1593.2). | | | |
| 79 | HCHNF25 | Cancer | Highly preferred indications include neoplastic diseases (e.g. cancer) | AOSMC | Cyclin D2 | gb\|X68452\|HSCYCD2 |
| | | | such as described herein under the heading “Hyperproliferative | | | |
| | | | Disordersî (particularly including, but not limited to, cancers of muscle | | | |
| | | | tissues and the cardiovascular system (e.g. heart, lungs, circulatory | | | |
| | | | system)). Highly preferred embodiments of the invention include | | | |
| | | | methods of preventing, detecting, diagnosing, treating and/or | | | |
| | | | ameliorating cancer and hyperproliferative disorders. (AOSMC cells | | | |
| | | | are aortic smooth muscle cells). | | | |
| 79 | HCHNF25 | Cancer | Highly preferred indications include neoplastic diseases (e.g. cancer) | Caco-2 | c-fos | gb\|BC004490\| |
| | | | such as described herein under the heading “Hyperproliferative | | U66469 | BC004490 |
| | | | Disordersî (particularly including, but not limited to, cancer involving | | p53 | |
| | | | cells of the gastrointestinal tract). Highly preferred embodiments of | | regulated | |
| | | | the invention include methods of preventing, detecting, diagnosing, | | gene | |
| | | | treating and/or ameliorating cancer and hyperproliferative disorders | | | |
| | | | involving the gastrointestinal tract. (The Caco-2 cell line is a human | | | |
| | | | colorectal adenocarcinoma cell line available through the ATCC as | | | |
| | | | cell line number HTB-37). | | | |
| 79 | HCHNF25 | Cancer | Highly preferred indications include neoplastic diseases (e.g. cancer) | Daudi | Cyclin A1 | gb\|U97680\|HSU97680 |
| | | | such as described herein under the heading “Hyperproliferative | | | |
| | | | Disordersî (particularly including, but not limited to, cancers of | | | |
| | | | immune cells, such as B-cells). Highly preferred embodiments of the | | | |
| | | | invention include methods of preventing, detecting, diagnosing, | | | |
| | | | treating and/or ameliorating cancer and hyperproliferative disorders | | | |
| | | | involving immune cells (such as B-cells). (The Daudi cell line is a | | | |
| | | | human B lymphoblast cell line available through the ATCC as cell line | | | |
| | | | number CCL-213). | | | |
| 79 | HCHNF25 | Cancer | Highly preferred indications include neoplastic diseases (e.g. cancer) | HUVEC | Cyclin A1 | gb\|U97680\|HSU97680 |
| | | | such as described herein under the heading “Hyperproliferative | | Cyclin D | gb\|BC000076\| |
| | | | Disordersî (particularly including, but not limited to, cancers involving | | Cyclin D2 | BC000076 |
| | | | endothelial cells). Highly preferred embodiments of the invention | | | gb\|X68452\|HSCYCD2 |
| | | | include methods of preventing, detecting, diagnosing, treating and/or | | | |
| | | | ameliorating cancer and hyperproliferative disorders involving | | | |
| | | | endothelial cells. (HUVEC cells are human umbilical vein endothelial cells). | | | |
| 79 | HCHNF25 | Cancer | Highly preferred indications include neoplastic diseases (e.g. cancer) | Jurkat | DHFR | gb\|V00507\|HSDHFR |
| | | | such as described herein under the heading “Hyperproliferative | | p21 | gb\|BC000275\| |
| | | | Disordersî (particularly including, but not limited to, cancers of | | U66469 | BC000275 |
| | | | immune cells, such as T-cells). Highly preferred embodiments of the | | p53 | |
| | | | invention include methods of preventing, detecting, diagnosing, | | regulated | |
| | | | treating and/or ameliorating cancer and hyperproliferative disorders | | gene | |
| | | | involving immune cells (such as T-cells). (The Jurkat cell line is a | | | |
| | | | human T lymphocyte cell line available through the ATCC as cell line number TIB-152). | | | |
| 79 | HCHNF25 | Cancer | Highly preferred indications include neoplastic diseases (e.g. cancer) | Liver | p21 | gb\|BC000275\| |
| | | | such as described herein under the heading “Hyperproliferative | | | BC000275 |
| | | | Disordersî (particularly including, but not limited to, cancers involving | | | |
| | | | cells of the hepatic system). Highly preferred embodiments of the | | | |
| | | | invention include methods of preventing, detecting, diagnosing, | | | |
| | | | treating and/or ameliorating cancer and hyperproliferative disorders | | | |
| | | | involving cells of the hepatic system. | | | |
| 79 | HCHNF25 | Cancer | Highly preferred indications include neoplastic diseases (e.g. cancer) | THP1 | c-fos | gb\|BC004490\| |
| | | | such as described herein under the heading “Hyperproliferative | | | BC004490 |
| | | | Disordersî (particularly including, but not limited to, cancers of | | | |
| | | | immune cells, such as monocytes). Highly preferred embodiments of | | | |
| | | | the invention include methods of preventing, detecting, diagnosing, | | | |
| | | | treating and/or ameliorating cancer and hyperproliferative disorders | | | |
| | | | involving cells of the immune system (such as monocytes). (The THP- | | | |
| | | | 1 cell line is a human monocyte cell line available through the ATCC | | | |
| | | | as cell line number TIB-202). | | | |
| 79 | HCHNF25 | Cancer | Highly preferred indications include neoplastic diseases (e.g. cancer) | U937 | Cyclin A1 | gb\|U97680\|HSU97680 |
| | | | such as described herein under the heading “Hyperproliferative | | Cyclin D | gb\|BC000076\| |
| | | | Disordersî (particularly including, but not limited to, cancers of | | Cyclin D2 | BC000076 |
| | | | immune cells, such as monocytes). Highly preferred embodiments of | | | gb\|X68452\|HSCYCD2 |
| | | | the invention include methods of preventing, detecting, diagnosing, | | | |
| | | | treating and/or ameliorating cancer and hyperproliferative disorders | | | |
| | | | involving cells of the immune system (such as monocytes). (The U-937 | | | |
| | | | cell line is a human monocyte cell line available through the ATCC as | | | |
| | | | cell line number CRL-1593.2) | | | |
| 79 | HCHNF25 | Immune | Highly preferred indications include immunological disorders such as | Caco-2 | CCR4 | gb\|AB023888\| |
| | | | described herein under the heading “Immune Activity” and/or “Blood- | | CIS3 | AB023888 |
| | | | Related Disorders” (particularly including, but not limited to, immune | | ICAM | gb\|AB006967\| |
| | | | disorders involving the cells of the gastrointestinal tract). Highly | | VCAM | AB006967 |
| | | | preferred embodiments of the invention include methods of | | | gb\|X06990\|HSICAM1 |
| | | | preventing, detecting, diagnosing, treating and/or ameliorating | | | gb\|A30922\|A30922 |
| | | | disorders of the immune system (particularly including, but not limited | | | |
| | | | to, immune disorders involving cells of the gastrointestinal tract). (The | | | |
| | | | Caco-2 cell line is a human colorectal adenocarcinoma cell line | | | |
| | | | available through the ATCC as cell line number HTB-37) | | | |
| 79 | HCHNF25 | Immune | Highly preferred indications include immunological disorders such as | Daudi | Rag1 | gb\|M29474\|HUMRAG1 |
| | | | described herein under the heading “Immune Activity” and/or “Blood- | | Rag2 | gb\|AY011962\| |
| | | | Related Disorders” (particularly including, but not limited to, immune | | | AY011962 |
| | | | disorders involving the B-cells). Highly preferred embodiments of the | | | |
| | | | invention include methods of preventing, detecting, diagnosing, | | | |
| | | | treating and/or ameliorating disorders of the immune system | | | |
| | | | (particularly including, but not limited to, immune disorders involving | | | |
| | | | B-cells). (The Daudi cell line is a human B lymphoblast cell line | | | |
| | | | available through the ATCC as cell line number CCL-213). | | | |
| 79 | HCHNF25 | Immune | Highly preferred indications include immunological disorders such as | HUVEC | CD25 | gb\|X03137\|HSIL2RG7 |
| | | | described herein under the heading “Immune Activity” and/or “Blood- | | TNF | gb\|AJ270944\| |
| | | | Related Disorders” (particularly including, but not limited to, immune | | | HSA27094 |
| | | | disorders involving endothelial cells). Highly preferred embodiments | | | |
| | | | of the invention include methods of preventing, detecting, diagnosing, | | | |
| | | | treating and/or ameliorating disorders of the immune system | | | |
| | | | (particularly including, but not limited to, immune disorders involving | | | |
| | | | endothelial cells). (HUVEC cells are human umbilical vein endothelial cells). | | | |
| 79 | HCHNF25 | Immune | Highly preferred indications include immunological disorders such as | Jurkat | CD28 | gb\|AF222342\| |
| | | | described herein under the heading “Immune Activity” and/or “Blood- | | IL2 | AF222342 |
| | | | Related Disorders” (particularly including, but not limited to, immune | | VCAM | gb\|X61155\|HSARTIL2 |
| | | | disorders involving T-cells). Highly preferred embodiments of the | | | gb\|A30922\|A30922 |
| | | | invention include methods of preventing, detecting, diagnosing, | | | |
| | | | treating and/or ameliorating disorders of the immune system | | | |
| | | | (particularly including, but not limited to, immune disorders involving | | | |
| | | | T-cells). (The Jurkat cell line is a human T lymphocyte cell line | | | |
| | | | available through the ATCC as cell line number TIB-152). | | | |
| 79 | HCHNF25 | Immune | Highly preferred indications include immunological disorders such as | Liver | CCR4 | gb\|AB023888\| |
| | | | described herein under the heading “Immune Activity” and/or “Blood- | | CD28 | AB023888 |
| | | | Related Disorders” (particularly including, but not limited to, immune | | CXCR3 | gb\|AF222342\| |
| | | | disorders involving cells of the hepatic system). Highly preferred | | Rag2 | AF222342 |
| | | | embodiments of the invention include methods of preventing, | | | gb\|Z79783\|HSCKRL2 |
| | | | detecting, diagnosing, treating and/or ameliorating disorders of the | | | gb\|AY011962\| |
| | | | immune system (particularly including, but not limited to, immune | | | AY011962 |
| | | | disorders involving cells of the hepatic system). | | | |
| 79 | HCHNF25 | Immune | Highly preferred indications include immunological disorders such as | NHDF | CIS3 | gb\|AB006967\| |
| | | | described herein under the heading “Immune Activity” and/or “Blood- | | Rag1 | AB006967 |
| | | | Related Disorders” (particularly including, but not limited to, immune | | | gb\|M29474\|HUMRAG1 |
| | | | disorders involving the skin). Highly preferred embodiments of the | | | |
| | | | invention include methods of preventing, detecting, diagnosing, | | | |
| | | | treating and/or ameliorating disorders of the immune system | | | |
| | | | (particularly including, but not limited to, immune disorders involving | | | |
| | | | the skin). (NHDF cells are normal human dermal fibroblasts). | | | |
| 79 | HCHNF25 | Immune | Highly preferred indications include immunological disorders such as | THP1 | CD28 | gb\|AF222342\| |
| | | | described herein under the heading “Immune Activity” and/or “Blood- | | CIS3 | AF222342 |
| | | | Related Disorders” (particularly including, but not limited to, immune | | CXCR3 | gb\|AB006967\| |
| | | | disorders involving monocytes). Highly preferred embodiments of the | | | AB006967 |
| | | | invention include methods of preventing, detecting, diagnosing, | | | gb\|Z79783\|HSCKRL2 |
| | | | treating and/or ameliorating disorders of the immune system | | | |
| | | | (particularly including, but not limited to, immune disorders involving | | | |
| | | | monocytes). (The THP1 cell line is a human monocyte cell line | | | |
| | | | available through the ATCC as cell line number TIB-202). | | | |
| 79 | HCHNF25 | Immune | Highly preferred indications include immunological disorders such as | U937 | TNF | gb\|AJ270944\| |
| | | | described herein under the heading “Immune Activity” and/or “Blood- | | VCAM | HSA27094 |
| | | | Related Disorders” (particularly including, but not limited to, immune | | | gb\|A30922\|A30922 |
| | | | disorders involving monocytes). Highly preferred embodiments of the | | | |
| | | | invention include methods of preventing, detecting, diagnosing, | | | |
| | | | treating and/or ameliorating disorders of the immune system | | | |
| | | | (particularly including, but not limited to, immune disorders involving | | | |
| | | | monocytes). (The U937 cell line is a human monocyte cell line | | | |
| | | | available through the ATCC as cell line number CRL-1593.2). | | | |
| 105 | HDPBQ71 | Angiogenesis | Highly preferred indications include diagnosis, prevention, treatment, | AOSMC | Flt1 | gb\|AF063657\| |
| | | | and/or amelioration of diseases and disorders involving angiogenesis, | | VCAM | AF063657 |
| | | | wound healing, neoplasia (particularly including, but not limited to, | | | gb\|A30922\|A30922 |
| | | | tumor metastases), and cardiovascular diseases and disorders; as | | | |
| | | | described herein under the headings “Hyperproliferative Disorders,” | | | |
| | | | “Regeneration,” “Anti-Angiogenesis Activity,” “Diseases at the | | | |
| | | | Cellular Level,” and “Wound Healing and Epithelial Cell | | | |
| | | | Proliferation.” (AOSMC cells are aortic smooth muscle cells). | | | |
| 105 | HDPBQ71 | Angiogenesis | Highly preferred indications include diagnosis, prevention, treatment, | Caco-2 | Vegf1 | gb\|AF024710\| |
| | | | and/or amelioration of diseases and disorders involving angiogenesis, | | | AF024710 |
| | | | wound healing, neoplasia (particularly including, but not limited to, | | | |
| | | | tumor metastases), and cardiovascular diseases and disorders; as | | | |
| | | | described herein under the headings “Hyperproliferative Disorders,” | | | |
| | | | “Regeneration,” “Anti-Angiogenesis Activity,” “Diseases at the | | | |
| | | | Cellular Level,” and “Wound Healing and Epithelial Cell | | | |
| | | | Proliferation.” (The Caco-2 cell line is a human colorectal | | | |
| | | | adenocarcinoma cell line available through the ATCC as cell line number HTB-37). | | | |
| 105 | HDPBQ71 | Angiogenesis | Highly preferred indications include diagnosis, prevention, treatment, | Daudi | ICAM | gb\|X06990\|HSICAM1 |
| | | | and/or amelioration of diseases and disorders involving angiogenesis, | | | |
| | | | wound healing, neoplasia (particularly including, but not limited to, | | | |
| | | | tumor metastases), and cardiovascular diseases and disorders; as | | | |
| | | | described herein under the headings “Hyperproliferative Disorders,” | | | |
| | | | “Regeneration,” “Anti-Angiogenesis Activity,” “Diseases at the | | | |
| | | | Cellular Level,” and “Wound Healing and Epithelial Cell | | | |
| | | | Proliferation.” (The Daudi cell line is a human B lymphoblast cell line | | | |
| | | | available through the ATCC as cell line number CCL-213). | | | |
| 105 | HDPBQ71 | Angiogenesis | Highly preferred indications include diagnosis, prevention, treatment, | HEK293 | Cycloox | gb\|AF063657\| |
| | | | and/or amelioration of diseases and disorders involving angiogenesis, | | Flt1 | AF063657 |
| | | | wound healing, neoplasia (particularly including, but not limited to, | | iNOS | gb\|X85761\|HSNOS2E3 |
| | | | tumor metastases), and cardiovascular diseases and disorders; as | | | |
| | | | described herein under the headings “Hyperproliferative Disorders,” | | | |
| | | | “Regeneration,” “Anti-Angiogenesis Activity,” “Diseases at the | | | |
| | | | Cellular Level,” and “Wound Healing and Epithelial Cell | | | |
| | | | Proliferation.” (The HEK293 cell line is a human embryonal kidney | | | |
| | | | epithelial cell line available through the ATCC as cell line number | | | |
| | | | CRL-1573). | | | |
| 105 | HDPBQ71 | Angiogenesis | Highly preferred indications include diagnosis, prevention, treatment, | HUVEC | Flt1 | gb\|AF063657\| |
| | | | and/or amelioration of diseases and disorders involving angiogenesis, | | TSP-1 | AF063657 |
| | | | wound healing, neoplasia (particularly including, but not limited to, | | VCAM | gb\|X04665\|HSTHROMR |
| | | | tumor metastases), and cardiovascular diseases and disorders; as | | | gb\|A30922\|A30922 |
| | | | described herein under the headings “Hyperproliferative Disorders,” | | | |
| | | | “Regeneration,” “Anti-Angiogenesis Activity,” “Diseases at the | | | |
| | | | Cellular Level,” and “Wound Healing and Epithelial Cell | | | |
| | | | Proliferation.” (HUVEC cells are human umbilical vein endothelial | | | |
| | | | cells). | | | |
| 105 | HDPBQ71 | Angiogenesis | Highly preferred indications include diagnosis, prevention, treatment, | Jurkat | Flt1 | gb\|AF063657\| |
| | | | and/or amelioration of diseases and disorders involving angiogenesis, | | Vegf1 | AF063657 |
| | | | wound healing, neoplasia (particularly including, but not limited to, | | | gb\|AF024710\| |
| | | | tumor metastases), and cardiovascular diseases and disorders; as | | | AF024710 |
| | | | described herein under the headings “Hyperproliferative Disorders,” | | | |
| | | | “Regeneration,” “Anti-Angiogenesis Activity,” “Diseases at the | | | |
| | | | Cellular Level,” and “Wound Healing and Epithelial Cell | | | |
| | | | Proliferation.” (The Jurkat cell line is a human T lymphocyte cell line | | | |
| | | | available through the ATCC as cell line number TIB-152). | | | |
| 105 | HDPBQ71 | Angiogenesis | Highly preferred indications include diagnosis, prevention, treatment, | Liver | VCAM | gb\|A30922\|A30922 |
| | | | and/or amelioration of diseases and disorders involving angiogenesis, | | | |
| | | | wound healing, neoplasia (particularly including, but not limited to, | | | |
| | | | tumor metastases), and cardiovascular diseases and disorders; as | | | |
| | | | described herein under the headings “Hyperproliferative Disorders,” | | | |
| | | | “Regeneration,” “Anti-Angiogenesis Activity,” “Diseases at the | | | |
| | | | Cellular Level,” and “Wound Healing and Epithelial Cell | | | |
| | | | Proliferation.” | | | |
| 105 | HDPBQ71 | Angiogenesis | Highly preferred indications include diagnosis, prevention, treatment, | NHDF | TSP-1 | gb\|X04665\|HSTHROMR |
| | | | and/or amelioration of diseases and disorders involving angiogenesis, | | Vegf1 | gb\|AF024710\| |
| | | | wound healing, neoplasia (particularly including, but not limited to, | | | AF024710 |
| | | | tumor metastases), and cardiovascular diseases and disorders; as | | | |
| | | | described herein under the headings “Hyperproliferative Disorders,” | | | |
| | | | “Regeneration,” “Anti-Angiogenesis Activity,” “Diseases at the | | | |
| | | | Cellular Level,” and “Wound Healing and Epithelial Cell | | | |
| | | | Proliferation.” (NHDF cells are normal human dermal fibroblasts). | | | |
| 105 | HDPBQ71 | Angiogenesis | Highly preferred indications include diagnosis, prevention, treatment, | T cell | ICAM | gb\|X06990\|HSICAM1 |
| | | | and/or amelioration of diseases and disorders involving angiogenesis, | | Vegf1 | gb\|AF024710\| |
| | | | wound healing, neoplasia (particularly including, but not limited to, | | | AF024710 |
| | | | tumor metastases), and cardiovascular diseases and disorders; as | | | |
| | | | described herein under the headings “Hyperproliferative Disorders,” | | | |
| | | | “Regeneration,” “Anti-Angiogenesis Activity,” “Diseases at the | | | |
| | | | Cellular Level,” and “Wound Healing and Epithelial Cell | | | |
| | | | Proliferation.” | | | |
| 105 | HDPBQ71 | Angiogenesis | Highly preferred indications include diagnosis, prevention, treatment, | THP1 | VCAM | gb\|A30922\|A30922 |
| | | | and/or amelioration of diseases and disorders involving angiogenesis, | | | |
| | | | wound healing, neoplasia (particularly including, but not limited to, | | | |
| | | | tumor metastases), and cardiovascular diseases and disorders; as | | | |
| | | | described herein under the headings “Hyperproliferative Disorders,” | | | |
| | | | “Regeneration,” “Anti-Angiogenesis Activity,” “Diseases at the | | | |
| | | | Cellular Level,” and “Wound Healing and Epithelial Cell | | | |
| | | | Proliferation.” (The THP-1 cell line is a human monocyte cell line | | | |
| | | | available through the ATCC as cell line number TIB-202). | | | |
| 105 | HDPBQ71 | Angiogenesis | Highly preferred indications include diagnosis, prevention, treatment, | U937 | VCAM | gb\|A30922\|A30922 |
| | | | and/or amelioration of diseases and disorders involving angiogenesis, | | | |
| | | | wound healing, neoplasia (particularly including, but not limited to, | | | |
| | | | tumor metastases), and cardiovascular diseases and disorders; as | | | |
| | | | described herein under the headings “Hyperproliferative Disorders,” | | | |
| | | | “Regeneration,” “Anti-Angiogenesis Activity,” “Diseases at the | | | |
| | | | Cellular Level,” and “Wound Healing and Epithelial Cell | | | |
| | | | Proliferation.” (The U937 cell line is a human monocyte cell line | | | |
| | | | available through the ATCC as cell line number CRL-1593.2). | | | |
| 105 | HDPBQ71 | Cancer | Highly preferred indications include neoplastic diseases (e.g. cancer) | Caco-2 | p21 | gb\|BC000275\| |
| | | | such as described herein under the heading “Hyperproliferative | | TAA6 | BC000275 |
| | | | Disordersî (particularly including, but not limited to, cancer involving | | | gb\|I34297\|I34297 |
| | | | cells of the gastrointestinal tract). Highly preferred embodiments of | | | |
| | | | the invention include methods of preventing, detecting, diagnosing, | | | |
| | | | treating and/or ameliorating cancer and hyperproliferative disorders | | | |
| | | | involving the gastrointestinal tract. (The Caco-2 cell line is a human | | | |
| | | | colorectal adenocarcinoma cell line available through the ATCC as | | | |
| | | | cell line number HTB-37). | | | |
| 105 | HDPBQ71 | Cancer | Highly preferred indications include neoplastic diseases (e.g. cancer) | Daudi | Cyclin D2 | gb\|X68452\|HSCYCD2 |
| | | | such as described herein under the heading “Hyperproliferative | | | |
| | | | Disordersî (particularly including, but not limited to, cancers of | | | |
| | | | immune cells, such as B-cells). Highly preferred embodiments of the | | | |
| | | | invention include methods of preventing, detecting, diagnosing, | | | |
| | | | treating and/or ameliorating cancer and hyperproliferative disorders | | | |
| | | | involving immune cells (such as B-cells). (The Daudi cell line is a | | | |
| | | | human B lymphoblast cell line available through the ATCC as cell line | | | |
| | | | number CCL-213). | | | |
| 105 | HDPBQ71 | Cancer | Highly preferred indications include neoplastic diseases (e.g. cancer) | HEK293 | c-jun | gb\|BC006175\| |
| | | | such as described herein under the heading “Hyperproliferative | | DHFR | BC006175 |
| | | | Disordersî (particularly including, but not limited to, cancers of | | U66469 | gb\|V00507\|HSDHFR |
| | | | epithelial cells or cancers involving the renal system). Highly | | p53 | |
| | | | preferred embodiments of the invention include methods of | | regulated | |
| | | | preventing, detecting, diagnosing, treating and/or ameliorating cancer | | gene | |
| | | | and hyperproliferative disorders involving epithelial cells or the renal | | | |
| | | | system. (The 293 cell line human embryonal kidney epithelial cell line | | | |
| | | | available through the ATCC as cell line number CRL-1573). | | | |
| 105 | HDPBQ71 | Cancer | Highly preferred indications include neoplastic diseases (e.g. cancer) | HUVEC | beta- | gb\|U97680\|HSU97680 |
| | | | such as described herein under the heading “Hyperproliferative | | catenin | gb\|X68452\|HSCYCD2 |
| | | | Disordersî (particularly including, but not limited to, cancers involving | | Cyclin A1 | |
| | | | endothelial cells). Highly preferred embodiments of the invention | | Cyclin D2 | |
| | | | include methods of preventing, detecting, diagnosing, treating and/or | | | |
| | | | ameliorating cancer and hyperproliferative disorders involving | | | |
| | | | endothelial cells. (HUVEC cells are human umbilical vein endothelial | | | |
| | | | cells). | | | |
| 105 | HDPBQ71 | Cancer | Highly preferred indications include neoplastic diseases (e.g. cancer) | Liver | Cyclin D3 | gb\|AR034832\| |
| | | | such as described herein under the heading “Hyperproliferative | | | AR034832 |
| | | | Disordersî (particularly including, but not limited to, cancers involving | | | |
| | | | cells of the hepatic system). Highly preferred embodiments of the | | | |
| | | | invention include methods of preventing, detecting, diagnosing, | | | |
| | | | treating and/or ameliorating cancer and hyperproliferative disorders | | | |
| | | | involving cells of the hepatic system. | | | |
| 105 | HDPBQ71 | Cancer | Highly preferred indications include neoplastic diseases (e.g. cancer) | NHDF | bcl-2 | gb\|X06487\|HSBCL2IG |
| | | | such as described herein under the heading “Hyperproliferative | | beta- | gb\|AR034832\| |
| | | | Disordersî (particularly including, but not limited to cancers involving | | catenin | AR034832 |
| | | | cells of the skin). Highly preferred embodiments of the invention | | Cyclin D3 | gb\|V00507\|HSDHFR |
| | | | include methods of preventing, detecting, diagnosing, treating and/or | | DHFR | gb\|X59543\|HSRIREM1 |
| | | | ameliorating cancer and hyperproliferative disorders involving skin | | M1 RIBO R | |
| | | | cells. (NHDF cells are normal human dermal fibroblasts). | | U66469 | |
| | | | | | p53 | |
| | | | | | regulated | |
| | | | | | gene | |
| 105 | HDPBQ71 | Cancer | Highly preferred indications include neoplastic diseases (e.g. cancer) | T cell | Cyclin D | gb\|BC000076\| |
| | | | such as described herein under the heading “Hyperproliferative | | DHFR | BC000076 |
| | | | Disordersî (particularly including, but not limited to, cancers of | | M1 RIBO R | gb\|V00507\|HSDHFR |
| | | | immune cells, such as T-cells). Highly preferred embodiments of the | | p21 | gb\|X59543\|HSRIREM1 |
| | | | invention include methods of preventing, detecting, diagnosing, | | | gb\|BC000275\| |
| | | | treating and/or ameliorating cancer and hyperproliferative disorders | | | BC000275 |
| | | | involving cells of the immune system (such as T-cells). | | | |
| 105 | HDPBQ71 | Cancer | Highly preferred indications include neoplastic diseases (e.g. cancer) | THP1 | Cyclin A1 | gb\|U97680\|HSU97680 |
| | | | such as described herein under the heading “Hyperproliferative | | Cyclin D2 | gb\|X68452\|HSCYCD2 |
| | | | Disordersî (particularly including, but not limited to, cancers of | | | |
| | | | immune cells, such as monocytes). Highly preferred embodiments of | | | |
| | | | the invention include methods of preventing, detecting, diagnosing, | | | |
| | | | treating and/or ameliorating cancer and hyperproliferative disorders | | | |
| | | | involving cells of the immune system (such as monocytes). (The THP- | | | |
| | | | 1 cell line is a human monocyte cell line available through the ATCC | | | |
| | | | as cell line number TIB-202). | | | |
| 105 | HDPBQ71 | Cancer | Highly preferred indications include neoplastic diseases (e.g. cancer) | U937 | Cyclin A1 | gb\|U97680\|HSU97680 |
| | | | such as described herein under the heading “Hyperproliferative | | Cyclin D | gb\|BC000076\| |
| | | | Disordersî (particularly including, but not limited to, cancers of | | p21 | BC000076 |
| | | | immune cells, such as monocytes). Highly preferred embodiments of | | | gb\|BC000275\| |
| | | | the invention include methods of preventing, detecting, diagnosing, | | | BC000275 |
| | | | treating and/or ameliorating cancer and hyperproliferative disorders | | | |
| | | | involving cells of the immune system (such as monocytes). (The U-937 | | | |
| | | | cell line is a human monocyte cell line available through the ATCC as | | | |
| | | | cell line number CRL-1593.2) | | | |
| 105 | HDPBQ71 | Immune | Highly preferred indications include immunological disorders such as | AOSMC | IL1B | gb\|X02532\|HSIL1BR |
| | | | described herein under the heading “Immune Activity” and/or “Blood- | | VCAM | gb\|A30922\|A30922 |
| | | | Related Disorders” (particularly including, but not limited to, immune | | | |
| | | | disorders involving muscle tissues and the cardiovascular system (e.g. | | | |
| | | | heart, lungs, circulatory system)). Highly preferred embodiments of | | | |
| | | | the invention include methods of preventing, detecting, diagnosing, | | | |
| | | | treating and/or ameliorating disorders of the immune system | | | |
| | | | (particularly including, but not limited to, immune disorders involving | | | |
| | | | muscle tissue or the cardiovascular system). (AOSMC cells are | | | |
| | | | human aortic smooth muscle cells). | | | |
| 105 | HDPBQ71 | Immune | Highly preferred indications include immunological disorders such as | Daudi | c-maf | gb\|AF055377\| |
| | | | described herein under the heading “Immune Activity” and/or “Blood- | | CD25 | AF055377 |
| | | | Related Disorders” (particularly including, but not limited to, immune | | CXCR3 | gb\|X03137\|HSIL2RG7 |
| | | | disorders involving the B-cells). Highly preferred embodiments of the | | Granzyme B | gb\|Z79783\|HSCKRL2 |
| | | | invention include methods of preventing, detecting, diagnosing, | | ICAM | gb\|J04071\|HUMCSE |
| | | | treating and/or ameliorating disorders of the immune system | | | gb\|X06990\|HSICAM1 |
| | | | (particularly including, but not limited to, immune disorders involving | | | |
| | | | B-cells). (The Daudi cell line is a human B lymphoblast cell line | | | |
| | | | available through the ATCC as cell line number CCL-213). | | | |
| 105 | HDPBQ71 | Immune | Highly preferred indications include immunological disorders such as | HEK293 | CCR4 | gb\|AB023888\| |
| | | | described herein under the heading “Immune Activity” and/or “Blood- | | TNF | AB023888 |
| | | | Related Disorders” (particularly including, but not limited to, immune | | | gb\|AJ270944\| |
| | | | disorders involving epithelial cells or the renal system). Highly | | | HSA27094 |
| | | | preferred embodiments of the invention include methods of | | | |
| | | | preventing, detecting, diagnosing, treating and/or ameliorating | | | |
| | | | disorders of the immune system (particularly including, but not limited | | | |
| | | | to, immune disorders involving epithelial cells or the renal system). | | | |
| | | | (The 293 cell line is a human embryonal kidney epithelial cell line | | | |
| | | | available through the ATCC as cell line number CRL-1573). | | | |
| 105 | HDPBQ71 | Immune | Highly preferred indications include immunological disorders such as | HUVEC | Rag2 | gb\|AY011962\| |
| | | | described herein under the heading “Immune Activity” and/or “Blood- | | VCAM | AY011962 |
| | | | Related Disorders” (particularly including, but not limited to, immune | | | gb\|A30922\|A30922 |
| | | | disorders involving endothelial cells). Highly preferred embodiments | | | |
| | | | of the invention include methods of preventing, detecting, diagnosing, | | | |
| | | | treating and/or ameliorating disorders of the immune system | | | |
| | | | (particularly including, but not limited to, immune disorders involving | | | |
| | | | endothelial cells). (HUVEC cells are human umbilical vein endothelial | | | |
| | | | cells). | | | |
| 105 | HDPBQ71 | Immune | Highly preferred indications include immunological disorders such as | Jurkat | c-maf | gb\|AF055377\| |
| | | | described herein under the heading “Immune Activity” and/or “Blood- | | CD69 | AF055377 |
| | | | Related Disorders” (particularly including, but not limited to, immune | | TNF | gb\|Z22576\|HSCD69GNA |
| | | | disorders involving T-cells). Highly preferred embodiments of the | | | gb\|AJ270944\| |
| | | | invention include methods of preventing, detecting, diagnosing, | | | HSA27094 |
| | | | treating and/or ameliorating disorders of the immune system | | | |
| | | | (particularly including, but not limited to, immune disorders involving | | | |
| | | | T-cells). (The Jurkat cell line is a human T lymphocyte cell line | | | |
| | | | available through the ATCC as cell line number TIB-152). | | | |
| 105 | HDPBQ71 | Immune | Highly preferred indications include immunological disorders such as | Liver | VCAM | gb\|A30922\|A30922 |
| | | | described herein under the heading “Immune Activity” and/or “Blood- | | | |
| | | | Related Disorders” (particularly including, but not limited to, immune | | | |
| | | | disorders involving cells of the hepatic system). Highly preferred | | | |
| | | | embodiments of the invention include methods of preventing, | | | |
| | | | detecting, diagnosing, treating and/or ameliorating disorders of the | | | |
| | | | immune system (particularly including, but not limited to, immune | | | |
| | | | disorders involving cells of the hepatic system). | | | |
| 105 | HDPBQ71 | Immune | Highly preferred indications include immunological disorders such as | NHDF | HLA-c | gb\|AK027080\| |
| | | | described herein under the heading “Immune Activity” and/or “Blood- | | LTBR | AK027080 |
| | | | Related Disorders” (particularly including, but not limited to, immune | | Rag1 | gb\|M29474\|HUMRAG1 |
| | | | disorders involving the skin). Highly preferred embodiments of the | | | |
| | | | invention include methods of preventing, detecting, diagnosing, | | | |
| | | | treating and/or ameliorating disorders of the immune system | | | |
| | | | (particularly including, but not limited to, immune disorders involving | | | |
| | | | the skin). (NHDF cells are normal human dermal fibroblasts). | | | |
| 105 | HDPBQ71 | Immune | Highly preferred indications include immunological disorders such as | SK-N-MC | CD40 | gb\|AJ300189\| |
| | | | described herein under the heading “Immune Activity” and/or “Blood- | neuroblastoma | TNF | HSA30018 |
| | | | Related Disorders” (particularly including, but not limited to, immune | | | gb\|AJ270944\| |
| | | | disorders involving the central nervous system). Highly preferred | | | HSA27094 |
| | | | embodiments of the invention include methods of preventing, | | | |
| | | | detecting, diagnosing, treating and/or ameliorating disorders of the | | | |
| | | | immune system (particularly including, but not limited to, immune | | | |
| | | | disorders involving the central nervous sytem). (The SK-N-MC | | | |
| | | | neuroblastoma cell line is a cell line derived from human brain tissue | | | |
| | | | and is available through the ATCC as cell line number HTB-10). | | | |
| 105 | HDPBQ71 | Immune | Highly preferred indications include immunological disorders such as | T cell | CD69 | gb\|Z22576\|HSCD69GNA |
| | | | described herein under the heading “Immune Activity” and/or “Blood- | | CTLA4 | gb\|AF316875\| |
| | | | Related Disorders” (particularly including, but not limited to, immune | | Granzyme B | AF316875 |
| | | | disorders involving T-cells). Highly preferred embodiments of the | | ICAM | gb\|J04071\|HUMCSE |
| | | | invention include methods of preventing, detecting, diagnosing, | | IFNg | gb\|X06990\|HSICAM1 |
| | | | treating and/or ameliorating disorders of the immune system | | IL5 | gb\|X87308\|HSRNAIG |
| | | | (particularly including, but not limited to, immune disorders involving | | LTBR | gb\|X12705\|HSBCDFIA |
| | | | T-cells). | | Rag2 | gb\|AK027080\| |
| | | | | | | AK027080 |
| | | | | | | gb\|AY011962\| |
| | | | | | | AY011962 |
| 105 | HDPBQ71 | Immune | Highly preferred indications include immunological disorders such as | THP1 | CCR3 | gb\|AB023887\| |
| | | | described herein under the heading “Immune Activity” and/or “Blood- | | CD30 | AB023887 |
| | | | Related Disorders” (particularly including, but not limited to, immune | | I16 | gb\|X04403\|HS26KDAR |
| | | | disorders involving monocytes). Highly preferred embodiments of the | | Rag2 | gb\|AY011962\| |
| | | | invention include methods of preventing, detecting, diagnosing, | | VCAM | AY011962 |
| | | | treating and/or ameliorating disorders of the immune system | | | gb\|A30922\|A30922 |
| | | | (particularly including, but not limited to, immune disorders involving | | | |
| | | | monocytes). (The THP1 cell line is a human monocyte cell line | | | |
| | | | available through the ATCC as cell line number TIB-202). | | | |
| 105 | HDPBQ71 | Immune | Highly preferred indications include immunological disorders such as | U937 | CD69 | gb\|Z22576\|HSCD69GNA |
| | | | described herein under the heading “Immune Activity” and/or “Blood- | | TNF | gb\|AJ270944\| |
| | | | Related Disorders” (particularly including, but not limited to, immune | | VCAM | HSA27094 |
| | | | disorders involving monocytes). Highly preferred embodiments of the | | | gb\|A30922\|A30922 |
| | | | invention include methods of preventing, detecting, diagnosing, | | | |
| | | | treating and/or ameliorating disorders of the immune system | | | |
| | | | (particularly including, but not limited to, immune disorders involving | | | |
| | | | monocytes). (The U937 cell line is a human monocyte cell line | | | |
| | | | available through the ATCC as cell line number CRL-1 593.2). | | | |
| 187 | HFCCQ50 | Angiogenesis | Highly preferred indications include diagnosis, prevention, treatment, | TF-1 | TSP-1 | gb\|X04665\|HSTHROMR |
| | | | and/or amelioration of diseases and disorders involving angiogenesis, | | | |
| | | | wound healing, neoplasia (particularly including, but not limited to, | | | |
| | | | tumor metastases), and cardiovascular diseases and disorders; as | | | |
| | | | described herein under the headings “Hyperproliferative Disorders,” | | | |
| | | | “Regeneration,” “Anti-Angiogenesis Activity,” “Diseases at the | | | |
| | | | Cellular Level,” and “Wound Healing and Epithelial Cell | | | |
| | | | Proliferation.” (The TF-1 cell line is a human erythroblast cell line | | | |
| | | | available through the ATCC as cell line number CRL-2003). | | | |
| 187 | HFCCQ50 | Angiogenesis | Highly preferred indications include diagnosis, prevention, treatment, | U937 | ICAM | gb\|X06990\|HSICAM1 |
| | | | and/or amelioration of diseases and disorders involving angiogenesis, | | | |
| | | | wound healing, neoplasia (particularly including, but not limited to, | | | |
| | | | tumor metastases), and cardiovascular diseases and disorders; as | | | |
| | | | described herein under the headings “Hyperproliferative Disorders,” | | | |
| | | | “Regeneration,” “Anti-Angiogenesis Activity,” “Diseases at the | | | |
| | | | Cellular Level,” and “Wound Healing and Epithelial Cell | | | |
| | | | Proliferation.” (The U937 cell line is a human monocyte cell line | | | |
| | | | available through the ATCC as cell line number CRL-1593.2). | | | |
| 187 | HFCCQ50 | Cancer | Highly preferred indications include neoplastic diseases (e.g. cancer) | TF-1 | Cyclin D2 | gb\|X68452\|HSCYCD2 |
| | | | such as described herein under the heading “Hyperproliferative | | M1 RIBO R | gb\|X59543\|HSRIREM1 |
| | | | Disordersî (particularly including, but not limited to cancers involving | | | |
| | | | erythrocytes). Highly preferred embodiments of the invention include | | | |
| | | | methods of preventing, detecting, diagnosing, treating and/or | | | |
| | | | ameliorating cancer and hyperproliferative disorders involving | | | |
| | | | erythrocytes. (The TF-1 cell line is a human erythroblast cell line | | | |
| | | | available through the ATCC as cell line number CRL-2003). | | | |
| 187 | HFCCQ50 | Cancer | Highly preferred indications include neoplastic diseases (e.g. cancer) | U937 | Bax | gb\|AF250190\| |
| | | | such as described herein under the heading “Hyperproliferative | | DHFR | AF250190 |
| | | | Disordersî (particularly including, but not limited to, cancers of | | M1 RIBO R | gb\|V00507\|HSDHFR |
| | | | immune cells, such as monocytes). Highly preferred embodiments of | | | gb\|X59543\|HSRIREM1 |
| | | | the invention include methods of preventing, detecting, diagnosing, | | | |
| | | | treating and/or ameliorating cancer and hyperproliferative disorders | | | |
| | | | involving cells of the immune system (such as monocytes). (THe U- | | | |
| | | | 937 cell line is a human monocyte cell line available through the | | | |
| | | | ATCC as cell line number CRL-1593.2) | | | |
| 187 | HFCCQ50 | Immune | Highly preferred indications include immunological disorders such as | TF-1 | CD40 | gb\|AJ300189\| |
| | | | described herein under the heading “Immune Activity” and/or “Blood- | | CD69 | HSA30018 |
| | | | Related Disorders” (particularly including, but not limited to, immune | | | gb\|Z22576\|HSCD69GNA |
| | | | disorders involving erythrocytes). Highly preferred embodiments of | | | |
| | | | the invention include methods of preventing, detecting, diagnosing, | | | |
| | | | treating and/or ameliorating disorders of the immune system | | | |
| | | | (particularly including, but not limited to, immune disorders involving | | | |
| | | | erythrocytes). (The TF-1 cell line is a human erythroblast cell line | | | |
| | | | available through the ATCC as cell line number CRL-2003). | | | |
| 187 | HFCCQ50 | Immune | Highly preferred indications include immunological disorders such as | U937 | ICAM | gb\|X06990\|HSICAM1 |
| | | | described herein under the heading “Immune Activity” and/or “Blood- | | IRF1 | gb\|X14454\|HSIRF1 |
| | | | Related Disorders” (particularly including, but not limited to, immune | | LTBR | gb\|AK027080\| |
| | | | disorders involving monocytes). Highly preferred embodiments of the | | | AK027080 |
| | | | invention include methods of preventing, detecting, diagnosing, | | | |
| | | | treating and/or ameliorating disorders of the immune system | | | |
| | | | (particularly including, but not limited to, immune disorders involving | | | |
| | | | monocytes). (The U937 cell line is a human monocyte cell line | | | |
| | | | available through the ATCC as cell line number CRL-1593.2). | | | |
| 188 | HFCEW05 | Cancer | Highly preferred indications include neoplastic diseases (e.g. cancer) | TF-1 | c-jun | gb\|BC006175\| |
| | | | such as described herein under the heading “Hyperproliferative | | p21 | BC006175 |
| | | | Disordersî (particularly including, but not limited to cancers involving | | | gb\|BC000275\| |
| | | | erythrocytes). Highly preferred embodiments of the invention include | | | BC000275 |
| | | | methods of preventing, detecting, diagnosing, treating and/or | | | |
| | | | ameliorating cancer and hyperproliferative disorders involving | | | |
| | | | erythrocytes. (The TF-1 cell line is a human erythroblast cell line | | | |
| | | | available through the ATCC as cell line number CRL-2003). | | | |
| 188 | HFCEW05 | Immune | Highly preferred indications include immunological disorders such as | TF-1 | CD40 | gb\|AJ300189\| |
| | | | described herein under the heading “Immune Activity” and/or “Blood- | | IL1B | HSA30018 |
| | | | Related Disorders” (particularly including, but not limited to, immune | | LTBR | gb\|X02532\|HSIL1BR |
| | | | disorders involving erythrocytes). Highly preferred embodiments of | | | gb\|AK027080\| |
| | | | the invention include methods of preventing, detecting, diagnosing, | | | AK027080 |
| | | | treating and/or ameliorating disorders of the immune system | | | |
| | | | (particularly including, but not limited to, immune disorders involving | | | |
| | | | erythrocytes). (The TF-1 cell line is a human erythroblast cell line | | | |
| | | | available through the ATCC as cell line number CRL-2003). | | | |
| 204 | HFVAB79 | Angiogenesis | Highly preferred indications include diagnosis, prevention, treatment, | U937 | ICAM | gb\|X06990\|HSICAM1 |
| | | | and/or amelioration of diseases and disorders involving angiogenesis, | | | |
| | | | wound healing, neoplasia (particularly including, but not limited to, | | | |
| | | | tumor metastases), and cardiovascular diseases and disorders; as | | | |
| | | | described herein under the headings “Hyperproliferative Disorders,” | | | |
| | | | “Regeneration,” “Anti-Angiogenesis Activity,” “Diseases at the | | | |
| | | | Cellular Level,” and “Wound Healing and Epithelial Cell | | | |
| | | | Proliferation. “(The U937 cell line is a human monocyte cell line | | | |
| | | | available through the ATCC as cell line number CRL-1593.2). | | | |
| 204 | HFVAB79 | Cancer | Highly preferred indications include neoplastic diseases (e.g. cancer) | U937 | c-jun | gb\|BC006175\| |
| | | | such as described herein under the heading “Hyperproliferative | | | BC006175 |
| | | | Disordersî (particularly including, but not limited to, cancers of | | | |
| | | | immune cells, such as monocytes). Highly preferred embodiments of | | | |
| | | | the invention include methods of preventing, detecting, diagnosing, | | | |
| | | | treating and/or ameliorating cancer and hyperproliferative disorders | | | |
| | | | involving cells of the immune system (such as monocytes). (THe U- | | | |
| | | | 937 cell line is a human monocyte cell line available through the | | | |
| | | | ATCC as cell line number CRL-1593.2) | | | |
| 204 | HFVAB79 | Immune | Highly preferred indications include immunological disorders such as | U937 | CTLA4 | gb\|AF316875\| |
| | | | described herein under the heading “Immune Activity” and/or “Blood- | | ICAM | AF316875 |
| | | | Related Disorders” (particularly including, but not limited to, immune | | LTBR | gb\|X06990\|HSICAM1 |
| | | | disorders involving monocytes). Highly preferred embodiments of the | | TNF | gb\|AK027080\| |
| | | | invention include methods of preventing, detecting, diagnosing, | | | AK027080 |
| | | | treating and/or ameliorating disorders of the immune system | | | gb\|AJ270944\| |
| | | | (particularly including, but not limited to, immune disorders involving | | | HSA27094 |
| | | | monocytes). (The U937 cell line is a human monocyte cell line | | | |
| | | | available through the ATCC as cell line number CRL-1593.2). | | | |
| 249 | HJACG02 | Angiogenesis | Highly preferred indications include diagnosis, prevention, treatment, | Adipocytes- | ICAM | gb\|X06990\|HSICAM1 |
| | | | and/or amelioration of diseases and disorders involving angiogenesis, | Mar. 12, 2001 | PAI | gb\|X12701\|HSENDPAI |
| | | | wound healing, neoplasia (particularly including, but not limited to, | | Vegf1 | gb\|AF024710\| |
| | | | tumor metastases), and cardiovascular diseases and disorders; as | | | AF024710 |
| | | | described herein under the headings “Hyperproliferative Disorders,” | | | |
| | | | “Regeneration,” “Anti-Angiogenesis Activity,” “Diseases at the | | | |
| | | | Cellular Level,” and “Wound Healing and Epithelial Cell | | | |
| | | | Proliferation.” | | | |
| 249 | HJACG02 | Angiogenesis | Highly preferred indications include diagnosis, prevention, treatment, | AOSMC | VCAM | gb\|A30922\|A30922 |
| | | | and/or amelioration of diseases and disorders involving angiogenesis, | | | |
| | | | wound healing, neoplasia (particularly including, but not limited to, | | | |
| | | | tumor metastases), and cardiovascular diseases and disorders; as | | | |
| | | | described herein under the headings “Hyperproliferative Disorders,” | | | |
| | | | “Regeneration,” “Anti-Angiogenesis Activity,” “Diseases at the | | | |
| | | | Cellular Level,” and “Wound Healing and Epithelial Cell | | | |
| | | | Proliferation.” (AOSMC cells are aortic smooth muscle cells). | | | |
| 249 | HJACG02 | Angiogenesis | Highly preferred indications include diagnosis, prevention, treatment, | Daudi | ICAM | gb\|X06990\|HSICAM1 |
| | | | and/or amelioration of diseases and disorders involving angiogenesis, | | VCAM | gb\|A30922\|A30922 |
| | | | wound healing, neoplasia (particularly including, but not limited to, | | | |
| | | | tumor metastases), and cardiovascular diseases and disorders; as | | | |
| | | | described herein under the headings “Hyperproliferative Disorders,” | | | |
| | | | “Regeneration,” “Anti-Angiogenesis Activity,” “Diseases at the | | | |
| | | | Cellular Level,” and “Wound Healing and Epithelial Cell | | | |
| | | | Proliferation.” (The Daudi cell line is a human B lymphoblast cell line | | | |
| | | | available through the ATCC as cell line number CCL-213). | | | |
| 249 | HJACG02 | Angiogenesis | Highly preferred indications include diagnosis, prevention, treatment, | HUVEC | ICAM | gb\|X06990\|HSICAM1 |
| | | | and/or amelioration of diseases and disorders involving angiogenesis, | | TSP-1 | gb\|X04665\|HSTHROMR |
| | | | wound healing, neoplasia (particularly including, but not limited to, | | Vegf1 | gb\|AF024710\| |
| | | | tumor metastases), and cardiovascular diseases and disorders; as | | | AF024710 |
| | | | described herein under the headings “Hyperproliferative Disorders,” | | | |
| | | | “Regeneration,” “Anti-Angiogenesis Activity,” “Diseases at the | | | |
| | | | Cellular Level,” and “Wound Healing and Epithelial Cell | | | |
| | | | Proliferation.” (HUVEC cells are human umbilical vein endothelial | | | |
| | | | cells). | | | |
| 249 | HJACG02 | Cancer | Highly preferred indications include neoplastic diseases (e.g. cancer) | Adipocytes- | Egr1 | |
| | | | such as described herein under the heading “Hyperproliferative | Mar. 12, 2001 | | |
| | | | Disordersî (particularly including, but not limited to, cancer involving | | | |
| | | | adipocytes). Highly preferred embodiments of the invention include | | | |
| | | | methods of preventing, detecting, diagnosing, treating and/or | | | |
| | | | ameliorating cancer and hyperproliferative disorders. (Primary | | | |
| | | | adipocytes) | | | |
| 249 | HJACG02 | Cancer | Highly preferred indications include neoplastic diseases (e.g. cancer) | AOSMC | M1 RIBO R | gb\|X59543\|HSRIREM1 |
| | | | such as described herein under the heading “Hyperproliferative | | | |
| | | | Disordersî (particularly including, but not limited to, cancers of muscle | | | |
| | | | tissues and the cardiovascular system (e.g. heart, lungs, circulatory | | | |
| | | | system)). Highly preferred embodiments of the invention include | | | |
| | | | methods of preventing, detecting, diagnosing, treating and/or | | | |
| | | | ameliorating cancer and hyperproliferative disorders. (AOSMC cells | | | |
| | | | are aortic smooth muscle cells). | | | |
| 249 | HJACG02 | Cancer | Highly preferred indications include neoplastic diseases (e.g. cancer) | Daudi | Cyclin A1 | gb\|U97680\|HSU97680 |
| | | | such as described herein under the heading “Hyperproliferative | | | |
| | | | Disordersî (particularly including, but not limited to, cancers of | | | |
| | | | immune cells, such as B-cells). Highly preferred embodiments of the | | | |
| | | | invention include methods of preventing, detecting, diagnosing, | | | |
| | | | treating and/or ameliorating cancer and hyperproliferative disorders | | | |
| | | | involving immune cells (such as B-cells). (The Daudi cell line is a | | | |
| | | | human B lymphoblast cell line available through the ATCC as cell line | | | |
| | | | number CCL-213). | | | |
| 249 | HJACG02 | Cancer | Highly preferred indications include neoplastic diseases (e.g. cancer) | HEK293 | E- | gb\|Z35408\|HSECAD9 |
| | | | such as described herein under the heading “Hyperproliferative | | cadherin | |
| | | | Disordersî (particularly including, but not limited to, cancers of | | | |
| | | | epithelial cells or cancers involving the renal system). Highly | | | |
| | | | preferred embodiments of the invention include methods of | | | |
| | | | preventing, detecting, diagnosing, treating and/or ameliorating cancer | | | |
| | | | and hyperproliferative disorders involving epithelial cells or the renal | | | |
| | | | system. (The 293 cell line human embryonal kidney epithelial cell line | | | |
| | | | available through the ATCC as cell line number CRL-1573). | | | |
| 249 | HJACG02 | Cancer | Highly preferred indications include neoplastic diseases (e.g. cancer) | Jurkat | Cyclin A1 | gb\|U97680\|HSU97680 |
| | | | such as described herein under the heading “Hyperproliferative | | | |
| | | | Disordersî (particularly including, but not limited to, cancers of | | | |
| | | | immune cells, such as T-cells). Highly preferred embodiments of the | | | |
| | | | invention include methods of preventing, detecting, diagnosing, | | | |
| | | | treating and/or ameliorating cancer and hyperproliferative disorders | | | |
| | | | involving immune cells (such as T-cells). (The Jurkat cell line is a | | | |
| | | | human T lymphocyte cell line available through the ATCC as cell line | | | |
| | | | number TIB-152). | | | |
| 249 | HJACG02 | Cancer | Highly preferred indications include neoplastic diseases (e.g. cancer) | Liver | Cyclin D2 | gb\|X68452\|HSCYCD2 |
| | | | such as described herein under the heading “Hyperproliferative | | | |
| | | | Disordersî (particularly including, but not limited to, cancers involving | | | |
| | | | cells of the hepatic system). Highly preferred embodiments of the | | | |
| | | | invention include methods of preventing, detecting, diagnosing, | | | |
| | | | treating and/or ameliorating cancer and hyperproliferative disorders | | | |
| | | | involving cells of the hepatic system. | | | |
| 249 | HJACG02 | Cancer | Highly preferred indications include neoplastic diseases (e.g. cancer) | NHDF | Cyclin A1 | gb\|U97680\|HSU97680 |
| | | | such as described herein under the heading “Hyperproliferative | | | |
| | | | Disordersî (particularly including, but not limited to cancers involving | | | |
| | | | cells of the skin). Highly preferred embodiments of the invention | | | |
| | | | include methods of preventing, detecting, diagnosing, treating and/or | | | |
| | | | ameliorating cancer and hyperproliferative disorders involving skin | | | |
| | | | cells. (NHDF cells are normal human dermal fibroblasts). | | | |
| 249 | HJACG02 | Immune | Highly preferred indications include immunological disorders such as | Adipocytes- | ICAM | gb\|X06990\|HSICAM1 |
| | | | described herein under the heading “Immune Activity” and/or “Blood- | Mar. 12, 2001 | Il6 | gb\|X04403\|HS26KDAR |
| | | | Related Disorders” (particularly including, but not limited to, immune | | Rag1 | gb\|M29474\|HUMRAG1 |
| | | | disorders involving adipocytes). Highly preferred embodiments of the | | | |
| | | | invention include methods of preventing, detecting, diagnosing, | | | |
| | | | treating and/or ameliorating disorders of the immune system | | | |
| | | | (particularly including, but not limited to, immune disorders involving | | | |
| | | | adipocytes). | | | |
| 249 | HJACG02 | Immune | Highly preferred indications include immunological disorders such as | AOSMC | CD30 | gb\|AJ300189\| |
| | | | described herein under the heading “Immune Activity” and/or “Blood- | | CD40 | HSA30018 |
| | | | Related Disorders” (particularly including, but not limited to, immune | | IL1B | gb\|X02532\|HSIL1BR |
| | | | disorders involving muscle tissues and the cardiovascular system (e.g. | | IL5 | gb\|X12705\|HSBCDFIA |
| | | | heart, lungs, circulatory system)). Highly preferred embodiments of | | TNF | gb\|AJ270944\| |
| | | | the invention include methods of preventing, detecting, diagnosing, | | VCAM | HSA27094 |
| | | | treating and/or ameliorating disorders of the immune system | | | gb\|A30922\|A30922 |
| | | | (particularly including, but not limited to, immune disorders involving | | | |
| | | | muscle tissue or the cardiovascular system). (AOSMC cells are | | | |
| | | | human aortic smooth muscle cells). | | | |
| 249 | HJACG02 | Immune | Highly preferred indications include immunological disorders such as | Caco-2 | Rag1 | gb\|M29474\|HUMRAG1 |
| | | | described herein under the heading “Immune Activity” and/or “Blood- | | | |
| | | | Related Disorders” (particularly including, but not limited to, immune | | | |
| | | | disorders involving the cells of the gastrointestinal tract). Highly | | | |
| | | | preferred embodiments of the invention include methods of | | | |
| | | | preventing, detecting, diagnosing, treating and/or ameliorating | | | |
| | | | disorders of the immune system (particularly including, but not limited | | | |
| | | | to, immune disorders involving cells of the gastrointestinal tract). (The | | | |
| | | | Caco-2 cell line is a human colorectal adenocarcinoma cell line | | | |
| | | | available through the ATCC as cell line number HTB-37). | | | |
| 249 | HJACG02 | Immune | Highly preferred indications include immunological disorders such as | Daudi | ICAM | gb\|X06990\|HSICAM1 |
| | | | described herein under the heading “Immune Activity” and/or “Blood- | | Rag1 | gb\|M29474\|HUMRAG1 |
| | | | Related Disorders” (particularly including, but not limited to, immune | | VCAM | gb\|A30922\|A30922 |
| | | | disorders involving the B-cells). Highly preferred embodiments of the | | | |
| | | | invention include methods of preventing, detecting, diagnosing, | | | |
| | | | treating and/or ameliorating disorders of the immune system | | | |
| | | | (particularly including, but not limited to, immune disorders involving | | | |
| | | | B-cells). (The Daudi cell line is a human B lymphoblast cell line | | | |
| | | | available through the ATCC as cell line number CCL-213). | | | |
| 249 | HJACG02 | Immune | Highly preferred indications include immunological disorders such as | HEK293 | c-maf | gb\|AF055377\| |
| | | | described herein under the heading “Immune Activity” and/or “Blood- | | | AF055377 |
| | | | Related Disorders” (particularly including, but not limited to, immune | | | |
| | | | disorders involving epithelial cells or the renal system). Highly | | | |
| | | | preferred embodiments of the invention include methods of | | | |
| | | | preventing, detecting, diagnosing, treating and/or ameliorating | | | |
| | | | disorders of the immune system (particularly including, but not limited | | | |
| | | | to, immune disorders involving epithelial cells or the renal system). | | | |
| | | | (The 293 cell line is a human embryonal kidney epithelial cell line | | | |
| | | | available through the ATCC as cell line number CRL-1573). | | | |
| 249 | HJACG02 | Immune | Highly preferred indications include immunological disorders such as | HUVEC | ICAM | gb\|X06990\|HSICAM1 |
| | | | described herein under the heading “Immune Activity” and/or “Blood- | | | |
| | | | Related Disorders” (particularly including, but not limited to, immune | | | |
| | | | disorders involving endothelial cells). Highly preferred embodiments | | | |
| | | | of the invention include methods of preventing, detecting, diagnosing, | | | |
| | | | treating and/or ameliorating disorders of the immune system | | | |
| | | | (particularly including, but not limited to, immune disorders involving | | | |
| | | | endothelial cells). (HUVEC cells are human umbilical vein endothelial | | | |
| | | | cells). | | | |
| 249 | HJACG02 | Immune | Highly preferred indications include immunological disorders such as | Jurkat | Rag2 | gb\|AY011962\| |
| | | | described herein under the heading “Immune Activity” and/or “Blood- | | TNF | AY011962 |
| | | | Related Disorders” (particularly including, but not limited to, immune | | | gb\|AJ270944\| |
| | | | disorders involving T-cells). Highly preferred embodiments of the | | | HSA27094 |
| | | | invention include methods of preventing, detecting, diagnosing, | | | |
| | | | treating and/or ameliorating disorders of the immune system | | | |
| | | | (particularly including, but not limited to, immune disorders involving | | | |
| | | | T-cells). (The Jurkat cell line is a human T lymphocyte cell line | | | |
| | | | available through the ATCC as cell line number TIB-152). | | | |
| 249 | HJACG02 | Immune | Highly preferred indications include immunological disorders such as | NHDF | Rag1 | gb\|M29474\|HUMRAG1 |
| | | | described herein under the heading “Immune Activity” and/or “Blood- | | | |
| | | | Related Disorders” (particularly including, but not limited to, immune | | | |
| | | | disorders involving the skin). Highly preferred embodiments of the | | | |
| | | | invention include methods of preventing, detecting, diagnosing, | | | |
| | | | treating and/or ameliorating disorders of the immune system | | | |
| | | | (particularly including, but not limited to, immune disorders involving | | | |
| | | | the skin). (NHDF cells are normal human dermal fibroblasts). | | | |
| 249 | HJACG02 | Immune | Highly preferred indications include immunological disorders such as | U937 | GATA1 | gb\|X17254\|HSERYF1 |
| | | | described herein under the heading “Immune Activity” and/or “Blood- | | IL5 | gb\|X12705\|HSBCDFIA |
| | | | Related Disorders” (particularly including, but not limited to, immune | | TNF | gb\|AJ270944\| |
| | | | disorders involving monocytes). Highly preferred embodiments of the | | | HSA27094 |
| | | | invention include methods of preventing, detecting, diagnosing, | | | |
| | | | treating and/or ameliorating disorders of the immune system | | | |
| | | | (particularly including, but not limited to, immune disorders involving | | | |
| | | | monocytes). (The U937 cell line is a human monocyte cell line | | | |
| | | | available throuh the ATCC as cell line number CRL-1593.2). | | | |
| 265 | HKACD58 | Angiogenesis | Highly preferred indications include diagnosis, prevention, treatment, | AOSMC | VCAM | gb\|A30922\|A30922 |
| | | | and/or amelioration of diseases and disorders involving angiogenesis, | | Vegf1 | gb\|AF024710\| |
| | | | wound healing, neoplasia (particularly including, but not limited to, | | | AF024710 |
| | | | tumor metastases), and cardiovascular diseases and disorders; as | | | |
| | | | described herein under the headings “Hyperproliferative Disorders,” | | | |
| | | | “Regeneration,” “Anti-Angiogenesis Activity,” “Diseases at the | | | |
| | | | Cellular Level,” and “Wound Healing and Epithelial Cell | | | |
| | | | Proliferation.” (AOSMC cells are aortic smooth muscle cells). | | | |
| 265 | HKACD58 | Angiogenesis | Highly preferred indications include diagnosis, prevention, treatment, | HEK293 | TSP-1 | gb\|X04665\|HSTHROMR |
| | | | and/or amelioration of diseases and disorders involving angiogenesis, | | Vegf1 | gb\|AF024710\| |
| | | | wound healing, neoplasia (particularly including, but not limited to, | | | AF024710 |
| | | | tumor metastases), and cardiovascular diseases and disorders; as | | | |
| | | | described herein under the headings “Hyperproliferative Disorders,” | | | |
| | | | “Regeneration,” “Anti-Angiogenesis Activity,” “Diseases at the | | | |
| | | | Cellular Level,” and “Wound Healing and Epithelial Cell | | | |
| | | | Proliferation.” (The HEK293 cell line is a human embryonal kidney | | | |
| | | | epithelial cell line available through the ATCC as cell line number | | | |
| | | | CRL-1573). | | | |
| 265 | HKACD58 | Angiogenesis | Highly preferred indications include diagnosis, prevention, treatment, | HUVEC | ICAM | gb\|X06990\|HSICAM1 |
| | | | and/or amelioration of diseases and disorders involving angiogenesis, | | | |
| | | | wound healing, neoplasia (particularly including, but not limited to, | | | |
| | | | tumor metastases), and cardiovascular diseases and disorders; as | | | |
| | | | described herein under the headings “Hyperproliferative Disorders,” | | | |
| | | | “Regeneration,” “Anti-Angiogenesis Activity,” “Diseases at the | | | |
| | | | Cellular Level,” and “Wound Healing and Epithelial Cell | | | |
| | | | Proliferation.” (HUVEC cells are human umbilical vein endothelial | | | |
| | | | cells). | | | |
| 265 | HKACD58 | Angiogenesis | Highly preferred indications include diagnosis, prevention, treatment, | NHDF | VCAM | gb\|A30922\|A30922 |
| | | | and/or amelioration of diseases and disorders involving angiogenesis, | | | |
| | | | wound healing, neoplasia (particularly including, but not limited to, | | | |
| | | | tumor metastases), and cardiovascular diseases and disorders; as | | | |
| | | | described herein under the headings “Hyperproliferative Disorders,” | | | |
| | | | “Regeneration,” “Anti-Angiogenesis Activity,” “Diseases at the | | | |
| | | | Cellular Level,” and “Wound Healing and Epithelial Cell | | | |
| | | | Proliferation.” (NHDF cells are normal human dermal fibroblasts). | | | |
| 265 | HKACD58 | Cancer | Highly preferred indications include neoplastic diseases (e.g. cancer) | AOSMC | Cyclin D2 | gb\|X68452\|HSCYCD2 |
| | | | such as described herein under the heading “Hyperproliferative | | | |
| | | | Disordersî (particularly including, but not limited to, cancers of muscle | | | |
| | | | tissues and the cardiovascular system (e.g. heart, lungs, circulatory | | | |
| | | | system)). Highly preferred embodiments of the invention include | | | |
| | | | methods of preventing, detecting, diagnosing, treating and/or | | | |
| | | | ameliorating cancer and hyperproliferative disorders. (AOSMC cells | | | |
| | | | are aortic smooth muscle cells). | | | |
| 265 | HKACD58 | Cancer | Highly preferred indications include neoplastic diseases (e.g. cancer) | Daudi | c-jun | gb\|BC006175\| |
| | | | such as described herein under the heading “Hyperproliferative | | | BC006175 |
| | | | Disordersî (particularly including, but not limited to, cancers of | | | |
| | | | immune cells, such as B-cells). Highly preferred embodiments of the | | | |
| | | | invention include methods of preventing, detecting, diagnosing, | | | |
| | | | treating and/or ameliorating cancer and hyperproliferative disorders | | | |
| | | | involving immune cells (such as B-cells). (The Daudi cell line is a | | | |
| | | | human B lymphoblast cell line available through the ATCC as cell line | | | |
| | | | number CCL-213). | | | |
| 265 | HKACD58 | Cancer | Highly preferred indications include neoplastic diseases (e.g. cancer) | HEK293 | bcl-2 | gb\|X06487\|HSBCL2IG |
| | | | such as described herein under the heading “Hyperproliferative | | DHFR | gb\|V00507\|HSDHFR |
| | | | Disordersî (particularly including, but not limited to, cancers of | | p21 | gb\|BC000275\| |
| | | | epithelial cells or cancers involving the renal system). Highly | | U66469 | BC000275 |
| | | | preferred embodiments of the invention include methods of | | p53 | |
| | | | preventing, detecting, diagnosing, treating and/or ameliorating cancer | | regulated | |
| | | | and hyperproliferative disorders involving epithelial cells or the renal | | gene | |
| | | | system. (The 293 cell line human embryonal kidney epithelial cell line | | | |
| | | | available through the ATCC as cell line number CRL-1573). | | | |
| 265 | HKACD58 | Cancer | Highly preferred indications include neoplastic diseases (e.g. cancer) | HUVEC | U66469 | |
| | | | such as described herein under the heading “Hyperproliferative | | p53 | |
| | | | Disordersî (particularly including, but not limited to, cancers involving | | regulated | |
| | | | endothelial cells). Highly preferred embodiments of the invention | | gene | |
| | | | include methods of preventing, detecting, diagnosing, treating and/or | | | |
| | | | ameliorating cancer and hyperproliferative disorders involving | | | |
| | | | endothelial cells. (HUVEC cells are human umbilical vein endothelial | | | |
| | | | cells). | | | |
| 265 | HKACD58 | Cancer | Highly preferred indications include neoplastic diseases (e.g. cancer) | Jurkat | Cyclin D2 | gb\|X68452\|HSCYCD2 |
| | | | such as described herein under the heading “Hyperproliferative | | | |
| | | | Disordersî (particularly including, but not limited to, cancers of | | | |
| | | | immune cells, such as T-cells). Highly preferred embodiments of the | | | |
| | | | invention include methods of preventing, detecting, diagnosing, | | | |
| | | | treating and/or ameliorating cancer and hyperproliferative disorders | | | |
| | | | involving immune cells (such as T-cells). (The Jurkat cell line is a | | | |
| | | | human T lymphocyte cell line available through the ATCC as cell line | | | |
| | | | number TIB-152). | | | |
| 265 | HKACD58 | Cancer | Highly preferred indications include neoplastic diseases (e.g. cancer) | Liver | Cyclin D3 | gb\|AR034832\| |
| | | | such as described herein under the heading “Hyperproliferative | | Egr1 | AR034832 |
| | | | Disordersî (particularly including, but not limited to, cancers involving | | | |
| | | | cells of the hepatic system). Highly preferred embodiments of the | | | |
| | | | invention include methods of preventing, detecting, diagnosing, | | | |
| | | | treating and/or ameliorating cancer and hyperproliferative disorders | | | |
| | | | involving cells of the hepatic system. | | | |
| 265 | HKACD58 | Cancer | Highly preferred indications include neoplastic diseases (e.g. cancer) | THP1 | Cyclin D | gb\|BC000076\| |
| | | | such as described herein under the heading “Hyperproliferative | | p21 | BC000076 |
| | | | Disordersî (particularly including, but not limited to, cancers of | | | gb\|BC000275\| |
| | | | immune cells, such as monocytes). Highly preferred embodiments of | | | BC000275 |
| | | | the invention include methods of preventing, detecting, diagnosing, | | | |
| | | | treating and/or ameliorating cancer and hyperproliferative disorders | | | |
| | | | involving cells of the immune system (such as monocytes). (The THP- | | | |
| | | | 1 cell line is a human monocyte cell line available through the ATCC | | | |
| | | | as cell line number TIB-202). | | | |
| 265 | HKACD58 | Cancer | Highly preferred indications include neoplastic diseases (e.g. cancer) | U937 | c-jun | gb\|BC006175\| |
| | | | such as described herein under the heading “Hyperproliferative | | Cyclin A1 | BC006175 |
| | | | Disordersî (particularly including, but not limited to, cancers of | | | gb\|U97680\|HSU97680 |
| | | | immune cells, such as monocytes). Highly preferred embodiments of | | | |
| | | | the invention include methods of preventing, detecting, diagnosing, | | | |
| | | | treating and/or ameliorating cancer and hyperproliferative disorders | | | |
| | | | involving cells of the immune system (such as monocytes). (The U-937 | | | |
| | | | cell line is a human monocyte cell line available through the ATCC as | | | |
| | | | cell line number CRL-1593.2 | | | |
| 265 | HKACD58 | Immune | Highly preferred indications include immunological disorders such as | AOSMC | VCAM | gb\|A30922\|A |
| | | | described herein under the heading “Immune Activity” and/or “Blood- | | | 30922 |
| | | | Related Disorders” (particularly including, but not limited to, immune | | | |
| | | | disorders involving muscle tissues and the cardiovascular system (e.g. | | | |
| | | | heart, lungs, circulatory system)). Highly preferred embodiments of | | | |
| | | | the invention include methods of preventing, detecting, diagnosing, | | | |
| | | | treating and/or ameliorating disorders of the immune system | | | |
| | | | (particularly including, but not limited to, immune disorders involving | | | |
| | | | muscle tissue or the cardiovascular system). (AOSMC cells are | | | |
| | | | human aortic smooth muscle cells). | | | |
| 265 | HKACD58 | Immune | Highly preferred indications include immunological disorders such as | Daudi | CD40 | gb\|AJ300189\| |
| | | | described herein under the heading “Immune Activity” and/or “Blood- | | | HSA30018 |
| | | | Related Disorders” (particularly including, but not limited to, immune | | | |
| | | | disorders involving the B-cells). Highly preferred embodiments of the | | | |
| | | | invention include methods of preventing, detecting, diagnosing, | | | |
| | | | treating and/or ameliorating disorders of the immune system | | | |
| | | | (particularly including, but not limited to, immune disorders involving | | | |
| | | | B-cells). (The Daudi cell line is a human B lymphoblast cell line | | | |
| | | | available through the ATCC as cell line number CCL-213). | | | |
| 265 | HKACD58 | Immune | Highly preferred indications include immunological disorders such as | HUVEC | ICAM | gb\|X06990\|HSICAM1 |
| | | | described herein under the heading “Immune Activity” and/or “Blood- | | Rag1 | gb\|M29474\|HUMRAG1 |
| | | | Related Disorders” (particularly including, but not limited to, immune | | | |
| | | | disorders involving endothelial cells). Highly preferred embodiments | | | |
| | | | of the invention include methods of preventing, detecting, diagnosing, | | | |
| | | | treating and/or ameliorating disorders of the immune system | | | |
| | | | (particularly including, but not limited to, immune disorders involving | | | |
| | | | endothelial cells). (HUVEC cells are human umbilical vein endothelial | | | |
| | | | cells). | | | |
| 265 | HKACD58 | Immune | Highly preferred indications include immunological disorders such as | Liver | CD28 | gb\|AF222342\| |
| | | | described herein under the heading “Immune Activity” and/or “Blood- | | | AF222342 |
| | | | Related Disorders” (particularly including, but not limited to, immune | | | |
| | | | disorders involving cells of the hepatic system). Highly preferred | | | |
| | | | embodiments of the invention include methods of preventing, | | | |
| | | | detecting, diagnosing, treating and/or ameliorating disorders of the | | | |
| | | | immune system (particularly including, but not limited to, immune | | | |
| | | | disorders involving cells of the hepatic system). | | | |
| 265 | HKACD58 | Immune | Highly preferred indications include immunological disorders such as | NHDF | CXCR3 | gb\|Z79783\|HSCKRL2 |
| | | | described herein under the heading “Immune Activity” and/or “Blood- | | GATA1 | gb\|X17254\|HSERYF1 |
| | | | Related Disorders” (particularly including, but not limited to, immune | | Il6 | gb\|X04403\|HS26KDAR |
| | | | disorders involving the skin). Highly preferred embodiments of the | | VCAM | gb\|A30922\|A30922 |
| | | | invention include methods of preventing, detecting, diagnosing, | | | |
| | | | treating and/or ameliorating disorders of the immune system | | | |
| | | | (particularly including, but not limited to, immune disorders involving | | | |
| | | | the skin). (NHDF cells are normal human dermal fibroblasts). | | | |
| 265 | HKACD58 | Immune | Highly preferred indications include immunological disorders such as | THP1 | CIS3 | gb\|AB006967\| |
| | | | described herein under the heading “Immune Activity” and/or “Blood- | | | AB006967 |
| | | | Related Disorders” (particularly including, but not limited to, immune | | | |
| | | | disorders involving monocytes). Highly preferred embodiments of the | | | |
| | | | invention include methods of preventing, detecting, diagnosing, | | | |
| | | | treating and/or ameliorating disorders of the immune system | | | |
| | | | (particularly including, but not limited to, immune disorders involving | | | |
| | | | monocytes). (The THP1 cell line is a human monocyte cell line | | | |
| | | | available through the ATCC as cell line number TIB-202). | | | |
| 265 | HKACD58 | Immune | Highly preferred indications include immunological disorders such as | U937 | CD69 | gb\|Z22576\|HSCD69GNA |
| | | | described herein under the heading “Immune Activity” and/or “Blood- | | TNF | gb\|AJ270944\| |
| | | | Related Disorders” (particularly including, but not limited to, immune | | | HSA27094 |
| | | | disorders involving monocytes). Highly preferred embodiments of the | | | |
| | | | invention include methods of preventing, detecting, diagnosing, | | | |
| | | | treating and/or ameliorating disorders of the immune system | | | |
| | | | (particularly including, but not limited to, immune disorders involving | | | |
| | | | monocytes). (The U937 cell line is a human monocyte cell line | | | |
| | | | available through the ATCC as cell line number CRL-1593.2). | | | |
| 281 | HL2AC08 | Cancer | Highly preferred indications include neoplastic diseases (e.g. cancer) | TF-1 | p21 | gb\|BC000275\| |
| | | | such as described herein under the heading “Hyperproliferative | | | BC000275 |
| | | | Disordersî (particularly including, but not limited to cancers involving | | | |
| | | | erythrocytes). Highly preferred embodiments of the invention include | | | |
| | | | methods of preventing, detecting, diagnosing, treating and/or | | | |
| | | | ameliorating cancer and hyperproliferative disorders involving | | | |
| | | | erythrocytes. (The TF-1 cell line is a human erythroblast cell line | | | |
| | | | available through the ATCC as cell line number CRL-2003). | | | |
| 281 | HL2AC08 | Immune | Highly preferred indications include immunological disorders such as | TF-1 | CD69 | gb\|Z22576\|HSCD69GNA |
| | | | described herein under the heading “Immune Activity” and/or “Blood- | | GATA1 | gb\|X17254\|HSERYF1 |
| | | | Related Disorders” (particularly including, but not limited to, immune | | TNF | gb\|AJ270944\| |
| | | | disorders involving erythrocytes). Highly preferred embodiments of | | | HSA27094 |
| | | | the invention include methods of preventing, detecting, diagnosing, | | | |
| | | | treating and/or ameliorating disorders of the immune system | | | |
| | | | (particularly including, but not limited to, immune disorders involving | | | |
| | | | erythrocytes). (The TF-1 cell line is a human erythroblast cell line | | | |
| | | | available through the ATCC as cell line number CRL-2003). | | | |
| 389 | HNHFO29 | Angiogenesis | Highly preferred indications include diagnosis, prevention, treatment, | U937 | Flt1 | gb\|AF063657\| |
| | | | and/or amelioration of diseases and disorders involving angiogenesis, | | ICAM | AF063657 |
| | | | wound healing, neoplasia (particularly including, but not limited to, | | PAI | gb\|X06990\|HSICAM1 |
| | | | tumor metastases), and cardiovascular diseases and disorders; as | | | gb\|X12701\|HSENDPAI |
| | | | described herein under the headings “Hyperproliferative Disorders,” | | | |
| | | | “Regeneration,” “Anti-Angiogenesis Activity,” “Diseases at the | | | |
| | | | Cellular Level,” and “Wound Healing and Epithelial Cell | | | |
| | | | Proliferation. ” (The U937 cell line is a human monocyte cell line | | | |
| | | | available through the ATCC as cell line number CRL-1593.2). | | | |
| 389 | HNHFO29 | Cancer | Highly preferred indications include neoplastic diseases (e.g. cancer) | TF-1 | bcl-2 | gb\|X06487\|HSBCL2IG |
| | | | such as described herein under the heading “Hyperproliferative | | Cyclin D | gb\|BC000076\| |
| | | | Disordersî (particularly including, but not limited to cancers involving | | DHFR | BC000076 |
| | | | erythrocytes). Highly preferred embodiments of the invention include | | Egr1 | gb\|V00507\|HSDHFR |
| | | | methods of preventing, detecting, diagnosing, treating and/or | | | |
| | | | ameliorating cancer and hyperproliferative disorders involving | | | |
| | | | erythrocytes. (The TF-1 cell line is a human erythroblast cell line | | | |
| | | | available through the ATCC as cell line number CRL-2003). | | | |
| 389 | HNHFO29 | Cancer | Highly preferred indications include neoplastic diseases (e.g. cancer) | U937 | Cyclin D | gb\|BC000076\| |
| | | | such as described herein under the heading “Hyperproliferative | | Cyclin D3 | BC000076 |
| | | | Disordersî (particularly including, but not limited to, cancers of | | DHFR | gb\|AR034832\| |
| | | | immune cells, such as monocytes). Highly preferred embodiments of | | | AR034832 |
| | | | the invention include methods of preventing, detecting, diagnosing, | | | gb\|V00507\|HSDHFR |
| | | | treating and/or ameliorating cancer and hyperproliferative disorders | | | |
| | | | involving cells of the immune system (such as monocytes). (THe U- | | | |
| | | | 937 cell line is a human monocyte cell line available through the | | | |
| | | | ATCC as cell line number CRL-1593.2) | | | |
| 389 | HNHFO29 | Immune | Highly preferred indications include immunological disorders such as | TF-1 | CD40 | gb\|AJ300189\| |
| | | | described herein under the heading “Immune Activity” and/or “Blood- | | TNF | HSA30018 |
| | | | Related Disorders” (particularly including, but not limited to, immune | | | gb\|AJ270944\| |
| | | | disorders involving erythrocytes). Highly preferred embodiments of | | | HSA27094 |
| | | | the invention include methods of preventing, detecting, diagnosing, | | | |
| | | | treating and/or ameliorating disorders of the immune system | | | |
| | | | (particularly including, but not limited to, immune disorders involving | | | |
| | | | erythrocytes). (The TF-1 cell line is a human erythroblast cell line | | | |
| | | | available through the ATCC as cell line number CRL-2003). | | | |
| 389 | HNHFO29 | Immune | Highly preferred indications include immunological disorders such as | U937 | ICAM | gb\|X06990\|HSICAM1 |
| | | | described herein under the heading “Immune Activity” and/or “Blood- | | | |
| | | | Related Disorders” (particularly including, but not limited to, immune | | | |
| | | | disorders involving monocytes). Highly preferred embodiments of the | | | |
| | | | invention include methods of preventing, detecting, diagnosing, | | | |
| | | | treating and/or ameliorating disorders of the immune system | | | |
| | | | (particularly including, but not limited to, immune disorders involving | | | |
| | | | monocytes). (The U937 cell line is a human monocyte cell line | | | |
| | | | available through the ATCC as cell line number CRL-1593.2). | | | |
| 495 | HSDSB09 | Angiogenesis | Highly preferred indications include diagnosis, prevention, treatment, | AOSMC | VCAM | gb\|A30922\|A30922 |
| | | | and/or amelioration of diseases and disorders involving angiogenesis, | | | |
| | | | wound healing, neoplasia (particularly including, but not limited to, | | | |
| | | | tumor metastases), and cardiovascular diseases and disorders; as | | | |
| | | | described herein under the headings “Hyperproliferative Disorders,” | | | |
| | | | “Regeneration,” “Anti-Angiogenesis Activity,” “Diseases at the | | | |
| | | | Cellular Level,” and “Wound Healing and Epithelial Cell | | | |
| | | | Proliferation.” (AOSMC cells are nortic smooth muscle cells). | | | |
| 495 | HSDSB09 | Angiogenesis | Highly preferred indications include diagnosis, prevention, treatment, | Caco-2 | ICAM | gb\|X06990\|HSICAM1 |
| | | | and/or amelioration of diseases and disorders involving angiogenesis, | | Vegf1 | gb\|AF024710\| |
| | | | wound healing, neoplasia (particularly including, but not limited to, | | | AF024710 |
| | | | tumor metastases), and cardiovascular diseases and disorders; as | | | |
| | | | described herein under the headings “Hyperproliferative Disorders,” | | | |
| | | | “Regeneration,” ”Anti-Angiogenesis Activity,” “Diseases at the | | | |
| | | | Cellular Level,” and “Wound Healing and Epithelial Cell | | | |
| | | | Proliferation.” (The Caco-2 cell line is a human colorectal | | | |
| | | | adenocarcinoma cell line available through the ATCC as cell line | | | |
| | | | number HTB-37). | | | |
| 495 | HSDSB09 | Angiogenesis | Highly preferred indications include diagnosis, prevention, treatment, | HEK293 | Cycloox | gb\|A30922\|A30922 |
| | | | and/or amelioration of diseases and disorders involving angiogenesis, | | VCAM | |
| | | | wound healing, neoplasia (particularly including, but not limited to, | | | |
| | | | tumor metastases), and cardiovascular diseases and disorders; as | | | |
| | | | described herein under the headings “Hyperproliferative Disorders,” | | | |
| | | | “Regeneration,” “Anti-Angiogenesis Activity,” “Diseases at the | | | |
| | | | Cellular Level,” and “Wound Healing and Epithelial Cell | | | |
| | | | Proliferation.” (The HEK293 cell line is a human embryonal kidney | | | |
| | | | epithelial cell line available through the ATCC as cell line number | | | |
| | | | CRL-1573). | | | |
| 495 | HSDSB09 | Angiogenesis | Highly preferred indications include diagnosis, prevention, treatment, | HUVEC | ICAM | gb\|X06990\|HSICAM1 |
| | | | and/or amelioration of diseases and disorders involving angiogenesis, | | Vegf1 | gb\|AF024710\| |
| | | | wound healing, neoplasia (particularly including, but not limited to, | | | AF024710 |
| | | | tumor metastases), and cardiovascular diseases and disorders; as | | | |
| | | | described herein under the headings “Hyperproliferative Disorders,” | | | |
| | | | “Regeneration,” “Anti-Angiogenesis Activity,” “Diseases at the | | | |
| | | | Cellular Level,“ and ”Wound Healing and Epithelial Cell | | | |
| | | | Proliferation.” (HUVEC cells are human umbilical vein endothelial | | | |
| | | | cells). | | | |
| 495 | HSDSB09 | Angiogenesis | Highly preferred indications include diagnosis, prevention, treatment, | Jurkat | Flt1 | gb\|AF063657\| |
| | | | and/or amelioration of diseases and disorders involving angiogenesis, | | | AF063657 |
| | | | wound healing, neoplasia (particularly including, but not limited to, | | | |
| | | | tumor metastases), and cardiovascular diseases and disorders; as | | | |
| | | | described herein under the headings “Hyperproliferative Disorders,” | | | |
| | | | “Regeneration,” “Anti-Angiogenesis Activity,” “Diseases at the | | | |
| | | | Cellular Level,” and “Wound Healing and Epithelial Cell | | | |
| | | | Proliferation.” (The Jurkat cell line is a human T lymphocyte cell line | | | |
| | | | available through the ATCC as cell line number TIB-152). | | | |
| 495 | HSDSB09 | Angiogenesis | Highly preferred indications include diagnosis, prevention, treatment, | Molt4 | iNOS | gb\|X85761\|HSNOS2E3 |
| | | | and/or amelioration of diseases and disorders involving angiogenesis, | | | |
| | | | wound healing, neoplasia (particularly including, but not limited to, | | | |
| | | | tumor metastases), and cardiovascular diseases and disorders; as | | | |
| | | | described herein under the headings “Hyperproliferative Disorders,” | | | |
| | | | “Regeneration,” “Anti-Angiogenesis Activity,” “Diseases at the | | | |
| | | | Cellular Level,” and “Wound Healing and Epithelial Cell | | | |
| | | | Proliferation.” (The Molt4 cell line is a human T cell line available | | | |
| | | | through the ATCC as cell line number CRL-1582). | | | |
| 495 | HSDSB09 | Angiogenesis | Highly preferred indications include diagnosis, prevention, treatment, | NHDF | Vegf1 | gb\|AF024710\| |
| | | | and/or amelioration of diseases and disorders involving angiogenesis, | | | AF024710 |
| | | | wound healing, neoplasia (particularly including, but not limited to, | | | |
| | | | tumor metastases), and cardiovascular diseases and disorders; as | | | |
| | | | described herein under the headings “Hyperproliferative Disorders,” | | | |
| | | | “Regeneration,” “Anti-Angiogenesis Activity,” “Diseases at the | | | |
| | | | Cellular Level,” and “Wound Healing and Epithelial Cell | | | |
| | | | Proliferation.” (NHDF cells are normal human dermal fibroblasts). | | | |
| 495 | HSDSB09 | Angiogenesis | Highly preferred indications include diagnosis, prevention, treatment, | SUPT | VCAM | gb\|A30922\|A30922 |
| | | | and/or amelioration of diseases and disorders involving angiogenesis, | | | |
| | | | wound healing, neoplasia (particularly including, but not limited to, | | | |
| | | | tumor metastases), and cardiovascular diseases and disorders; as | | | |
| | | | described herein under the headings “Hyperproliferative Disorders,” | | | |
| | | | “Regeneration,” “Anti-Angiogenesis Activity,” “Diseases at the | | | |
| | | | Cellular Level,” and “Wound Healing and Epithelial Cell | | | |
| | | | Proliferation.” (SUPT cells are human T-cells). | | | |
| 495 | HSDSB09 | Angiogenesis | Highly preferred indications include diagnosis, prevention, treatment, | THP1 | ICAM | gb\|X06990\|HSICAM1 |
| | | | and/or amelioration of diseases and disorders involving angiogenesis, | | TSP-1 | gb\|X04665\|HSTHROMR |
| | | | wound healing, neoplasia (particularly including, but not limited to, | | VCAM | gb\|A30922\|A30922 |
| | | | tumor metastases), and cardiovascular diseases and disorders; as | | Vegf1 | gb\|AF024710\| |
| | | | described herein under the headings “Hyperproliferative Disorders,” | | | AF024710 |
| | | | “Regeneration,” “Anti-Angiogenesis Activity,” “Diseases at the | | | |
| | | | Cellular Level,” and “Wound Healing and Epithelial Cell | | | |
| | | | Proliferation.” (The THP-1 cell line is a human monocyte cell line | | | |
| | | | available through the ATCC as cell line number TIB-202). | | | |
| 495 | HSDSB09 | Cancer | Highly preferred indications include neoplastic diseases (e.g. cancer) | AOSMC | bcl-2 | gb\|X06487\|HSBCL2IG |
| | | | such as described herein under the heading “Hyperproliferative | | Cyclin A1 | gb\|U97680\|HSU97680 |
| | | | Disordersî (particularly including, but not limited to, cancers of muscle | | M1 RIBO R | gb\|X59543\|HSRIREM1 |
| | | | tissues and the cardiovascular system (e.g. heart, lungs, circulatory | | | |
| | | | system)). Highly preferred embodiments of the invention include | | | |
| | | | methods of preventing, detecting, diagnosing, treating and/or | | | |
| | | | ameliorating cancer and hyperproliferative disorders. (AOSMC cells | | | |
| | | | are aortic smooth muscle cells). | | | |
| 495 | HSDSB09 | Cancer | Highly preferred indications include neoplastic diseases (e.g. cancer) | Caco-2 | DHFR | gb\|V00507\|HSDHFR |
| | | | such as described herein under the heading “Hyperproliferative | | Egr1 | gb\|X60011\|HSP53002 |
| | | | Disordersî (particularly including, but not limited to, cancer involving | | p53 | |
| | | | cells of the gastrointestinal tract). Highly preferred embodiments of | | U66469 | |
| | | | the invention include methods of preventing, detecting, diagnosing, | | p53 | |
| | | | treating and/or ameliorating cancer and hyperproliferative disorders | | regulated | |
| | | | involving the gastrointestinal tract. (The Caco-2 cell line is a human | | gene | |
| | | | colorectal adenocarcinoma cell line available through the ATCC as | | | |
| | | | cell line number HTB-37). | | | |
| 495 | HSDSB09 | Cancer | Highly preferred indications include neoplastic diseases (e.g. cancer) | H9 | DHFR | gb\|V00507\|HSDHFR |
| | | | such as described herein under the heading “Hyperproliferative | | U66469 | |
| | | | Disordersî (particularly including, but not limited to, cancers of | | p53 | |
| | | | immune cells, such as T-cells). Highly preferred embodiments of the | | regulated | |
| | | | invention include methods of preventing, detecting, diagnosing, | | gene | |
| | | | treating and/or ameliorating cancer and hyperproliferative disorders | | | |
| | | | involving immune cells (such as T-cells). (The H9 cell line is a human | | | |
| | | | T lymphocyte cell line available through the ATCC as cell line number | | | |
| | | | HTB-176). | | | |
| 495 | HSDSB09 | Cancer | Highly preferred indications include neoplastic diseases (e.g. cancer) | HEK293 | bcl-2 | gb\|X06487\|HSBCL2IG |
| | | | such as described herein under the heading “Hyperproliferative | | Cyclin D | gb\|BC00076\| |
| | | | Disordersî (particularly including, but not limited to, cancers of | | E- | BC000076 |
| | | | epithelial cells or cancers involving the renal system). Highly | | cadherin | gb\|Z35408\|HSECAD9 |
| | | | preferred embodiments of the invention include methods of | | M1 RIBO R | gb\|X59543\|HSRIREM1 |
| | | | preventing, detecting, diagnosing, treating and/or ameliorating cancer | | | |
| | | | and hyperproliferative disorders involving epithelial cells or the renal | | | |
| | | | system. (The 293 cell line human embryonal kidney epithelial cell line | | | |
| | | | available through the ATCC as cell line number CRL-1573). | | | |
| 495 | HSDSB09 | Cancer | Highly preferred indications include neoplastic diseases (e.g. cancer) | HUVEC | Cyclin D2 | gb\|X68452\|HSCYCD2 |
| | | | such as described herein under the heading “Hyperproliferative | | | |
| | | | Disordersî (particularly including, but not limited to, cancers involving | | | |
| | | | endothelial cells). Highly preferred embodiments of the invention | | | |
| | | | include methods of preventing, detecting, diagnosing, treating and/or | | | |
| | | | ameliorating cancer and hyperproliferative disorders involving | | | |
| | | | endothelial cells. (HUVEC cells are human umbilical vein endothelial | | | |
| | | | cells). | | | |
| 495 | HSDSB09 | Cancer | Highly preferred indications include neoplastic diseases (e.g. cancer) | Jurkat | Cyclin A1 | gb\|U97680\|HSU97680 |
| | | | such as described herein under the heading “Hyperproliferative | | Cyclin D | gb\|BC000076\| |
| | | | Disordersî (particularly including, but not limited to, cancers of | | Cyclin D2 | BC000076 |
| | | | immune cells, such as T-cells). Highly preferred embodiments of the | | Cyclin D3 | gb\|X68452\|HSCYCD2 |
| | | | invention include methods of preventing, detecting, diagnosing, | | DHFR | gb\|AR034832\| |
| | | | treating and/or ameliorating cancer and hyperproliferative disorders | | Egr1 | AR034832 |
| | | | involving immune cells (such as T-cells). (The Jurkat cell line is a | | | gb\|V00507\|HSDHFR |
| | | | human T lymphocyte cell line available through the ATCC as cell line | | | |
| | | | number TIB-152). | | | |
| 495 | HSDSB09 | Cancer | Highly preferred indications include neoplastic diseases (e.g. cancer) | Liver | Cyclin D2 | gb\|X68452\|HSCYCD2 |
| | | | such as described herein under the heading “Hyperproliferative | | DHFR | gb\|V00507\|HSDHFR |
| | | | Disordersî (particularly including, but not limited to, cancers involving | | | |
| | | | cells of the hepatic system). Highly preferred embodiments of the | | | |
| | | | invention include methods of preventing, detecting, diagnosing, | | | |
| | | | treating and/or ameliorating cancer and hyperproliferative disorders | | | |
| | | | involving cells of the hepatic system. | | | |
| 495 | HSDSB09 | Cancer | Highly preferred indications include neoplastic diseases (e.g. cancer) | Molt4 | Cyclin D2 | gb\|X68452\|HSCYCD2 |
| | | | such as described herein under the heading “Hyperproliferative | | p21 | gb\|BC000275\| |
| | | | Disordersî (particularly including, but not limited to, cancers of | | | BC000275 |
| | | | immune cells, such as T-cells). Highly preferred embodiments of the | | | |
| | | | invention include methods of preventing, detecting, diagnosing, | | | |
| | | | treating and/or ameliorating cancer and hyperproliferative disorders | | | |
| | | | involving immune cells (such as T-cells). (The Molt-4 cell line is a | | | |
| | | | human I-cell line available through the ATCC as cell line number | | | |
| | | | CRL-1582). | | | |
| 495 | HSDSB09 | Cancer | Highly preferred indications include neoplastic diseases (e.g. cancer) | NHDF | U66469 | |
| | | | such as described herein under the heading “Hyperproliferative | | p53 | |
| | | | Disordersî (particularly including, but not limited to cancers involving | | regulated | |
| | | | cells of the skin). Highly preferred embodiments of the invention | | gene | |
| | | | include methods of preventing, detecting, diagnosing, treating and/or | | | |
| | | | ameliorating cancer and hyperproliferative disorders involving skin | | | |
| | | | cells. (NHDF cells are normal human dermal fibroblasts). | | | |
| 495 | HSDSB09 | Cancer | Highly preferred indications include neoplastic diseases (e.g. cancer) | SK-N-MC | Cyclin A1 | gb\|U97680\|HSU97680 |
| | | | such as described herein under the heading “Hyperproliferative | neuroblastoma | Egr1 | gb\|X60011\|HSP53002 |
| | | | Disordersî (particularly including, but not limited to cancers involving | | p53 | |
| | | | cells of the brain/central nervous system (e.g. neural epithelium)). | | U66469 | |
| | | | Highly preferred embodiments of the invention include methods of | | p53 | |
| | | | preventing, detecting, diagnosing, treating and/or ameliorating cancer | | regulated | |
| | | | and hyperproliferative disorders involving the brain or central nervous | | gene | |
| | | | system. (The SK-N-MC neuroblastoma cell line is a cell line derived | | | |
| | | | from human brain tissue available through the ATCC as cell line | | | |
| | | | number HTB-10). | | | |
| 495 | HSDSB09 | Cancer | Highly preferred indications include neoplastic diseases (e.g. cancer) | THP1 | Cyclin D | gb\|BC000076\| |
| | | | such as described herein under the heading “Hyperproliferative | | DHFR | BC000076 |
| | | | Disordersî (particularly including, but not limited to, cancers of | | Egr1 | gb\|V00507\|HSDHFR |
| | | | immune cells, such as monocytes). Highly preferred embodiments of | | p21 | gb\|BC000275\| |
| | | | the invention include methods of preventing, detecting, diagnosing, | | U66469 | BC000275 |
| | | | treating and/or ameliorating cancer and hyperproliferative disorders | | p53 | |
| | | | involving cells of the immune system (such as monocytes). (The THP-1 | | regulated | |
| | | | cell line is a human monocyte cell line available through the ATCC | | gene | |
| | | | as cell line number TIB-202). | | | |
| 495 | HSDSB09 | Cancer | Highly preferred indications include neoplastic diseases (e.g. cancer) | U937 | Egr1 | |
| | | | such as described herein under the heading “Hyperproliferative | | | |
| | | | Disordersî (particularly including, but not limited to, cancers of | | | |
| | | | immune cells, such as monocytes). Highly preferred embodiments of | | | |
| | | | the invention include methods of preventing, detecting, diagnosing, | | | |
| | | | treating and/or ameliorating cancer and hyperproliferative disorders | | | |
| | | | involving cells of the immune system (such as monocytes). (The U-937 | | | |
| | | | cell line is a human monocyte cell line available through the ATCC as | | | |
| | | | cell line number CRL-1593.2) | | | |
| 495 | HSDSB09 | Immune | Highly preferred indications include immunological disorders such as | AOSMC | CCR3 | gb\|AB023887\| |
| | | | described herein under the heading “Immune Activity” and/or “Blood- | | CCR4 | AB023887 |
| | | | Related Disorders” (particularly including, but not limited to, immune | | CD25 | gb\|A023888\| |
| | | | disorders involving muscle tissues and the cardiovascular system (e.g. | | CD30 | AB023888 |
| | | | heart, lungs, circulatory system)). Highly preferred embodiments of | | CD40 | gb\|X03137\|HSIL2RG7 |
| | | | the invention include methods of preventing, detecting, diagnosing, | | CTLA4 | gb\|AJ300189\| |
| | | | treating and/or ameliorating disorders of the immune system | | IL5 | HSA30018 |
| | | | (particularly including, but not limited to, immune disorders involving | | Rag1 | gb\|AF316875\| |
| | | | muscle tissue or the cardiovascular system). (AOSMC cells are | | VCAM | AF316875 |
| | | | human aortic smooth muscle cells). | | | gb\|X12705\|HSBCDFIA |
| | | | | | | gb\|M29474\|HUMRAG1 |
| | | | | | | gb\|A30922\|A30922 |
| 495 | HSDSB09 | Immune | Highly preferred indications include immunological disorders such as | Caco-2 | c-maf | gb\|AF055377\| |
| | | | described herein under the heading “Immune Activity” and/or “Blood- | | GATA3 | AF055377 |
| | | | Related Disorders” (particularly including, but not limited to, immune | | ICAM | gb\|X55037\|HSGATA3 |
| | | | disorders involving the cells of the gastrointestinal tract). Highly | | Rag1 | gb\|X06990\|HSICAM1 |
| | | | preferred embodiments of the invention include methods of | | | gb\|M29474\|HUMRAG1 |
| | | | preventing, detecting, diagnosing, treating and/or ameliorating | | | |
| | | | disorders of the immune system (particularly including, but not limited | | | |
| | | | to, immune disorders involving cells of the gastrointestinal tract). (The | | | |
| | | | Caco-2 cell line is a human colorectal adenocarcinoma cell line | | | |
| | | | available through the ATCC as cell line number HTB-37). | | | |
| 495 | HSDSB09 | Immune | Highly preferred indications include immunological disorders such as | Daudi | TNF | gb\|AJ270944\| |
| | | | described herein under the heading “Immune Activity” and/or “Blood- | | | HSA27094 |
| | | | Related Disorders” (particularly including, but not limited to, immune | | | |
| | | | disorders involving the B-cells). Highly preferred embodiments of the | | | |
| | | | invention include methods of preventing, detecting, diagnosing, | | | |
| | | | treating and/or ameliorating disorders of the immune system | | | |
| | | | (particularly including, but not limited to, immune disorders involving | | | |
| | | | B-cells). (The Daudi cell line is a human B lymphoblast cell line | | | |
| | | | available through the ATCC as cell line number CCL-213). | | | |
| 495 | HSDSB09 | Immune | Highly preferred indications include immunological disorders such as | H9 | CIS3 | gb\|AB006967\| |
| | | | described herein under the heading “Immune Activity” and/or “Blood- | | Rag1 | AB006967 |
| | | | Related Disorders” (particularly including, but not limited to, immune | | | gb\|M29474\|HUMRAG1 |
| | | | disorders involving the T-cells). Highly preferred embodiments of the | | | |
| | | | invention include methods of preventing, detecting, diagnosing, | | | |
| | | | treating and/or ameliorating disorders of the immune system | | | |
| | | | (particularly including, but not limited to, immune disorders involving | | | |
| | | | T-cells). (The H9 cell line is a human T lymphocyte cell line available | | | |
| | | | through the ATCC as cell line number HTB-176). | | | |
| 495 | HSDSB09 | Immune | Highly preferred indications include immunological disorders such as | HEK293 | CCR3 | gb\|AB023887\| |
| | | | described herein under the heading “Immune Activity” and/or “Blood- | | CCR4 | AB023887 |
| | | | Related Disorders” (particularly including, but not limited to, immune | | CD25 | gb\|AB023888\| |
| | | | disorders involving epithelial cells or the renal system). Highly | | CD30 | AB023888 |
| | | | preferred embodiments of the invention include methods of | | CD40 | gb\|X03137\|HSIL2RG7 |
| | | | preventing, detecting, diagnosing, treating and/or ameliorating | | CTLA4 | gb\|AJ300189\| |
| | | | disorders of the immune system (particularly including, but not limited | | GATA3 | HSA30018 |
| | | | to, immune disorders involving epithelial cells or the renal system). | | Rag1 | gb\|AF316875\| |
| | | | (The 293 cell line is a human embryonal kidney epithelial cell line | | TNF | AF316875 |
| | | | available through the ATCC as cell line number CRL-1573). | | VCAM | gb\|X55037\|HSGATA3 |
| | | | | | | gb\|M29474\|HUMRAG1 |
| | | | | | | gb\|AJ270944\| |
| | | | | | | HSA27094 |
| | | | | | | gb\|A30922\|A30922 |
| 495 | HSDSB09 | Immune | Highly preferred indications include immunological disorders such as | HUVEC | CD40 | gb\|AJ300189\| |
| | | | described herein under the heading “Immune Activity” and/or “Blood- | | ICAM | HSA30018 |
| | | | Related Disorders” (particularly including, but not limited to, immune | | IL10 | gb\|X06990\|HSICAM1 |
| | | | disorders involving endothelial cells). Highly preferred embodiments | | Rag1 | gb\|AF055467\| |
| | | | of the invention include methods of preventing, detecting, diagnosing, | | Rag2 | AF055467 |
| | | | treating and/or ameliorating disorders of the immune system | | TNF | gb\|M29474\|HUMRAG1 |
| | | | (particularly including, but not limited to, immune disorders involving | | | gb\|AY011962\| |
| | | | endothelial cells). (HUVEC cells are human umbilical vein endothelial | | | AY011962 |
| | | | cells). | | | gb\|AJ270944\| |
| | | | | | | HSA27094 |
| 495 | HSDSB09 | Immune | Highly preferred indications include immunological disorders such as | Jurkat | CD69 | gb\|Z22576\|HSCD69GNA |
| | | | described herein under the heading “Immune Activity” and/or “Blood- | | IL5 | gb\|X12705\|HSBCDFIA |
| | | | Related Disorders” (particularly including, but not limited to, immune | | Rantes | gb\|AF043341\| |
| | | | disorders involving T-cells). Highly preferred embodiments of the | | TNF | AF043341 |
| | | | invention include methods of preventing, detecting, diagnosing, | | | gb\|AJ270944\| |
| | | | treating and/or ameliorating disorders of the immune system | | | HSA27094 |
| | | | (particularly including, but not limited to, immune disorders involving | | | |
| | | | T-cells). (The Jurkat cell line is a human T lymphocyte cell line | | | |
| | | | available through the ATCC as cell line number TIB-152). | | | |
| 495 | HSDSB09 | Immune | Highly preferred indications include immunological disorders such as | Liver | CD25 | gb\|X03137\|HSIL2RG7 |
| | | | described herein under the heading “Immune Activity” and/or “Blood- | | | |
| | | | Related Disorders” (particularly including, but not limited to, immune | | | |
| | | | disorders involving cells of the hepatic system). Highly preferred | | | |
| | | | embodiments of the invention include methods of preventing, | | | |
| | | | detecting, diagnosing, treating and/or ameliorating disorders of the | | | |
| | | | immune system (particularly including, but not limited to, immune | | | |
| | | | disorders involving cells of the hepatic system). | | | |
| 495 | HSDSB09 | Immune | Highly preferred indications include immunological disorders such as | Molt4 | CD28 | gb\|AF222342\| |
| | | | described herein under the heading “Immune Activity” and/or “Blood- | | | AF222342 |
| | | | Related Disorders” (particularly including, but not limited to, immune | | | |
| | | | disorders involving T-cells). Highly preferred embodiments of the | | | |
| | | | invention include methods of preventing, detecting, diagnosing, | | | |
| | | | treating and/or ameliorating disorders of the immune system | | | |
| | | | (particularly including, but not limited to, immune disorders involving | | | |
| | | | T-cells). (The Molt-4 cell line is a human T-cell line available through | | | |
| | | | the ATCC as cell line number CRL-1582). | | | |
| 495 | HSDSB09 | Immune | Highly preferred indications include immunological disorders such as | NHDF | CD28 | gb\|AF222342\| |
| | | | described herein under the heading “Immune Activity” and/or “Blood- | | CD40 | AF222342 |
| | | | Related Disorders” (particularly including, but not limited to, immune | | Il6 | gb\|AJ300189\| |
| | | | disorders involving the skin). Highly preferred embodiments of the | | | HSA30018 |
| | | | invention include methods of preventing, detecting, diagnosing, | | | gb\|X04403\|HS26KDAR |
| | | | treating and/or ameliorating disorders of the immune system | | | |
| | | | (particularly including, but not limited to, immune disorders involving | | | |
| | | | the skin). (NHDF cells are normal human dermal fibroblasts). | | | |
| 495 | HSDSB09 | Immune | Highly preferred indications include immunological disorders such as | SK-N-MC | c-maf | gb\|AF055377\| |
| | | | described herein under the heading “Immune Activity” and/or “Blood- | neuroblastoma | CIS3 | AF055377 |
| | | | Related Disorders” (particularly including, but not limited to, immune | | TNF | gb\|AB006967\| |
| | | | disorders involving the central nervous system). Highly preferred | | | AB006967 |
| | | | embodiments of the invention include methods of preventing, | | | gb\|AJ270944\| |
| | | | detecting, diagnosing, treating and/or ameliorating disorders of the | | | HSA27094 |
| | | | immune system (particularly including, but not limited to, immune | | | |
| | | | disorders involving the central nervous sytem). (The SK-N-MC | | | |
| | | | neuroblastoma cell line is a cell line derived from human brain tissue | | | |
| | | | and is available through the ATCC as cell line number HTB-10). | | | |
| 495 | HSDSB09 | Immune | Highly preferred indications include immunological disorders such as | SUPT | TNF | gb\|AJ270944\| |
| | | | described herein under the heading “Immune Activity” and/or “Blood- | | VCAM | HSA27094 |
| | | | Related Disorders” (particularly including, but not limited to, immune | | | gb\|A30922\|A30922 |
| | | | disorders involving T-cells). Highly preferred embodiments of the | | | |
| | | | invention include methods of preventing, detecting, diagnosing, | | | |
| | | | treating and/or ameliorating disorders of the immune system | | | |
| | | | (particularly including, but not limited to, immune disorders involving | | | |
| | | | T-cells). (The SUPT cell line is a human T-cell line). | | | |
| 495 | HSDSB09 | Immune | Highly preferred indications include immunological disorders such as | THP1 | CCR3 | gb\|AB023887\| |
| | | | described herein under the heading “Immune Activity” and/or “Blood- | | CD40 | AB023887 |
| | | | Related Disorders” (particularly including, but not limited to, immune | | GATA3 | gb\|AJ300189\| |
| | | | disorders involving monocytes). Highly preferred embodiments of the | | ICAM | HSA30018 |
| | | | invention include methods of preventing, detecting, diagnosing, | | IL5 | gb\|X55037\|HSGATA3 |
| | | | treating and/or ameliorating disorders of the immune system | | Rag2 | gb\|X06990\|HSICAM1 |
| | | | (particularly including, but not limited to, immune disorders involving | | VCAM | gb\|X12705\|HSBCDFIA |
| | | | monocytes). (The THP1 cell line is a human monocyte cell line | | | gb\|AY011962\| |
| | | | available through the ATCC as cell line number TIB-202). | | | AY011962 |
| | | | | | | gb\|A30922\|A30922 |
| 495 | HSDSB09 | Immune | Highly preferred indications include immunological disorders such as | U937 | IL1B | gb\|X02532\|HSIL1BR |
| | | | described herein under the heading “Immune Activity” and/or “Blood- | | | |
| | | | Related Disorders” (particularly including, but not limited to, immune | | | |
| | | | disorders involving monocytes). Highly preferred embodiments of the | | | |
| | | | invention include methods of preventing, detecting, diagnosing, | | | |
| | | | treating and/or ameliorating disorders of the immune system | | | |
| | | | (particularly including, but not limited to, immune disorders involving | | | |
| | | | monocytes). (The U937 cell line is a human monocyte cell line | | | |
| | | | available through the ATCC as cell line number CRL-1593.2). | | | |
| 596 | HUKBT29 | Cancer | Highly preferred indications include neoplastic diseases (e.g. cancer) | TF-1 | p21 | gb\|BC000275\| |
| | | | such as described herein under the heading “Hyperproliferative | | | BC000275 |
| | | | Disordersî (particularly including, but not limited to cancers involving | | | |
| | | | erythrocytes). Highly preferred embodiments of the invention include | | | |
| | | | methods of preventing, detecting, diagnosing, treating and/or | | | |
| | | | ameliorating cancer and hyperproliferative disorders involving | | | |
| | | | erythrocytes. (The TF-1 cell line is a human erythroblast cell line | | | |
| | | | available through the ATCC as cell line number CRL-2003). | | | |
| 596 | HUKBT29 | Cancer | Highly preferred indications include neoplastic diseases (e.g. cancer) | U937 | p21 | gb\|BC000275\| |
| | | | such as described herein under the heading “Hyperproliferative | | | BC000275 |
| | | | Disordersî (particularly including, but not limited to, cancers of | | | |
| | | | immune cells, such as monocytes). Highly preferred embodiments of | | | |
| | | | the invention include methods of preventing, detecting, diagnosing, | | | |
| | | | treating and/or ameliorating cancer and hyperproliferative disorders | | | |
| | | | involving cells of the immune system (such as monocytes). (THe U- | | | |
| | | | 937 cell line is a human monocyte cell line available through the | | | |
| | | | ATCC as cell line number CRL-1593.2) | | | |
| 596 | HUKBT29 | Immune | Highly preferred indications include immunological disorders such as | U937 | CD69 | gb\|Z22576\|HSCD69GNA |
| | | | described herein under the heading “Immune Activity” and/or “Blood- | | | |
| | | | Related Disorders” (particularly including, but not limited to, immune | | | |
| | | | disorders involving monocytes). Highly preferred embodiments of the | | | |
| | | | invention include methods of preventing, detecting, diagnosing, | | | |
| | | | treating and/or ameliorating disorders of the immune system | | | |
| | | | (particularly including, but not limited to, immune disorders involving | | | |
| | | | monocytes). (The U937 cell line is a human monocyte cell line | | | |
| | | | available through the ATCC as cell line number CRL-1593.2). | | | |
| 615 | HWHGZ51 | Angiogenesis | Highly preferred indications include diagnosis, prevention, treatment, | AOSMC | TSP-1 | gb\|X04665\|HSTHROMR |
| | | | and/or amelioration of diseases and disorders involving angiogenesis, | | | |
| | | | wound healing, neoplasia (particularly including, but not limited to, | | | |
| | | | tumor metastases), and cardiovascular diseases and disorders; as | | | |
| | | | described herein under the headings “Hyperproliferative Disorders,” | | | |
| | | | “Regeneration,” “Anti-Angiogenesis Activity,” “Diseases at the | | | |
| | | | Cellular Level,” and “Wound Healing and Epithelial Cell | | | |
| | | | Proliferation.” (AOSMC cells are aortic smooth muscle cells). | | | |
| 615 | HWHGZ51 | Angiogenesis | Highly preferred indications include diagnosis, prevention, treatment, | Daudi | ICAM | gb\|X06990\|HSICAM1 |
| | | | and/or amelioration of diseases and disorders involving angiogenesis, | | PAI | gb\|X12701\|HSENDPAI |
| | | | wound healing, neoplasia (particularly including, but not limited to, | | | |
| | | | tumor metastases), and cardiovascular diseases and disorders; as | | | |
| | | | described herein under the headings “Hyperproliferative Disorders,” | | | |
| | | | “Regeneration,” “Anti-Angiogenesis Activity,” “Diseases at the | | | |
| | | | Cellular Level,” and “Wound Healing and Epithelial Cell | | | |
| | | | Proliferation.” (The Daudi cell line is a human B lymphoblast cell line | | | |
| | | | available through the ATCC as cell line number CCL-213). | | | |
| 615 | HWHGZ51 | Angiogenesis | Highly preferred indications include diagnosis, prevention, treatment, | H9 | VCAM | gb\|A30922\|A30922 |
| | | | and/or amelioration of diseases and disorders involving angiogenesis, | | | |
| | | | wound healing, neoplasia (particularly including, but not limited to, | | | |
| | | | tumor metastases), and cardiovascular diseases and disorders; as | | | |
| | | | described herein under the headings “Hyperproliferative Disorders,” | | | |
| | | | “Regeneration,” “Anti-Angiogenesis Activity,” “Diseases at the | | | |
| | | | Cellular Level,” and “Wound Healing and Epithelial Cell | | | |
| | | | Proliferation.” (The H9 cell line is a human T lymphocyte cell line | | | |
| | | | available through the ATCC as cell line number HTB-176). | | | |
| 615 | HWHGZ51 | Angiogenesis | Highly preferred indications include diagnosis, prevention, treatment, | HEK293 | Flt1 | gb\|AF063657\| |
| | | | and/or amelioration of diseases and disorders involving angiogenesis, | | iNOS | AF063657 |
| | | | wound healing, neoplasia (particularly including, but not limited to, | | | gb\|X85761\|HSNOS2E3 |
| | | | tumor metastases), and cardiovascular diseases and disorders; as | | | |
| | | | described herein under the headings “Hyperproliferative Disorders,” | | | |
| | | | “Regeneration,” “Anti-Angiogenesis Activity,” “Diseases at the | | | |
| | | | Cellular Level,” and “Wound Healing and Epithelial Cell | | | |
| | | | Proliferation.” (The HEK293 cell line is a human embryonal kidney | | | |
| | | | epithelial cell line available through the ATCC as cell line number | | | |
| | | | CRL-1573). | | | |
| 615 | HWHGZ51 | Angiogenesis | Highly preferred indications include diagnosis, prevention, treatment, | HUVEC | Vegf1 | gb\|AF024710\| |
| | | | and/or amelioration of diseases and disorders involving angiogenesis, | | | AF024710 |
| | | | wound healing, neoplasia (particularly including, but not limited to, | | | |
| | | | tumor metastases), and cardiovascular diseases and disorders; as | | | |
| | | | described herein under the headings “Hyperproliferative Disorders,” | | | |
| | | | “Regeneration,” “Anti-Angiogenesis Activity,” “Diseases at the | | | |
| | | | Cellular Level,” and “Wound Healing and Epithelial Cell | | | |
| | | | Proliferation.” (HUVEC cells are human umbilical vein endothelial | | | |
| | | | cells). | | | |
| 615 | HWHGZ51 | Angiogenesis | Highly preferred indications include diagnosis, prevention, treatment, | Liver | Flt1 | gb\|AF063657\| |
| | | | and/or amelioration of diseases and disorders involving angiogenesis, | | ICAM | AF063657 |
| | | | wound healing, neoplasia (particularly including, but not limited to, | | PAI | gb\|X06990\|HSICAM1 |
| | | | tumor metastases), and cardiovascular diseases and disorders; as | | VCAM | gb\|X12701\|HSENDPAI |
| | | | described herein under the headings “Hyperproliferative Disorders,” | | | gb\|A30922\|A30922 |
| | | | “Regeneration,” “Anti-Angiogenesis Activity,” “Diseases at the | | | |
| | | | Cellular Level,” and “Wound Healing and Epithelial Cell | | | |
| | | | Proliferation.” | | | |
| 615 | HWHGZ51 | Angiogenesis | Highly preferred indications include diagnosis, prevention, treatment, | Molt4 | VCAM | gb\|A30922\|A30922 |
| | | | and/or amelioration of diseases and disorders involving angiogenesis, | | | |
| | | | wound healing, neoplasia (particularly including, but not limited to, | | | |
| | | | tumor metastases), and cardiovascular diseases and disorders; as | | | |
| | | | described herein under the headings “Hyperproliferative Disorders,” | | | |
| | | | “Regeneration,” “Anti-Angiogenesis Activity,” “Diseases at the | | | |
| | | | Cellular Level,” and “Wound Healing and Epithelial Cell | | | |
| | | | Proliferation.” (The Molt4 cell line is a human T cell line available | | | |
| | | | through the ATCC as cell line number CRL-1582). | | | |
| 615 | HWHGZ51 | Angiogenesis | Highly preferred indications include diagnosis, prevention, treatment, | NHDF | Vegf1 | gb\|AF024710\| |
| | | | and/or amelioration of diseases and disorders involving angiogenesis, | | | AF024710 |
| | | | wound healing, neoplasia (particularly including, but not limited to, | | | |
| | | | tumor metastases), and cardiovascular diseases and disorders; as | | | |
| | | | described herein under the headings “Hyperproliferative Disorders,” | | | |
| | | | “Regeneration,” “Anti-Angiogenesis Activity,” “Diseases at the | | | |
| | | | Cellular Level,” and “Wound Healing and Epithelial Cell | | | |
| | | | Proliferation.” (NHDF cells are normal human dermal fibroblasts). | | | |
| 615 | HWHGZ51 | Angiogenesis | Highly preferred indications include diagnosis, prevention, treatment, | THP1 | Vegf1 | gb\|AF024710\| |
| | | | and/or amelioration of diseases and disorders involving angiogenesis, | | | AF024710 |
| | | | wound healing, neoplasia (particularly including, but not limited to, | | | |
| | | | tumor metastases), and cardiovascular diseases and disorders; as | | | |
| | | | described herein under the headings “Hyperproliferative Disorders,” | | | |
| | | | “Regeneration,” “Anti-Angiogenesis Activity,” “Diseases at the | | | |
| | | | Cellular Level,” and “Wound Healing and Epithelial Cell | | | |
| | | | Proliferation.” (The THP-1 cell line is a human monocyte cell line | | | |
| | | | available through the ATCC as cell line number TIB-202). | | | |
| 615 | HWHGZ51 | Angiogenesis | Highly preferred indications include diagnosis, prevention, treatment, | U937 | ICAM | gb\|X06990\|HSICAM1 |
| | | | and/or amelioration of diseases and disorders involving angiogenesis, | | Vegf1 | gb\|AF024710\| |
| | | | wound healing, neoplasia (particularly including, but not limited to, | | | AF024710 |
| | | | tumor metastases), and cardiovascular diseases and disorders; as | | | |
| | | | described herein under the headings “Hyperproliferative Disorders,” | | | |
| | | | “Regeneration,” “Anti-Angiogenesis Activity,” “Diseases at the | | | |
| | | | Cellular Level,” and “Wound Healing and Epithelial Cell | | | |
| | | | Proliferation.” (The U937 cell line is a human monocyte cell line | | | |
| | | | available through the ATCC as cell line number CRL-1593.2). | | | |
| 615 | HWHGZ51 | Cancer | Highly preferred indications include neoplastic diseases (e.g. cancer) | AOSMC | Cyclin A1 | gb\|U97680\|HSU97680 |
| | | | such as described herein under the heading “Hyperproliferative | | DHFR | gb\|V00507\|HSDHFR |
| | | | Disordersî (particularly including, but not limited to, cancers of muscle | | | |
| | | | tissues and the cardiovascular system (e.g. heart, lungs, circulatory | | | |
| | | | system)). Highly preferred embodiments of the invention include | | | |
| | | | methods of preventing, detecting, diagnosing, treating and/or | | | |
| | | | ameliorating cancer and hyperproliferative disorders. (AOSMC cells | | | |
| | | | are aortic smooth muscle cells). | | | |
| 615 | HWHGZ51 | Cancer | Highly preferred indications include neoplastic diseases (e.g. cancer) | Caco-2 | c-fos | gb\|BC004490\| |
| | | | such as described herein under the heading “Hyperproliferative | | Cyclin A1 | BC004490 |
| | | | Disordersî (particularly including, but not limited to, cancer involving | | | gb\|U97680\|HSU97680 |
| | | | cells of the gastrointestinal tract). Highly preferred embodiments of | | | |
| | | | the invention include methods of preventing, detecting, diagnosing, | | | |
| | | | treating and/or ameliorating cancer and hyperproliferative disorders | | | |
| | | | involving the gastrointestinal tract. (The Caco-2 cell line is a human | | | |
| | | | colorectal adenocarcinoma cell line available through the ATCC as | | | |
| | | | cell line number HTB-37). | | | |
| 615 | HWHGZ51 | Cancer | Highly preferred indications include neoplastic diseases (e.g. cancer) | Daudi | Bax | gb\|AF250190\| |
| | | | such as described herein under the heading “Hyperproliferative | | | AF250190 |
| | | | Disordersî (particularly including, but not limited to, cancers of | | | |
| | | | immune cells, such as B-cells). Highly preferred embodiments of the | | | |
| | | | invention include methods of preventing, detecting, diagnosing, | | | |
| | | | treating and/or ameliorating cancer and hyperproliferative disorders | | | |
| | | | involving immune cells (such as B-cells). (The Daudi cell line is a | | | |
| | | | human B lymphoblast cell line available through the ATCC as cell line | | | |
| | | | number CCL-213). | | | |
| 615 | HWHGZ51 | Cancer | Highly preferred indications include neoplastic diseases (e.g. cancer) | HEK293 | c-jun | gb\|BC006175\| |
| | | | such as described herein under the heading “Hyperproliferative | | | BC006175 |
| | | | Disordersî (particularly including, but not limited to, cancers of | | | |
| | | | epithelial cells or cancers involving the renal system). Highly | | | |
| | | | preferred embodiments of the invention include methods of | | | |
| | | | preventing, detecting, diagnosing, treating and/or ameliorating cancer | | | |
| | | | and hyperproliferative disorders involving epithelial cells or the renal | | | |
| | | | system. (The 293 cell line human embryonal kidney epithelial cell line | | | |
| | | | available through the ATCC as cell line number CRL-1573). | | | |
| 615 | HWHGZ51 | Cancer | Highly preferred indications include neoplastic diseases (e.g. cancer) | HUVEC | bcl-2 | gb\|X06487\|HSBCL2IG |
| | | | such as described herein under the heading “Hyperproliferative | | TAA6 | gb\|I34297\|I34297 |
| | | | Disordersî (particularly including, but not limited to, cancers involving | | | |
| | | | endothelial cells). Highly preferred embodiments of the invention | | | |
| | | | include methods of preventing, detecting, diagnosing, treating and/or | | | |
| | | | ameliorating cancer and hyperproliferative disorders involving | | | |
| | | | endothelial cells. (HUVEC cells are human umbilical vein endothelial | | | |
| | | | cells). | | | |
| 615 | HWHGZ51 | Cancer | Highly preferred indications include neoplastic diseases (e.g. cancer) | Liver | Cyclin D3 | gb\|AR034832\| |
| | | | such as described herein under the heading “Hyperproliferative | | M1 RIBO R | AR034832 |
| | | | Disordersî (particularly including, but not limited to, cancers involving | | U66469 | gb\|X59543\|HSRIREM1 |
| | | | cells of the hepatic system). Highly preferred embodiments of the | | p53 | |
| | | | invention include methods of preventing, detecting, diagnosing, | | regulated | |
| | | | treating and/or ameliorating cancer and hyperproliferative disorders | | gene | |
| | | | involving cells of the hepatic system. | | | |
| 615 | HWHGZ51 | Cancer | Highly preferred indications include neoplastic diseases (e.g. cancer) | NHDF | bcl-2 | gb\|X06487\|HSBCL2IG |
| | | | such as described herein under the heading “Hyperproliferative | | TAA6 | gb\|I34297\|I34297 |
| | | | Disordersî (particularly including, but not limited to cancers involving | | | |
| | | | cells of the skin). Highly preferred embodiments of the invention | | | |
| | | | include methods of preventing, detecting, diagnosing, treating and/or | | | |
| | | | ameliorating cancer and hyperproliferative disorders involving skin | | | |
| | | | cells. (NHDF cells are normal human dermal fibroblasts). | | | |
| 615 | HWHGZ51 | Cancer | Highly preferred indications include neoplastic diseases (e.g. cancer) | THP1 | DHFR | gb\|V00507\|HSDHFR |
| | | | such as described herein under the heading “Hyperproliferative | | M1 RIBO R | gb\|X59543\|HSRIREM1 |
| | | | Disordersî (particularly including, but not limited to, cancers of | | | |
| | | | immune cells, such as monocytes). Highly preferred embodiments of | | | |
| | | | the invention include methods of preventing, detecting, diagnosing, | | | |
| | | | treating and/or ameliorating cancer and hyperproliferative disorders | | | |
| | | | involving cells of the immune system (such as monocytes). (The THP- | | | |
| | | | 1 cell line is a human monocyte cell line available through the ATCC | | | |
| | | | as cell line number TIB-202). | | | |
| 615 | HWHGZ51 | Cancer | Highly preferred indications include neoplastic diseases (e.g. cancer) | U937 | Cyclin A1 | gb\|U97680\|HSU97680 |
| | | | such as described herein under the heading “Hyperproliferative | | | |
| | | | Disordersî (particularly including, but not limited to, cancers of | | | |
| | | | immune cells, such as monocytes). Highly preferred embodiments of | | | |
| | | | the invention include methods of preventing, detecting, diagnosing, | | | |
| | | | treating and/or ameliorating cancer and hyperproliferative disorders | | | |
| | | | involving cells of the immune system (such as monocytes). (The U-937 | | | |
| | | | cell line is a human monocyte cell line available through the ATCC as | | | |
| | | | cell line number CRL-1593.2) | | | |
| 615 | HWHGZ51 | Diabetes | A highly preferred indication is diabetes. Additional highly preferred | Liver | GAPDH | |
| | | | indications include complications associated with diabetes (e.g., | | | |
| | | | diabetic retinopathy, diabetic nephropathy, kidney disease (e.g., renal | | | |
| | | | failure, nephropathy and/or other diseases and disorders as described | | | |
| | | | in the “Renal Disorders” section below), diabetic neuropathy, nerve | | | |
| | | | disease and nerve damage (e.g., due to diabetic neuropathy), blood | | | |
| | | | vessel blockage, heart disease, stroke, impotence (e.g., due to diabetic | | | |
| | | | neuropathy or blood vessel blockage), seizures, mental confusion, | | | |
| | | | drowsiness, nonketotic hyperglycemic-hyperosmolar coma, | | | |
| | | | cardiovascular disease (e.g., heart disease, atherosclerosis, | | | |
| | | | microvascular disease, hypertension, stroke, and other diseases and | | | |
| | | | disorders as described in the “Cardiovascular Disorders” section | | | |
| | | | below), dyslipidemia, endocrine disorders (as described in the | | | |
| | | | “Endocrine Disorders” section below), neuropathy, vision impairment | | | |
| | | | (e.g., diabetic retinopathy and blindness), ulcers and impaired wound | | | |
| | | | healing, and infection (e.g., infectious diseases and disorders as | | | |
| | | | described in the “Infectious Diseases” section below, especially of the | | | |
| | | | urinary tract and skin). Highly preferred indications also include | | | |
| | | | obesity, weight gain, and weight loss, as well as complications | | | |
| | | | associated with obesity, weight gain, and weight loss. Preferred | | | |
| | | | embodiments of the invention include methods of preventing, | | | |
| | | | detecting, diagnosing, treating and/or ameliorating the above | | | |
| | | | mentioned conditions, disorders, and diseases. | | | |
| 615 | HWHGZ51 | Immune | Highly preferred indications include immunological disorders such as | AOSMC | CD30 | gb\|X04403\|HS26KDAR |
| | | | described herein under the heading “Immune Activity” and/or “Blood- | | Il6 | |
| | | | Related Disorders” (particularly including, but not limited to, immune | | | |
| | | | disorders involving muscle tissues and the cardiovascular system (e.g. | | | |
| | | | heart, lungs, circulatory system)). Highly preferred embodiments of | | | |
| | | | the invention include methods of preventing, detecting, diagnosing, | | | |
| | | | treating and/or ameliorating disorders of the immune system | | | |
| | | | (particularly including, but not limited to, immune disorders involving | | | |
| | | | muscle tissue or the cardiovascular system). (AOSMC cells are | | | |
| | | | human aortic smooth muscle cells). | | | |
| 615 | HWHGZ51 | Immune | Highly preferred indications include immunological disorders such as | Caco-2 | Rag1 | gb\|M29474\|HUMRAG1 |
| | | | described herein under the heading “Immune Activity” and/or “Blood- | | | |
| | | | Related Disorders” (particularly including, but not limited to, immune | | | |
| | | | disorders involving the cells of the gastrointestinal tract). Highly | | | |
| | | | preferred embodiments of the invention include methods of | | | |
| | | | preventing, detecting, diagnosing, treating and/or ameliorating | | | |
| | | | disorders of the immune system (particularly including, but not limited | | | |
| | | | to, immune disorders involving cells of the gastrointestinal tract). (The | | | |
| | | | Caco-2 cell line is a human colorectal adenocarcinoma cell line | | | |
| | | | available through the ATCC as cell line number HTB-37). | | | |
| 615 | HWHGZ51 | Immune | Highly preferred indications include immunological disorders such as | Daudi | CIS3 | gb\|AB006967\| |
| | | | described herein under the heading “Immune Activity” and/or “Blood- | | CXCR3 | AB006967 |
| | | | Related Disorders” (particularly including, but not limited to, immune | | ICAM | gb\|Z79783\|HSCKRL2 |
| | | | disorders involving the B-cells). Highly preferred embodiments of the | | | gb\|X06990\|HSICAM1 |
| | | | invention include methods of preventing, detecting, diagnosing, | | | |
| | | | treating and/or ameliorating disorders of the immune system | | | |
| | | | (particularly including, but not limited to, immune disorders involving | | | |
| | | | B-cells). (The Daudi cell line is a human B lymphoblast cell line | | | |
| | | | available through the ATCC as cell line number CCL-213). | | | |
| 615 | HWHGZ51 | Immune | Highly preferred indications include immunological disorders such as | H9 | IL5 | gb\|X12705\|HSBCDFIA |
| | | | described herein under the heading “Immune Activity” and/or “Blood- | | VCAM | gb\|A30922\|A30922 |
| | | | Related Disorders” (particularly including, but not limited to, immune | | VLA4 | gb\|X16983\|HSINTAL4 |
| | | | disorders involving the T-cells). Highly preferred embodiments of the | | | |
| | | | invention include methods of preventing, detecting, diagnosing, | | | |
| | | | treating and/or ameliorating disorders of the immune system | | | |
| | | | (particularly including, but not limited to, immune disorders involving | | | |
| | | | T-cells). (The H9 cell line is a human T lymphocyte cell line available | | | |
| | | | through the ATCC as cell line number HTB-176). | | | |
| 615 | HWHGZ51 | Immune | Highly preferred indications include immunological disorders such as | HEK293 | Rag1 | gb\|M29474\|HUMRAG1 |
| | | | described herein under the heading “Immune Activity” and/or “Blood- | | TNF | gb\|AJ270944\| |
| | | | Related Disorders” (particularly including, but not limited to, immune | | | HSA27094 |
| | | | disorders involving epithelial cells or the renal system). Highly | | | |
| | | | preferred embodiments of the invention include methods of | | | |
| | | | preventing, detecting, diagnosing, treating and/or ameliorating | | | |
| | | | disorders of the immune system (particularly including, but not limited | | | |
| | | | to, immune disorders involving epithelial cells or the renal system). | | | |
| | | | (The 293 cell line is a human embryonal kidney epithelial cell line | | | |
| | | | available through the ATCC as cell line number CRL-1573). | | | |
| 615 | HWHGZ51 | Immune | Highly preferred indications include immunological disorders such as | HUVEC | CCR7 | gb\|X84702\|HSDNABLR2 |
| | | | described herein under the heading “Immune Activity” and/or “Blood- | | GATA3 | gb\|X55037\|HSGATA3 |
| | | | Related Disorders” (particularly including, but not limited to, immune | | TNF | gb\|AJ270944\| |
| | | | disorders involving endothelial cells). Highly preferred embodiments | | | HSA27094 |
| | | | of the invention include methods of preventing, detecting, diagnosing, | | | |
| | | | treating and/or ameliorating disorders of the immune system | | | |
| | | | (particularly including, but not limited to, immune disorders involving | | | |
| | | | endothelial cells). (HUVEC cells are human umbilical vein endothelial cells). | | | |
| 615 | HWHGZ51 | Immune | Highly preferred indications include immunological disorders such as | Jurkat | Rag1 | gb\|M29474\|HUMRAG1 |
| | | | described herein under the heading “Immune Activity” and/or “Blood- | | Rag2 | gb\|AY011962\| |
| | | | Related Disorders” (particularly including, but not limited to, immune | | | AY011962 |
| | | | disorders involving T-cells). Highly preferred embodiments of the | | | |
| | | | invention include methods of preventing, detecting, diagnosing, | | | |
| | | | treating and/or ameliorating disorders of the immune system | | | |
| | | | (particularly including, but not limited to, immune disorders involving | | | |
| | | | T-cells). (The Jurkat cell line is a human T lymphocyte cell line | | | |
| | | | available through the ATCC as cell line number TIB-152). | | | |
| 615 | HWHGZ51 | Immune | Highly preferred indications include immunological disorders such as | Liver | CCR7 | gb\|X84702\|HSDNABLR2 |
| | | | described herein under the heading “Immune Activity” and/or “Blood- | | ICAM | gb\|X06990\|HSICAM1 |
| | | | Related Disorders” (particularly including, but not limited to, immune | | TNF | gb\|AJ270944\| |
| | | | disorders involving cells of the hepatic system). Highly preferred | | VCAM | HSA27094 |
| | | | embodiments of the invention include methods of preventing, | | | gb\|A30922\|A30922 |
| | | | detecting, diagnosing, treating and/or ameliorating disorders of the | | | |
| | | | immune system (particularly including, but not limited to, immune | | | |
| | | | disorders involving cells of the hepatic system). | | | |
| 615 | HWHGZ51 | Immune | Highly preferred indications include immunological disorders such as | Molt4 | CD25 | gb\|X03137\|HSIL2RG7 |
| | | | described herein under the heading “Immune Activity” and/or “Blood- | | TNF | gb\|AJ270944\| |
| | | | Related Disorders” (particularly including, but not limited to, immune | | VCAM | HSA27094 |
| | | | disorders involving T-cells). Highly preferred embodiments of the | | | gb\|A30922\|A30922 |
| | | | invention include methods of preventing, detecting, diagnosing, | | | |
| | | | treating and/or ameliorating disorders of the immune system | | | |
| | | | (particularly including, but not limited to, immune disorders involving | | | |
| | | | T-cells). (The Molt-4 cell line is a human T-cell line available through | | | |
| | | | the ATCC as cell line number CRL-1582). | | | |
| 615 | HWHGZ51 | Immune | Highly preferred indications include immunological disorders such as | NHDF | CCR7 | gb\|X84702\|HSDNABLR2 |
| | | | described herein under the heading “Immune Activity” and/or “Blood- | | CD40 | gb\|AJ300189\| |
| | | | Related Disorders” (particularly including, but not limited to, immune | | GATA3 | HSA30018 |
| | | | disorders involving the skin). Highly preferred embodiments of the | | HLA-c | gb\|X55037\|HSGATA3 |
| | | | invention include methods of preventing, detecting, diagnosing, | | TNF | gb\|AJ270944\| |
| | | | treating and/or ameliorating disorders of the immune system | | | HSA27094 |
| | | | (particularly including, but not limited to, immune disorders involving | | | |
| | | | the skin). (NHDF cells are normal human dermal fibroblasts). | | | |
| 615 | HWHGZ51 | Immune | Highly preferred indications include immunological disorders such as | SK-N-MC | CIS3 | gb\|AB006967\| |
| | | | described herein under the heading “Immune Activity”and/or “Blood- | neuroblastoma | LTBR | AB006967 |
| | | | Related Disorders” (particularly including, but not limited to, immune | | Rag1 | gb\|AK027080\| |
| | | | disorders involving the central nervous system). Highly preferred | | | AK027080 |
| | | | embodiments of the invention include methods of preventing, | | | gb\|M29474\|HUMRAG1 |
| | | | detecting, diagnosing, treating and/or ameliorating disorders of the | | | |
| | | | immune system (particularly including, but not limited to, immune | | | |
| | | | disorders involving the central nervous sytem). (The SK-N-MC | | | |
| | | | neuroblastoma cell line is a cell line derived from human brain tissue | | | |
| | | | and is available through the ATCC as cell line number HTB-10). | | | |
| 615 | HWHGZ51 | Immune | Highly preferred indications include immunological disorders such as | SUPT | CCR4 | gb\|AB023888\| |
| | | | described herein under the heading “Immune Activity” and/or “Blood- | | Rag1 | AB023888 |
| | | | Related Disorders” (particularly including, but not limited to, immune | | TNF | gb\|M29474\|HUMRAG1 |
| | | | disorders involving T-cells). Highly preferred embodiments of the | | | gb\|AJ270944\| |
| | | | invention include methods of preventing, detecting, diagnosing, | | | HSA27094 |
| | | | treating and/or ameliorating disorders of the immune system | | | |
| | | | (particularly including, but not limited to, immune disorders involving | | | |
| | | | T-cells). (The SUPT cell line is a human T-cell line). | | | |
| 615 | HWHGZ51 | Immune | Highly preferred indications include immunological disorders such as | THP1 | c-maf | gb\|AF055377\| |
| | | | described herein under the heading “Immune Activity” and/or “Blood- | | CCR7 | AF055377 |
| | | | Related Disorders” (particularly including, but not limited to, immune | | CXCR3 | gb\|X84702\|H SDNABLR2 |
| | | | disorders involving monocytes). Highly preferred embodiments of the | | IL5 | gb\|Z79783\|HSCKRL2 |
| | | | invention include methods of preventing, detecting, diagnosing, | | | gb\|X12705\|HSBCDFIA |
| | | | treating and/or ameliorating disorders of the immune system | | | |
| | | | (particularly including, but not limited to, immune disorders involving | | | |
| | | | monocytes). (The THP1 cell line is a human monocyte cell line | | | |
| | | | available through the ATCC as cell line number TIB-202). | | | |
| 615 | HWHGZ51 | Immune | Highly preferred indications include immunological disorders such as | U937 | CD69 | gb\|Z22576\|HSCD69GNA |
| | | | described herein under the heading “Immune Activity” and/or “Blood- | | ICAM | gb\|X06990\|HSICAM1 |
| | | | Related Disorders” (particularly including, but not limited to, immune | | TNF | gb\|AJ270944\| |
| | | | disorders involving monocytes). Highly preferred embodiments of the | | | HSA27094 |
| | | | invention include methods of preventing, detecting, diagnosing, | | | |
| | | | treating and/or ameliorating disorders of the immune system | | | |
| | | | (particularly including, but not limited to, immune disorders involving | | | |
| | | | monocytes). (The U937 cell line is a human monocyte cell line available through | | | |
| | | | the ATCC as cell line number CRL-1593.2). | | | |

[0126] Table 2 further characterizes certain encoded polypeptides of the invention, by providing the results of comparisons to protein and protein family databases. The first column provides a unique clone identifier, “Clone ID NO:”, corresponding to a cDNA clone disclosed in Table 1A and/or Table 1B. The second column provides the unique contig identifier, “Contig ID:” which allows correlation with the information in Table 1B. The third column provides the sequence identifier, “SEQ ID NO:”, for the contig polynucleotide sequences. The fourth column provides the analysis method by which the homology/identity disclosed in the Table was determined. The fifth column provides a description of the PFAM/NR hit identified by each analysis. Column six provides the accession number of the PFAM/NR hit disclosed in the fifth column. Column seven, score/percent identity, provides a quality score or the percent identity, of the hit disclosed in column five. Comparisons were made between polypeptides encoded by polynucleotides of the invention and a non-redundant protein database (herein referred to as “NR”), or a database of protein families (herein referred to as “PFAM”), as described below.

[0127] The NR database, which comprises the NBRF PIR database, the NCBI GenPept database, and the SIB SwissProt and TrEMBL databases, was made non-redundant using the computer program nrdb2 (Warren Gish, Washington University in Saint Louis). Each of the polynucleotides shown in Table 1B, column 3 (e.g., SEQ ID NO:X or the ‘Query’ sequence) was used to search against the NR database. The computer program BLASTX was used to compare a 6-frame translation of the Query sequence to the NR database (for information about the BLASTX algorithm please see Altshul et al., J. Mol. Biol. 215:403-410 (1990), and Gish and States, Nat. Genet. 3:266-272 (1993). A description of the sequence that is most similar to the Query sequence (the highest scoring ‘Subject’) is shown in column five of Table 2 and the database accession number for that sequence is provided in column six. The highest scoring ‘Subject’ is reported in Table 2 if (a) the estimated probability that the match occurred by chance alone is less than 1.0e-07, and (b) the match was not to a known repetitive element. BLASTX returns alignments of short polypeptide segments of the Query and Subject sequences which share a high degree of similarity; these segments are known as High-Scoring Segment Pairs or HSPs. Table 2 reports the degree of similarity between the Query and the Subject for each HSP as a percent identity in Column 7. The percent identity is determined by dividing the number of exact matches between the two aligned sequences in the HSP, dividing by the number of Query amino acids in the HSP and multiplying by 100. The polynucleotides of SEQ ID NO:X which encode the polypeptide sequence that generates an HSP are delineated by columns 8 and 9 of Table 2.

[0128] The PFAM database, PFAM version 2.1, (Sonnhammer, Nucl. Acids Res., 26:320-322, 1998)) consists of a series of multiple sequence alignments; one alignment for each protein family. Each multiple sequence alignment is converted into a probability model called a Hidden Markov Model, or HMM, that represents the position-specific variation among the sequences that make up the multiple sequence alignment (see, e.g., Durbin, et al., Biological sequence analysis: probabilistic models of proteins and nucleic acids, Cambridge University Press, 1998 for the theory of HMMs). The program HMMER version 1.8 (Sean Eddy, Washington University in Saint Louis) was used to compare the predicted protein sequence for each Query sequence (SEQ ID NO:Y in Table 1B.1) to each of the HMMs derived from PFAM version 2.1. A HMM derived from PFAM version 2.1 was said to be a significant match to a polypeptide of the invention if the score returned by HMMER 1.8 was greater than 0.8 times the HMMER 1.8 score obtained with the most distantly related known member of that protein family. The description of the PFAM family which shares a significant match with a polypeptide of the invention is listed in column 5 of Table 2, and the database accession number of the PFAM hit is provided in column 6. Column 7 provides the score returned by HMMER version 1.8 for the alignment. Columns 8 and 9 delineate the polynucleotides of SEQ ID NO:X which encode the polypeptide sequence which show a significant match to a PFAM protein family.

[0129] As mentioned, columns 8 and 9 in Table 2, “NT From” and “NT To”, delineate the polynucleotides of “SEQ ID NO:X” that encode a polypeptide having a significant match to the PFAM/NR database as disclosed in the fifth column. In one embodiment, the invention provides a protein comprising, or alternatively consisting of, a polypeptide encoded by the polynucleotides of SEQ ID NO:X delineated in columns 8 and 9 of Table 2. Also provided are polynucleotides encoding such proteins, and the complementary strand thereto.

[0130] The nucleotide sequence SEQ ID NO:X and the translated SEQ ID NO:Y are sufficiently accurate and otherwise suitable for a variety of uses well known in the art and described further below. For instance, the nucleotide sequences of SEQ ID NO:X are useful for designing nucleic acid hybridization probes that will detect nucleic acid sequences contained in SEQ ID NO:X or the cDNA contained in ATCC Deposit No:Z. These probes will also hybridize to nucleic acid molecules in biological samples, thereby enabling immediate applications in chromosome mapping, linkage analysis, tissue identification and/or typing, and a variety of forensic and diagnostic methods of the invention. Similarly, polypeptides identified from SEQ ID NO:Y may be used to generate antibodies which bind specifically to these polypeptides, or fragments thereof, and/or to the polypeptides encoded by the cDNA clones identified in, for example, Table 1A and/or 1B.

[0131] Nevertheless, DNA sequences generated by sequencing reactions can contain sequencing errors. The errors exist as misidentified nucleotides, or as insertions or deletions of nucleotides in the generated DNA sequence. The erroneously inserted or deleted nucleotides cause frame shifts in the reading frames of the predicted amino acid sequence. In these cases, the predicted amino acid sequence diverges from the actual amino acid sequence, even though the generated DNA sequence may be greater than 99.9% identical to the actual DNA sequence (for example, one base insertion or deletion in an open reading frame of over 1000 bases).

[0132] Accordingly, for those applications requiring precision in the nucleotide sequence or the amino acid sequence, the present invention provides not only the generated nucleotide sequence identified as SEQ ID NO:X, and a predicted translated amino acid sequence identified as SEQ ID NO:Y, but also a sample of plasmid DNA containing cDNA ATCC Deposit No:Z (e.g., as set forth in columns 2 and 3 of Table 1A and/or as set forth, for example, in Table 1B, 6, and 7). The nucleotide sequence of each deposited clone can readily be determined by sequencing the deposited clone in accordance with known methods. Further, techniques known in the art can be used to verify the nucleotide sequences of SEQ ID NO:X. The predicted amino acid sequence can then be verified from such deposits. Moreover, the amino acid sequence of the protein encoded by a particular clone can also be directly determined by peptide sequencing or by expressing the protein in a suitable host cell containing the deposited human cDNA, collecting the protein, and determining its sequence.

TABLE 2

| | | SEQ | | | | Score/ | | |
|---|---|---|---|---|---|---|---|---|
| cDNA Clone | Contig | ID | Analysis | | PFam/NR Accession | Percent | | |
| ID | ID: | NO: X | Method | PFam/NR Description | Number | Identity | NT From | NT To |
| H2CBG48 | 745365 | 11 | WUblastx.64 | (AAM07193) Cell surface | AAM07193 | 35% | 465 | 557 |
| | | | | protein. | | 33% | 19 | 306 |
| H6EAB28 | 1352227 | 13 | WUblastx.64 | (Q99LL3) | Q99LL3 | 68% | 115 | 396 |
| | | | | CHONDROITIN 4- | | 89% | 411 | 1355 |
| | | | | SULFOTRANSFERASE | | | | |
| | | | | 2. | | | | |
| H6EAB28 | 589947 | 632 | WUblastx.64 | (Q9NXY7) | Q9NXY7 | 85% | 1123 | 1206 |
| | | | | CHONDROITIN 4-O- | | 98% | 1194 | 1352 |
| | | | | SULFOTRANSFERASE | | 82% | 116 | 1132 |
| | | | | (CHONDROITIN 4-O- | | | | |
| | | | | SULFOTRANS | | | | |
| HACBD91 | 637482 | 16 | WUblastx.64 | NADH dehydrogenase | pir\|JE0383\|JE0383 | 100% | 211 | 357 |
| | | | | (ubiquinone) (EC 1.6.5.3) | | 95% | 1306 | 1368 |
| | | | | chain NDUFB4 - human | | | | |
| HACCI17 | 891114 | 17 | HMMER | PFAM: PMP- | PF00822 | 142.7 | 470 | 1003 |
| | | | 2.1.1 | 22/EMP/MP20/Claudin | | | | |
| | | | | family | | | | |
| | | | WUblastx.64 | (Q8WUW3) Hypothetical | Q8WUW3 | 100% | 317 | 1114 |
| | | | | 27.7 kDa protein | | | | |
| | | | | (Fragment). | | | | |
| HACCI17 | 731877 | 633 | HMMER | PFAM: PMP- | PF00822 | 35.6 | 144 | 329 |
| | | | 2.1.1 | 22/EMP/MP20/Claudin | | | | |
| | | | | family | | | | |
| | | | WUblastx.64 | (Q8WUW3) Hypothetical | Q8WUW3 | 80% | 24 | 329 |
| | | | | 27.7 kDa protein | | 57% | 454 | 495 |
| | | | | (Fragment). | | 90% | 1 | 96 |
| | | | | | | 30% | 66 | 296 |
| | | | | | | 75% | 535 | 786 |
| | | | | | | 100% | 311 | 619 |
| HADAO89 | 570689 | 18 | WUblastx.64 | (Q9P147) PRO2822. | Q9P147 | 72% | 1100 | 885 |
| HAGAI85 | 381942 | 19 | WUblastx.64 | (O15432) PROBABLE | COP2_HUMAN | 100% | 91 | 234 |
| | | | | LOW-AFFINITY | | 96% | 228 | 518 |
| | | | | COPPER UPTAKE | | | | |
| | | | | PROTEIN 2 (HCT | | | | |
| HAGAN21 | 1026956 | 21 | WUblastx.64 | (Q96NR6) CDNA | Q96NR6 | 44% | 527 | 835 |
| | | | | FLJ30278 fis, clone | | | | |
| | | | | BRACE2002755. | | | | |
| HAGAN21 | 902025 | 637 | WUblastx.64 | hypothetical protein | pir\|T08762\|T08762 | 57% | 549 | 472 |
| | | | | DKFZp586P2219.1 - | | 100% | 283 | 167 |
| | | | | human (fragment) | | | | |
| HAGBZ81 | 456414 | 22 | WUblastx.64 | (Q9H291) JUNCTATE. | Q9H291 | 85% | 183 | 329 |
| | | | | | | 77% | 26 | 199 |
| HAGDG59 | 534165 | 23 | HMMER | PFAM: short chain | PF00106 | 182.2 | 232 | 795 |
| | | | 2.1.1 | dehydrogenase | | | | |
| | | | WUblastx.64 | (Q9UKU4) RETINAL | Q9UKU4 | 100% | 124 | 1023 |
| | | | | SHORT-CHAIN | | | | |
| | | | | DEHYDROGENASE/REDUCTASE | | | | |
| | | | | RETSDR2. | | | | |
| HAGFY16 | 778820 | 27 | WUblastx.64 | (Q9BT67) UNKNOWN | Q9BT67 | 100% | 183 | 221 |
| | | | | (PROTEIN FOR | | 72% | 229 | 402 |
| | | | | MGC: 10924). | | 100% | 338 | 844 |
| HAGFY16 | 381964 | 638 | WUblastx.64 | (Q9BT67) UNKNOWN | Q9BT67 | 86% | 60 | 104 |
| | | | | (PROTEIN FOR | | 99% | 106 | 720 |
| | | | | MGC: 10924). | | | | |
| HAHDB16 | 635412 | 28 | WUblastx.64 | (Q9GMK2) | Q9GMK2 | 75% | 641 | 522 |
| | | | | HYPOTHETICAL 10.0 KDA | | 69% | 762 | 634 |
| | | | | PROTEIN. | | | | |
| HAHDR32 | 635357 | 29 | WUblastx.64 | (Q9HBU9) POPEYE | Q9HBU9 | 84% | 77 | 811 |
| | | | | PROTEIN 2. | | | | |
| HAIBP89 | 727543 | 31 | WUblastx.64 | (Q96G79) Similar to | Q96G79 | 99% | 290 | 1261 |
| | | | | RIKEN cDNA | | | | |
| | | | | 2610030J16 gene. | | | | |
| HAICP19 | 422672 | 32 | WUblastx.64 | (Q9H173) SIL1 | Q9H173 | 100% | 83 | 1465 |
| | | | | PROTEIN PRECURSOR. | | | | |
| HAJBR69 | 638516 | 35 | WUblastx.64 | (Q9JIG5) UBIQUITIN | Q9JIG5 | 69% | 677 | 48 |
| | | | | SPECIFIC PROTEASE | | | | |
| | | | | (FRAGMENT). | | | | |
| HAJBZ75 | 618530 | 36 | WUblastx.64 | hypothetical protein | pir\|T08708\|T08708 | 99% | 25 | 1869 |
| | | | | DKFZp564D116.1 - | | | | |
| | | | | human (fragment) | | | | |
| HAMGG68 | 731859 | 38 | WUblastx.64 | (Q9NX85) CDNA | Q9NX85 | 71% | 984 | 859 |
| | | | | FLJ20378 FIS, CLONE | | 44% | 1454 | 1401 |
| | | | | KAIA0536. | | 57% | 1457 | 1416 |
| | | | | | | 70% | 1458 | 1429 |
| | | | | | | 56% | 726 | 658 |
| | | | | | | 64% | 857 | 636 |
| HANGG89 | 852533 | 640 | WUblastx.64 | (AAH00634) Reticulon 3. | AAH00634 | 99% | 59 | 418 |
| HANGG89 | 844216 | 641 | WUblastx.64 | (AAH08720) Unknown | AAH08720 | 83% | 70 | 1017 |
| | | | | (protein for MGC: 8447). | | 51% | 490 | 1068 |
| HANGG89 | 692291 | 642 | WUblastx.64 | (AAH08720) Unknown | AAH08720 | 99% | 75 | 1310 |
| | | | | (protein for MGC: 8447). | | 40% | 70 | 198 |
| HAPBS03 | 656755 | 40 | WUblastx.64 | (Q99KG1) SIMILAR TO | Q99KG1 | 51% | 59 | 175 |
| | | | | HETEROGENEOUS | | 85% | 593 | 655 |
| | | | | NUCLEAR | | 62% | 643 | 777 |
| | | | | RIBONUCLEOPROTEIN | | | | |
| | | | | R (FRAGME | | | | |
| HAPPW30 | 1352278 | 43 | WUblastx.64 | (Q8WUJ1) Hypothetical | Q8WUJ1 | 100% | 59 | 850 |
| | | | | 28.7 kDa protein. | | | | |
| HAPPW30 | 684272 | 643 | WUblastx.64 | (Q8WUJ1) Hypothetical | Q8WUJ1 | 100% | 54 | 263 |
| | | | | 28.7 kDa protein. | | 36% | 982 | 1056 |
| | | | | | | 100% | 266 | 844 |
| HAPQT22 | 587601 | 44 | WUblastx.64 | (Q9H728) CDNA: | Q9H728 | 53% | 634 | 590 |
| | | | | FLJ21463 FIS, CLONE | | 69% | 606 | 439 |
| | | | | COL04765. | | | | |
| HAPUC89 | 834358 | 45 | WUblastx.64 | (Q9BUM1) UNKNOWN | Q9BUM1 | 99% | 109 | 804 |
| | | | | (PROTEIN FOR | | | | |
| | | | | IMAGE: 3050476) | | | | |
| | | | | (FRAGMENT). | | | | |
| HASAV70 | 1300782 | 46 | WUblastx.64 | (Q9NY08) 19A | Q9NY08 | 82% | 7 | 423 |
| | | | | PROTEIN. | | | | |
| HASAV70 | 381953 | 644 | WUblastx.64 | (Q9NY08) 19A | Q9NY08 | 100% | 4 | 432 |
| | | | | PROTEIN. | | | | |
| HATAC53 | 1352276 | 48 | WUblastx.64 | (Q8WUN9) Hypothetical | Q8WUN9 | 99% | 64 | 840 |
| | | | | 29.4 kDa protein | | | | |
| | | | | (Fragment). | | | | |
| HATAC53 | 667830 | 645 | WUblastx.64 | (Q8WUN9) Hypothetical | Q8WUN9 | 98% | 66 | 593 |
| | | | | 29.4 kDa protein | | 66% | 516 | 665 |
| | | | | (Fragment). | | | | |
| HATBR65 | 635514 | 49 | WUblastx.64 | (Q96NR6) CDNA | Q96NR6 | 42% | 750 | 806 |
| | | | | FLJ30278 fis, clone | | 64% | 617 | 751 |
| | | | | BRACE2002755. | | | | |
| HATCP77 | 748244 | 51 | WUblastx.64 | (Q9Y691) MAXIK | Q9Y691 | 100% | 10 | 582 |
| | | | | CHANNEL BETA 2 | | | | |
| | | | | SUBUNIT (LARGE | | | | |
| | | | | CONDUCTANCE | | | | |
| | | | | CALCIUM-ACTI | | | | |
| HBAFJ33 | 625916 | 53 | WUblastx.64 | (Q9GZR7) | Q9GZR7 | 96% | 672 | 950 |
| | | | | HYPOTHETICAL 96.3 KDA | | | | |
| | | | | PROTEIN (ATP- | | | | |
| | | | | DEPENDENT RNA | | | | |
| | | | | HELICASE) ( | | | | |
| HBAFV19 | 843036 | 54 | WUblastx.64 | (Q9H068) | Q9H068 | 100% | 3 | 779 |
| | | | | HYPOTHETICAL 69.9 KDA | | | | |
| | | | | PROTEIN. | | | | |
| HBCPB32 | 1352403 | 56 | WUblastx.64 | (Q96EP9) Unknown | Q96EP9 | 92% | 680 | 844 |
| | | | | (protein for | | 100% | 1 | 690 |
| | | | | IMAGE: 3502817) | | | | |
| | | | | (Fragment). | | | | |
| HBCPB32 | 1045580 | 646 | HMMER | PFAM: Sodium Bile acid | PF01758 | 41.2 | 87 | −230 |
| | | | 2.1.1 | symporter family | | | | |
| | | | WUblastx.64 | (Q96EP9) Unknown | Q96EP9 | 100% | 2 | 589 |
| | | | | (protein for | | | | |
| | | | | IMAGE: 3502817) | | | | |
| | | | | (Fragment). | | | | |
| HBCQL32 | 1027748 | 647 | WUblastx.64 | (AAH08044) Unknown | AAH08044 | 100% | 102 | 182 |
| | | | | (protein for MGC: 16063). | | | | |
| HBGNU56 | 1352412 | 58 | WUblastx.64 | (Q96DB9) FXYD | FXY5_HUMAN | 100% | 125 | 637 |
| | | | | domain-containing ion | | | | |
| | | | | transport regulator 5 p | | | | |
| HBGNU56 | 1094642 | 648 | HMMER | PFAM: | PF02038 | 70.5 | 475 | 609 |
| | | | 2.1.1 | ATP1G1/PLM/MAT8 | | | | |
| | | | | family | | | | |
| | | | WUblastx.64 | (Q96DB9) FXYD | FXY5_HUMAN | 100% | 79 | 612 |
| | | | | domain-containing ion | | | | |
| | | | | transport regulator 5 p | | | | |
| HBGNU56 | 1050255 | 649 | HMMER | PFAM: | PF02038 | 70.5 | 521 | 655 |
| | | | 2.1.1 | ATP1G1/PLM/MAT8 | | | | |
| | | | | family | | | | |
| | | | WUblastx.64 | (Q96DB9) FXYD | FXY5_HUMAN | 100% | 125 | 658 |
| | | | | domain-containing ion | | | | |
| | | | | transport regulator 5 p | | | | |
| HBHMA23 | 848016 | 60 | WUblastx.64 | (AAM00283) Von Ebner | AAM00283 | 100% | 643 | 1035 |
| | | | | minor protein. | | 99% | 71 | 649 |
| HBHMA23 | 699815 | 650 | WUblastx.64 | (AAM00283) Von Ebner | AAM00283 | 100% | 70 | 273 |
| | | | | minor protein. | | 92% | 907 | 1032 |
| | | | | | | 97% | 641 | 916 |
| | | | | | | 94% | 261 | 647 |
| HBIMB51 | 963208 | 61 | WUblastx.64 | (Q969E3) Urocortin III | Q969E3 | 99% | 98 | 535 |
| | | | | (Stresscopin). | | | | |
| HBIMB51 | 672711 | 651 | WUblastx.64 | (Q924A4) Urocortin III. | Q924A4 | 61% | 296 | 517 |
| | | | | | | 64% | 93 | 302 |
| HBINS58 | 1352386 | 62 | WUblastx.64 | (Q9D6W7) | Q9D6W7 | 81% | 57 | 578 |
| | | | | 2310047N01RIK | | | | |
| | | | | PROTEIN. | | | | |
| HBINS58 | 961712 | 652 | WUblastx.64 | (Q9D6W7) | Q9D6W7 | 80% | 71 | 589 |
| | | | | 2310047N01RIK | | | | |
| | | | | PROTEIN. | | | | |
| HBINS58 | 892924 | 653 | WUblastx.64 | (Q9D6W7) | Q9D6W7 | 79% | 100 | 579 |
| | | | | 2310047N01RIK | | | | |
| | | | | PROTEIN. | | | | |
| HBJFU48 | 460392 | 63 | WUblastx.64 | (Q9P195) PRO1722. | Q9P195 | 63% | 716 | 660 |
| | | | | | | 73% | 819 | 718 |
| | | | | | | 64% | 667 | 533 |
| HBJLF01 | 732111 | 66 | HMMER | PFAM: Transmembrane 4 | PF00335 | 131.8 | 223 | 891 |
| | | | 2.1.1 | family | | | | |
| | | | WUblastx.64 | (AAH24685) Similar to | AAH24685 | 93% | 133 | 948 |
| | | | | transmembrane 4 | | | | |
| | | | | superfamily m | | | | |
| HBJNC59 | 1125802 | 68 | WUblastx.64 | complement | pir\|S14350\| | 100% | 66 | 800 |
| | | | | subcomponent C1q chain | C1HUQA | | | |
| | | | | A precursor [validated] - | | | | |
| | | | | human | | | | |
| HBJNC59 | 899397 | 654 | HMMER | PFAM: Collagen triple | PF01391 | 30.1 | 144 | 245 |
| | | | 2.1.1 | helix repeat (20 copies) | | | | |
| | | | WUblastx.64 | (Q9H2L7) DC33. | Q9H2L7 | 79% | 77 | 907 |
| HBJNC59 | 902207 | 655 | HMMER | PFAM: C1q domain | PF00386 | 250.2 | 409 | 786 |
| | | | 2.1.1 | | | | | |
| | | | WUblastx.64 | complement | pir\|S14350\| | 100% | 64 | 798 |
| | | | | subcomponent C1q chain | C1HUQA | | | |
| | | | | A precursor [validated] - | | | | |
| | | | | human | | | | |
| HBOEG11 | 1300752 | 71 | WUblastx.64 | (O76076) CONNECTIVE | O76076 | 75% | 57 | 806 |
| | | | | TISSUE GROWTH | | | | |
| | | | | FACTOR-LIKE | | | | |
| | | | | PROTEIN PRECURSOR | | | | |
| | | | | (BA44 | | | | |
| HBOEG11 | 1121709 | 656 | HMMER | PFAM: Insulin-like | PF00219 | 45.4 | 128 | 340 |
| | | | 2.1.1 | growth factor binding | | | | |
| | | | | proteins | | | | |
| | | | WUblastx.64 | (O76076) CONNECTIVE | O76076 | 100% | 53 | 802 |
| | | | | TISSUE GROWTH | | | | |
| | | | | FACTOR-LIKE | | | | |
| | | | | PROTEIN PRECURSOR | | | | |
| | | | | (BA44 | | | | |
| HBOEG11 | 1049830 | 657 | HMMER | PFAM: Insulin-like | PF00219 | 45.4 | 122 | 334 |
| | | | 2.1.1 | growth factor binding | | | | |
| | | | | proteins | | | | |
| | | | WUblastx.64 | (O76076) CONNECTIVE | O76076 | 100% | 47 | 796 |
| | | | | TISSUE GROWTH | | | | |
| | | | | FACTOR-LIKE | | | | |
| | | | | PROTEIN PRECURSOR | | | | |
| | | | | (BA44 | | | | |
| HBOEG69 | 793786 | 72 | WUblastx.64 | (Q9NS11) | Q9NS11 | 71% | 424 | 314 |
| | | | | LIPOPOLYSACCHARIDE | | 100% | 345 | 196 |
| | | | | SPECIFIC RESPONSE- | | | | |
| | | | | 68 PROTEIN. | | | | |
| HBXFL29 | 842802 | 73 | WUblastx.64 | (Q8WYF7) POB1. | Q8WYF7 | 99% | 4 | 1008 |
| HCACU58 | 625923 | 74 | WUblastx.64 | (Q9NX85) CDNA | Q9NX85 | 69% | 548 | 820 |
| | | | | FLJ20378 FIS, CLONE | | | | |
| | | | | KAIA0536. | | | | |
| HCACV51 | 1306706 | 75 | WUblastx.64 | (Q99LM9) UNKNOWN | Q99LM9 | 85% | 8 | 1009 |
| | | | | (PROTEIN FOR | | | | |
| | | | | MGC: 8251). | | | | |
| HCACV51 | 598022 | 658 | WUblastx.64 | (Q96BN2) Similar to | Q96BN2 | 97% | 13 | 312 |
| | | | | RIKEN cDNA | | 91% | 323 | 1015 |
| | | | | 2900026B15 gene. | | | | |
| HCE1Q89 | 520329 | 77 | WUblastx.64 | (Q9NX85) CDNA | Q9NX85 | 86% | 590 | 525 |
| | | | | FLJ20378 FIS, CLONE | | 61% | 645 | 592 |
| | | | | KAIA0536. | | 65% | 859 | 683 |
| HCE2F54 | 634016 | 78 | HMMER | PFAM: Histone-like | PF00808 | 19 | 868 | 1005 |
| | | | 2.1.1 | transcription factor | | | | |
| | | | | (CBF/NF-Y) and archaeal | | | | |
| | | | | histone | | | | |
| | | | WUblastx.64 | (AAH07642) Unknown | AAH07642 | 82% | 298 | 1122 |
| | | | | (protein for | | | | |
| | | | | IMAGE: 3534358) (Fra | | | | |
| HCEFB80 | 1143407 | 79 | WUblastx.64 | (Q96FR3) Unknown | Q96FR3 | 100% | 1785 | 1979 |
| | | | | (protein for MGC: 18083). | | | | |
| HCEFB80 | 1046853 | 659 | WUblastx.64 | (Q96FR3) Unknown | Q96FR3 | 100% | 1777 | 1971 |
| | | | | (protein for MGC: 18083). | | | | |
| HCEGR33 | 425212 | 80 | WUblastx.64 | (Q9H743) CDNA: | Q9H743 | 51% | 1002 | 1079 |
| | | | | FLJ21394 FIS, CLONE | | 42% | 1379 | 1492 |
| | | | | COL03536. | | 58% | 907 | 993 |
| HCEMP62 | 684780 | 81 | WUblastx.64 | (Q8WZ37) Hypothetical | Q8WZ37 | 75% | 484 | 897 |
| | | | | 43.7 kDa protein. | | 78% | 88 | 459 |
| | | | | | | 41% | 1 | 183 |
| | | | | | | 94% | 870 | 926 |
| HCEWE17 | 941941 | 83 | WUblastx.64 | (Q9H310) RH TYPE B | Q9H310 | 95% | 9 | 341 |
| | | | | GLYCOPROTEIN. | | 100% | 425 | 463 |
| | | | | | | 92% | 444 | 566 |
| HCEWE17 | 893535 | 661 | WUblastx.64 | (Q9H310) RH TYPE B | Q9H310 | 78% | 467 | 580 |
| | | | | GLYCOPROTEIN. | | 75% | 695 | 730 |
| | | | | | | 100% | 676 | 714 |
| | | | | | | 100% | 3 | 482 |
| HCEWE17 | 460407 | 662 | WUblastx.64 | (Q9H310) RH TYPE B | Q9H310 | 96% | 7 | 105 |
| | | | | GLYCOPROTEIN. | | | | |
| HCEWE20 | 543370 | 84 | WUblastx.64 | (Q9P1J1) PRO1546. | Q9P1J1 | 76% | 501 | 551 |
| | | | | | | 79% | 601 | 717 |
| HCFOM18 | 553582 | 88 | WUblastx.64 | (Q9H728) CDNA: | Q9H728 | 60% | 621 | 490 |
| | | | | FLJ21463 FIS, CLONE | | | | |
| | | | | COL04765. | | | | |
| HCHNF25 | 1352270 | 89 | WUblastx.64 | (AAL76113) Androgen- | AAL76113 | 99% | 3069 | 2188 |
| | | | | induced basic leucine | | 64% | 3371 | 2811 |
| | | | | zipper. | | 24% | 622 | 425 |
| HCHNF25 | 658672 | 663 | WUblastx.64 | (AAH00499) Jumping | AAH00499 | 91% | 180 | 620 |
| | | | | translocation breakpoint. | | | | |
| HCNSM70 | 637547 | 95 | HMMER | PFAM: Immunoglobulin | PF00047 | 32 | 224 | 481 |
| | | | 2.1.1 | domain | | | | |
| | | | WUblastx.64 | (O60487) EPITHELIAL | O60487 | 98% | 107 | 751 |
| | | | | V-LIKE ANTIGEN | | | | |
| | | | | PRECURSOR | | | | |
| | | | | (EPITHELIAL V-LIKE | | | | |
| | | | | ANTIG | | | | |
| HCNSM70 | 589445 | 665 | WUblastx.64 | (O60487) EPITHELIAL | O60487 | 100% | 161 | 409 |
| | | | | V-LIKE ANTIGEN | | 99% | 408 | 806 |
| | | | | PRECURSOR | | | | |
| | | | | (EPITHELIAL V-LIKE | | | | |
| | | | | ANTIG | | | | |
| HCOOS80 | 1134974 | 96 | WUblastx.64 | (O14641) SEGMENT | DVL2_HUMAN | 100% | 8 | 637 |
| | | | | POLARITY PROTEIN | | | | |
| | | | | DISHEVELLED | | | | |
| | | | | HOMOLOG DVL-2 | | | | |
| HCOOS80 | 1045182 | 666 | WUblastx.64 | (O14641) SEGMENT | DVL2_HUMAN | 100% | 21 | 683 |
| | | | | POLARITY PROTEIN | | | | |
| | | | | DISHEVELLED | | | | |
| | | | | HOMOLOG DVL-2 | | | | |
| HCOOS80 | 1045183 | 667 | WUblastx.64 | (O14641) SEGMENT | DVL2_HUMAN | 94% | 65 | 115 |
| | | | | POLARITY PROTEIN | | 91% | 1 | 69 |
| | | | | DISHEVELLED | | | | |
| | | | | HOMOLOG DVL-2 | | | | |
| HCUCK44 | 720291 | 98 | WUblastx.64 | hypothetical protein | pir\|T34520\|T34520 | 97% | 21 | 524 |
| | | | | DKFZp564J157.1 - | | | | |
| | | | | human (fragment) | | | | |
| HCUEO60 | 499242 | 99 | WUblastx.64 | (Q96MM0) CDNA | Q96MM0 | 79% | 1043 | 972 |
| | | | | FLJ32172 fis, clone | | 72% | 1222 | 1028 |
| | | | | PLACE6000555. | | | | |
| HCUHK65 | 651313 | 100 | WUblastx.64 | (Q9H3W5) | Q9H3W5 | 100% | 11 | 316 |
| | | | | HYPOTHETICAL 79.4 | | | | |
| | | | | KDA PROTEIN. | | | | |
| HCUHK65 | 880178 | 668 | HMMER | PFAM: Leucine Rich | PF00560 | 92.1 | 1190 | 1261 |
| | | | 2.1.1 | Repeat | | | | |
| | | | WUblastx.64 | (Q9H3W5) | Q9H3W5 | 100% | 770 | 2893 |
| | | | | HYPOTHETICAL 79.4 | | | | |
| | | | | KDA PROTEIN. | | | | |
| HCWEB58 | 1352416 | 102 | WUblastx.64 | (Q92WW6) Putative | Q92WW6 | 41% | 264 | 335 |
| | | | | sensor histidine kinase | | 45% | 166 | 231 |
| | | | | protein. | | 38% | 301 | 1167 |
| HCWEB58 | 1115089 | 669 | HMMER | PFAM: Domain found in | PF00672 | 40.4 | 442 | 651 |
| | | | 2.1.1 | bacterial signal proteins | | | | |
| | | | WUblastx.64 | sensor histidine kinase | pir\|A87396\|A87396 | 36% | 379 | 915 |
| | | | | [imported] - Caulobacter | | 31% | 268 | 363 |
| | | | | crescentus | | | | |
| HCWEB58 | 889268 | 670 | HMMER | PFAM: Domain found in | PF00672 | 41.6 | 350 | 559 |
| | | | 2.1.1 | bacterial signal proteins | | | | |
| | | | WUblastx.64 | sensor histidine kinase | pir\|A87396\|A87396 | 36% | 287 | 823 |
| | | | | [imported] - Caulobacter | | 31% | 176 | 271 |
| | | | | crescentus | | | | |
| HCWGU37 | 1042325 | 103 | WUblastx.64 | (O60448) NEURONAL | O60448 | 43% | 2724 | 2371 |
| | | | | THREAD PROTEIN | | 75% | 2373 | 2326 |
| | | | | AD7C-NTP. | | 63% | 2776 | 2447 |
| | | | | | | 65% | 2758 | 2579 |
| HCWKC15 | 553621 | 104 | WUblastx.64 | (Q9NX85) CDNA | Q9NX85 | 77% | 538 | 419 |
| | | | | FLJ20378 FIS, CLONE | | 56% | 710 | 663 |
| | | | | KAIA0536. | | 63% | 708 | 532 |
| HCWUM50 | 639037 | 106 | WUblastx.64 | (Q9NWD1) | Q9NWD1 | 94% | 2 | 175 |
| | | | | HYPOTHETICAL 61.6 | | 73% | 1103 | 1303 |
| | | | | KDA PROTEIN. | | | | |
| HCYBG92 | 598019 | 107 | WUblastx.64 | (Q9UPI3) | Q9UPI3 | 100% | 76 | 939 |
| | | | | HYPOTHETICAL 57.2 | | | | |
| | | | | KDA PROTEIN. | | | | |
| HDABR72 | 1301517 | 108 | WUblastx.64 | (Q9BTK4) UNKNOWN | Q9BTK4 | 100% | 695 | 886 |
| | | | | (PROTEIN FOR | | | | |
| | | | | MGC: 4663). | | | | |
| HDABR72 | 748225 | 672 | HMMER | PFAM: Cytochrome P450 | PF00067 | 21.7 | 145 | 282 |
| | | | 2.1.1 | | | | | |
| | | | WUblastx.64 | (Q9BTK4) UNKNOWN | Q9BTK4 | 100% | 690 | 881 |
| | | | | (PROTEIN FOR | | | | |
| | | | | MGC: 4663). | | | | |
| HDHEB60 | 499233 | 109 | WUblastx.64 | (Q9Y5Y5) | Q9Y5Y5 | 81% | 277 | 1284 |
| | | | | PEROXISOMAL | | | | |
| | | | | BIOGENESIS FACTOR | | | | |
| | | | | 16. | | | | |
| HDHIA94 | 765171 | 110 | HMMER | PFAM: Sodium/calcium | PF01699 | 121.4 | 178 | 615 |
| | | | 2.1.1 | exchanger protein | | | | |
| | | | WUblastx.64 | (Q9HC58) | Q9HC58 | 90% | 10 | 657 |
| | | | | SODIUM/CALCIUM | | | | |
| | | | | EXCHANGER NCKX3. | | | | |
| HDHIA94 | 637576 | 673 | HMMER | PFAM: Sodium/calcium | PF01699 | 22.9 | 187 | 273 |
| | | | 2.1.1 | exchanger protein | | | | |
| HDHMA72 | 547772 | 111 | WUblastx.64 | (Q8WVP7) Hypothetical | Q8WVP7 | 28% | 3700 | 3891 |
| | | | | 55.1 kDa protein. | | 95% | 761 | 1168 |
| | | | | | | 50% | 1019 | 1231 |
| | | | | | | 99% | 2 | 592 |
| HDLAC10 | 692299 | 112 | WUblastx.64 | (Q9UBJ4) | Q9UBJ4 | 99% | 29 | 1378 |
| | | | | TRANSPOSASE-LIKE | | | | |
| | | | | PROTEIN. | | | | |
| HDPBI32 | 1352360 | 114 | WUblastx.64 | (O88407) NEURAL | O88407 | 92% | 37 | 984 |
| | | | | MEMBRANE PROTEIN | | | | |
| | | | | 35. | | | | |
| HDPBI32 | 862851 | 674 | WUblastx.64 | (O88407) NEURAL | O88407 | 95% | 599 | 1051 |
| | | | | MEMBRANE PROTEIN | | 89% | 103 | 603 |
| | | | | 35. | | | | |
| HDPBI32 | 590733 | 675 | HMMER | PFAM: Uncharacterized | PF01027 | 126.8 | 51 | 461 |
| | | | 2.1.1 | protein family | | | | |
| HDPBQ71 | 1160316 | 115 | WUblastx.64 | (Q9BRE2) | Q9BRE2 | 100% | 90 | 1928 |
| | | | | HYPOTHETICAL 68.4 | | | | |
| | | | | KDA PROTEIN | | | | |
| | | | | (FRAGMENT). | | | | |
| HDPBQ71 | 727200 | 676 | WUblastx.64 | (Q9BRE2) | Q9BRE2 | 99% | 21 | 1859 |
| | | | | HYPOTHETICAL 68.4 | | | | |
| | | | | KDA PROTEIN | | | | |
| | | | | (FRAGMENT). | | | | |
| HDPBQ71 | 886067 | 677 | WUblastx.64 | (Q9H2V9) CDA08. | Q9H2V9 | 100% | 1532 | 1999 |
| | | | | | | 65% | 169 | 264 |
| | | | | | | 44% | 182 | 322 |
| | | | | | | 21% | 1456 | 1551 |
| | | | | | | 93% | 186 | 1541 |
| HDPCJ91 | 740748 | 116 | WUblastx.64 | (Q9H387) PRO2550. | Q9H387 | 53% | 2369 | 2407 |
| | | | | | | 56% | 2377 | 2676 |
| HDPCY37 | 837699 | 118 | HMMER | PFAM: Glycosyl | PF01532 | 627.5 | 199 | 1521 |
| | | | 2.1.1 | hydrolase family 47 | | | | |
| | | | WUblastx.64 | (Q9H886) CDNA | Q9H886 | 99% | 76 | 1809 |
| | | | | FLJ13869 FIS, CLONE | | | | |
| | | | | THYRO1001287, | | | | |
| | | | | WEAKLY SIMILAR TO | | | | |
| | | | | MAN | | | | |
| HDPCY37 | 604114 | 678 | HMMER | PFAM: Glycosyl | PF01532 | 324 | 199 | 834 |
| | | | 2.1.1 | hydrolase family 47 | | | | |
| | | | WUblastx.64 | (Q9H886) CDNA | Q9H886 | 97% | 76 | 840 |
| | | | | FLJ13869 FIS, CLONE | | 99% | 813 | 1808 |
| | | | | THYRO1001287, | | | | |
| | | | | WEAKLY SIMILAR TO | | | | |
| | | | | MAN | | | | |
| HDPFB02 | 898208 | 119 | WUblastx.64 | (Q9BXR1) | Q9BXR1 | 98% | 146 | 499 |
| | | | | COSTIMULATORY | | 97% | 877 | 1749 |
| | | | | MOLECULE. | | 97% | 495 | 620 |
| | | | | | | 76% | 568 | 900 |
| HDPFB02 | 1056541 | 679 | HMMER | PFAM: Immunoglobulin | PF00047 | 53.2 | 610 | 804 |
| | | | 2.1.1 | domain | | | | |
| | | | WUblastx.64 | (Q9BXR1) | Q9BXR1 | 99% | 139 | 1086 |
| | | | | COSTIMULATORY | | | | |
| | | | | MOLECULE. | | | | |
| HDPFB02 | 997408 | 680 | HMMER | PFAM: Immunoglobulin | PF00047 | 26.9 | 305 | 562 |
| | | | 2.1.1 | domain | | | | |
| | | | WUblastx.64 | (Q9HD18) | Q9HD18 | 99% | 218 | 1123 |
| | | | | TRANSMEMBRANE | | | | |
| | | | | PROTEIN B7-H2 ICOS | | | | |
| | | | | LIGAND (B7-RELATED | | | | |
| | | | | PROTEIN- | | | | |
| HDPFF39 | 588697 | 120 | WUblastx.64 | (O96005) CLEFT LIP | O96005 | 100% | 3 | 29 |
| | | | | AND PALATE | | 100% | 97 | 762 |
| | | | | TRANSMEMBRANE | | | | |
| | | | | PROTEIN 1. | | | | |
| HDPGP94 | 823355 | 123 | WUblastx.64 | (Q14288) | Q14288 | 47% | 614 | 216 |
| | | | | HYPOTHETICAL | | 88% | 1297 | 1271 |
| | | | | PROTEIN | | 48% | 909 | 700 |
| | | | | (FRAGMENT). | | 28% | 1767 | 1537 |
| | | | | | | 39% | 1093 | 890 |
| | | | | | | 35% | 1275 | 1090 |
| | | | | | | 27% | 2282 | 2082 |
| HDPJF37 | 704487 | 125 | WUblastx.64 | (Q9BSQ8) UNKNOWN | Q9BSQ8 | 94% | 105 | 650 |
| | | | | (PROTEIN FOR | | 36% | 158 | 718 |
| | | | | IMAGE: 3510191) | | 93% | 19 | 153 |
| | | | | (FRAGMENT). | | | | |
| HDPMM88 | 972734 | 126 | HMMER | PFAM: E1-E2 ATPase | PF00122 | 31 | 475 | 543 |
| | | | 2.1.1 | | | | | |
| | | | WUblastx.64 | (P98198) POTENTIAL | AT1D_HUMAN | 68% | 106 | 2907 |
| | | | | PHOSPHOLIPID- | | 32% | 2917 | 2991 |
| | | | | TRANSPORTING | | | | |
| | | | | ATPASE ID (EC | | | | |
| HDPMM88 | 906121 | 681 | WUblastx.64 | (Q96NQ7) CDNA | Q96NQ7 | 50% | 356 | 403 |
| | | | | FLJ30324 fis, clone | | 76% | 3 | 365 |
| | | | | BRACE2007138, weakly | | | | |
| | | | | similar to PRO | | | | |
| HDPMM88 | 902299 | 682 | WUblastx.64 | (P98199) POTENTIAL | AT1D_MOUSE | 73% | 2 | 172 |
| | | | | PHOSPHOLIPID- | | | | |
| | | | | TRANSPORTING | | | | |
| | | | | ATPASE ID (EC | | | | |
| HDPMM88 | 885059 | 683 | WUblastx.64 | (AAH07837) Unknown | AAH07837 | 75% | 63 | 16 |
| | | | | (protein for | | 69% | 598 | 62 |
| | | | | IMAGE: 4111596) (Fra | | | | |
| HDPMM88 | 874074 | 684 | WUblastx.64 | (P98198) POTENTIAL | AT1D_HUMAN | 65% | 1023 | 1 |
| | | | | PHOSPHOLIPID- | | | | |
| | | | | TRANSPORTING | | | | |
| | | | | ATPASE ID (EC | | | | |
| HDPNC61 | 637585 | 127 | WUblastx.64 | (Q8WY51) HC6. | Q8WY51 | 52% | 654 | 827 |
| | | | | | | 64% | 37 | 78 |
| HDPND46 | 637586 | 128 | WUblastx.64 | (Q9BR26) DJ257E24.3 | Q9BR26 | 81% | 12 | 1466 |
| | | | | (NOVEL PROTEIN) | | | | |
| | | | | (FRAGMENT). | | | | |
| HDPOE32 | 897276 | 129 | WUblastx.64 | (Q9BW48) MY047 | Q9BW48 | 98% | 64 | 345 |
| | | | | PROTEIN. | | | | |
| HDPOH06 | 683371 | 130 | HMMER | PFAM: Uncharacterized | PF01554 | 90.8 | 255 | 596 |
| | | | 2.1.1 | membrane protein family | | | | |
| | | | WUblastx.64 | (Q96FL8) Hypothetical | Q96FL8 | 99% | 18 | 977 |
| | | | | 61.9 kDa protein. | | | | |
| HDPOZ56 | 1352319 | 131 | WUblastx.64 | (BAB84923) FLJ00168 | BAB84923 | 100% | 28 | 1791 |
| | | | | protein (Fragment). | | | | |
| HDPOZ56 | 815653 | 687 | HMMER | PFAM: Flavin containing | PF01593 | 431.1 | 307 | 1614 |
| | | | 2.1.1 | amine oxidase | | | | |
| | | | WUblastx.64 | (BAB84923) FLJ00168 | BAB84923 | 99% | 40 | 1800 |
| | | | | protein (Fragment). | | | | |
| HDPOZ56 | 743479 | 688 | HMMER | PFAM: Flavin containing | PF01593 | 185.2 | 200 | 949 |
| | | | 2.1.1 | amine oxidase | | | | |
| | | | WUblastx.64 | (BAB84923) FLJ00168 | BAB84923 | 98% | 197 | 958 |
| | | | | protein (Fragment). | | 99% | 952 | 1647 |
| | | | | | | 100% | 2 | 202 |
| HDPSP54 | 744440 | 132 | WUblastx.64 | (BAB85063) CDNA | BAB85063 | 99% | 2 | 307 |
| | | | | FLJ23790 fis, clone | | | | |
| | | | | HEP21466. | | | | |
| HDPTD15 | 692917 | 133 | WUblastx.64 | (Q9BU29) UNKNOWN | Q9BU29 | 97% | 937 | 833 |
| | | | | (PROTEIN FOR | | | | |
| | | | | IMAGE: 3954899) | | | | |
| | | | | (FRAGMENT). | | | | |
| HDPTK41 | 744824 | 134 | WUblastx.64 | (BAB11849) MOP-2. | BAB11849 | 97% | 1013 | 1126 |
| | | | | | | 94% | 102 | 1025 |
| HDPUG50 | 684120 | 135 | WUblastx.64 | (Q9BVK2) UNKNOWN | Q9BVK2 | 96% | 55 | 1599 |
| | | | | (PROTEIN FOR | | | | |
| | | | | MGC: 2840). | | | | |
| HDPUH26 | 866433 | 136 | WUblastx.64 | (Q8VHE7) Hypothetical | Q8VHE7 | 80% | 261 | 1733 |
| | | | | 67.5 kDa protein. | | 69% | 162 | 290 |
| HDPUW68 | 812737 | 137 | HMMER | PFAM: Immunoglobulin | PF00047 | 38.9 | 844 | 1005 |
| | | | 2.1.1 | domain | | | | |
| | | | WUblastx.64 | (Q9Y286) QA79 | Q9Y286 | 100% | 40 | 1440 |
| | | | | MEMBRANE PROTEIN, | | | | |
| | | | | ALLELIC VARIANT | | | | |
| | | | | AIRM-1B PRECURSOR. | | | | |
| HDPVH60 | 796865 | 138 | WUblastx.64 | (BAB55096) CDNA | BAB55096 | 95% | 235 | 294 |
| | | | | FLJ14508 fis, clone | | 38% | 288 | 473 |
| | | | | NT2RM1000421, w | | 58% | 244 | 294 |
| | | | | | | 88% | 288 | 1610 |
| | | | | | | 40% | 456 | 521 |
| | | | | | | 29% | 1215 | 1487 |
| | | | | | | 31% | 1389 | 1607 |
| | | | | | | 42% | 238 | 294 |
| | | | | | | 38% | 1607 | 1861 |
| | | | | | | 27% | 798 | 1544 |
| | | | | | | 42% | 1317 | 1478 |
| | | | | | | 24% | 1604 | 2017 |
| | | | | | | 30% | 1613 | 1903 |
| | | | | | | 25% | 1607 | 1906 |
| | | | | | | 27% | 1658 | 2032 |
| | | | | | | 86% | 1580 | 2077 |
| | | | | | | 29% | 1628 | 1903 |
| | | | | | | 35% | 1200 | 1598 |
| | | | | | | 42% | 238 | 294 |
| HDPVW11 | 1036997 | 139 | HMMER | PFAM: AMP-binding | PF00501 | 30.2 | 913 | 1344 |
| | | | 2.1.1 | enzyme | | | | |
| | | | WUblastx.64 | (Q9BTY5) UNKNOWN | Q9BTY5 | 52% | 1344 | 1991 |
| | | | | (PROTEIN FOR | | 27% | 1096 | 1332 |
| | | | | MGC: 4365). | | 86% | 1924 | 2097 |
| | | | | | | 30% | 6 | 200 |
| | | | | | | 73% | 13 | 1647 |
| HDPVW11 | 896530 | 690 | WUblastx.64 | (Q9BTY5) UNKNOWN | Q9BTY5 | 84% | 2 | 397 |
| | | | | (PROTEIN FOR | | | | |
| | | | | MGC: 4365). | | | | |
| HDPWN93 | 992925 | 140 | WUblastx.64 | (AAH25255) Similar to | AAH25255 | 99% | 45 | 2450 |
| | | | | hypothetical protein | | | | |
| | | | | FLJ21347 | | | | |
| HDPWN93 | 887914 | 691 | WUblastx.64 | (AAH25255) Similar to | AAH25255 | 97% | 35 | 661 |
| | | | | hypothetical protein | | 68% | 619 | 714 |
| | | | | FLJ21347 | | | | |
| HDPWN93 | 905983 | 692 | WUblastx.64 | (Q9H747) CDNA: | Q9H747 | 68% | 27 | 155 |
| | | | | FLJ21347 FIS, CLONE | | 99% | 205 | 2487 |
| | | | | COL02724. | | | | |
| HDPWU34 | 630354 | 141 | HMMER | PFAM: POT family | PF00854 | 77.2 | 432 | 857 |
| | | | 2.1.1 | | | | | |
| | | | WUblastx.64 | (Q9P2X9) PEPTIDE | Q9P2X9 | 100% | 3 | 1091 |
| | | | | TRANSPORTER 3. | | | | |
| HDQHD03 | 1309175 | 142 | WUblastx.64 | (AAH25621) | AAH25621 | 86% | 520 | 1263 |
| | | | | Hypothetical 137.4 kDa | | | | |
| | | | | protein (Fragment | | | | |
| HDQHD03 | 834692 | 694 | HMMER | PFAM: Cyclic nucleotide- | PF00027 | 44.3 | 709 | 870 |
| | | | 2.1.1 | binding domain | | | | |
| | | | WUblastx.64 | (AAH25621) | AAH25621 | 84% | 505 | 1248 |
| | | | | Hypothetical 137.4 kDa | | | | |
| | | | | protein (Fragment | | | | |
| HDTBD53 | 972757 | 143 | WUblastx.64 | (Q9BTV4) UNKNOWN | Q9BTV4 | 100% | 183 | 1382 |
| | | | | (PROTEIN FOR | | | | |
| | | | | MGC: 3222). | | | | |
| HDTBD53 | 906342 | 695 | WUblastx.64 | (Q9BTV4) UNKNOWN | Q9BTV4 | 99% | 187 | 1386 |
| | | | | (PROTEIN FOR | | | | |
| | | | | MGC: 3222). | | | | |
| HDTBP04 | 1307742 | 144 | WUblastx.64 | (Q9D5J3) | Q9D5J3 | 38% | 70 | 720 |
| | | | | 4930432K09RIK | | | | |
| | | | | PROTEIN. | | | | |
| HDTBP04 | 543618 | 696 | WUblastx.64 | (Q9D5J3) | Q9D5J3 | 38% | 65 | 718 |
| | | | | 4930432K09RIK | | | | |
| | | | | PROTEIN. | | | | |
| HDTDQ23 | 1306984 | 145 | WUblastx.64 | calcium-binding protein | pir\|S04970\|S04970 | 100% | 1611 | 1709 |
| | | | | (clone pMP41) - mouse | | | | |
| | | | | (fragment) | | | | |
| HDTDQ23 | 879009 | 697 | WUblastx.64 | calcium-binding protein | pir\|S04970\|S04970 | 100% | 1623 | 1721 |
| | | | | (clone pMP41) - mouse | | | | |
| | | | | (fragment) | | | | |
| HDTDQ23 | 751707 | 698 | WUblastx.64 | calcium-binding protein | pir\|S04970\|S04970 | 100% | 1623 | 1721 |
| | | | | (clone pMP4) - mouse | | | | |
| | | | | (fragment) | | | | |
| HDTFE17 | 1043391 | 148 | WUblastx.64 | (Q9UJU8) JM24 | Q9UJU8 | 100% | 14 | 118 |
| | | | | PROTEIN | | 84% | 955 | 1089 |
| | | | | FRAGMENT. | | 100% | 343 | 705 |
| HDTFE17 | 874477 | 702 | WUblastx.64 | (Q8WYU2) Hypothetical | Q8WYU2 | 100% | 8 | 112 |
| | | | | 44.0 kDa protein. | | 45% | 554 | 622 |
| | | | | | | 72% | 337 | 612 |
| HDTFE17 | 892317 | 703 | HMMER | PFAM: Transmembrane | PF01490 | 86.4 | 116 | 481 |
| | | | 2.1.1 | amino acid transporter | | | | |
| | | | | protein | | | | |
| | | | WUblastx.64 | (Q8WYU2) Hypothetical | Q8WYU2 | 100% | 457 | 672 |
| | | | | 44.0 kDa protein. | | 97% | 33 | 461 |
| HDTIT10 | 839264 | 150 | HMMER | PFAM: | PF01161 | 50.9 | 463 | 621 |
| | | | 2.1.1 | Phosphatidylethanolamine- | | | | |
| | | | | binding protein | | | | |
| | | | WUblastx.64 | (Q96DV4) Similar to | Q96DV4 | 100% | 819 | 911 |
| | | | | RIKEN cDNA | | 82% | 352 | 858 |
| | | | | 4733401F03 gene. | | | | |
| HDTIT10 | 834697 | 704 | WUblastx.64 | (Q96DV4) Similar to | Q96DV4 | 98% | 343 | 903 |
| | | | | RIKEN cDNA | | | | |
| | | | | 4733401F03 gene. | | | | |
| HDTMK50 | 1011485 | 151 | WUblastx.64 | (Q9H728) CDNA: | Q9H728 | 64% | 1119 | 1045 |
| | | | | FLJ21463 FIS, CLONE | | 72% | 1351 | 1121 |
| | | | | COL04765. | | | | |
| HE2DY70 | 722217 | 152 | WUblastx.64 | (Q9BS33) SIMILAR TO | Q9BS33 | 100% | 9 | 167 |
| | | | | HYPOTHETICAL | | | | |
| | | | | PROTEIN FLJ11218. | | | | |
| HE2FV03 | 396139 | 155 | WUblastx.64 | (Q8WX31) BA382H24.3 | Q8WX31 | 73% | 281 | 805 |
| | | | | (multiple PDZ domain | | | | |
| | | | | protein) (Fragment). | | | | |
| HE2NV57 | 740750 | 156 | WUblastx.64 | (Q9UGV6) BK445C9.3 | Q9UGV6 | 31% | 321 | 866 |
| | | | | (HIGH-MOBILITY | | 66% | 71 | 106 |
| | | | | GROUP (NONHISTONE | | | | |
| | | | | CHROMOSOMAL) | | | | |
| | | | | PROT | | | | |
| HE2PD49 | 638617 | 157 | WUblastx.64 | (Q9BSR6) SIMILAR TO | Q9BSR6 | 100% | 403 | 849 |
| | | | | RIKEN CDNA | | | | |
| | | | | 2410018G23 GENE. | | | | |
| HE8DS15 | 847060 | 160 | WUblastx.64 | (Q9WVT0) SEVEN | Q9WVT0 | 80% | 1 | 270 |
| | | | | TRANSMEMBRANE | | 24% | 48 | 146 |
| | | | | RECEPTOR. | | 87% | 269 | 985 |
| HE8MH91 | 589450 | 161 | WUblastx.64 | (Q9H8Z4) CDNA | Q9H8Z4 | 98% | 9 | 410 |
| | | | | FLJ13121 FIS, CLONE | | | | |
| | | | | NT2RP3002687. | | | | |
| HE8QV67 | 1050076 | 162 | WUblastx.64 | (BAB55430) CDNA | BAB55430 | 100% | 321 | 425 |
| | | | | FLJ14978 fis, clone | | 31% | 487 | 600 |
| | | | | VESEN1000122. | | 100% | 1 | 201 |
| | | | | | | 96% | 1403 | 1684 |
| | | | | | | 96% | 577 | 729 |
| | | | | | | 98% | 800 | 1108 |
| HE8QV67 | 1050077 | 707 | WUblastx.64 | (BAB55430) CDNA | BAB55430 | 100% | 1500 | 1988 |
| | | | | FLJ14978 fis, clone | | 86% | 3 | 206 |
| | | | | VESEN1000122. | | 30% | 109 | 246 |
| | | | | | | 30% | 1366 | 1455 |
| | | | | | | 99% | 334 | 1500 |
| HE9BK23 | 675382 | 163 | HMMER | PFAM: Fibrinogen beta | PF00147 | 77.2 | 762 | 959 |
| | | | 2.1.1 | and gamma chains, C- | | | | |
| | | | | terminal globular domain | | | | |
| | | | WUblastx.64 | (Q9Y5C1) | Q9Y5C1 | 100% | 958 | 1419 |
| | | | | ANGIOPOIETIN 5. | | 92% | 39 | 959 |
| HE9DG49 | 1299935 | 165 | WUblastx.64 | (Q9NYL4) FK506 | Q9NYL4 | 100% | 70 | 672 |
| | | | | BINDING PROTEIN | | | | |
| | | | | PRECURSOR. | | | | |
| HE9DG49 | 658678 | 708 | HMMER | PFAM: FKBP-type | PF00254 | 91 | 211 | 492 |
| | | | 2.1.1 | peptidyl-prolyl cis-trans | | | | |
| | | | | isomerases | | | | |
| | | | WUblastx.64 | (Q9NYL4) FK506 | Q9NYL4 | 100% | 70 | 672 |
| | | | | BINDING PROTEIN | | | | |
| | | | | PRECURSOR. | | | | |
| HE9DG49 | 382000 | 709 | HMMER | PFAM: FKBP-type | PF00254 | 91 | −71 | −352 |
| | | | 2.1.1 | peptidyl-prolyl cis-trans | | | | |
| | | | | isomerases | | | | |
| | | | WUblastx.64 | (Q9NYL4) FK506 | Q9NYL4 | 100% | 578 | 679 |
| | | | | BINDING PROTEIN | | 86% | 78 | 674 |
| | | | | PRECURSOR. | | | | |
| HE9OW20 | 1352337 | 168 | WUblastx.64 | (CAC41349) Alpha2- | CAC41349 | 95% | 129 | 1151 |
| | | | | glucosyltransferase. | | | | |
| HE9OW20 | 838598 | 710 | WUblastx.64 | (CAC41349) Alpha2- | CAC41349 | 99% | 142 | 996 |
| | | | | glucosyltransferase. | | | | |
| HE9OW20 | 834400 | 711 | WUblastx.64 | (CAC41349) Alpha2- | CAC41349 | 93% | 129 | 497 |
| | | | | glucosyltransferase. | | 95% | 449 | 1051 |
| HE9RM63 | 886167 | 169 | WUblastx.64 | (Q9NV86) CDNA | Q9NV86 | 40% | 1995 | 2087 |
| | | | | FLJ10873 FIS, CLONE | | 94% | 82 | 1113 |
| | | | | NT2RP4001730, | | | | |
| | | | | WEAKLY SIMILAR TO | | | | |
| | | | | UDP | | | | |
| HEAAR07 | 561524 | 170 | WUblastx.64 | probable transposase - | pir\|S72481\|S72481 | 57% | 691 | 858 |
| | | | | human transposon MER37 | | 89% | 1020 | 1076 |
| | | | | | | 75% | 210 | 332 |
| | | | | | | 78% | 833 | 1015 |
| | | | | | | 33% | 784 | 864 |
| | | | | | | 55% | 332 | 703 |
| HEBCM63 | 484643 | 173 | WUblastx.64 | (Q9BYH1) SEZ6L. | Q9BYH1 | 91% | 12 | 449 |
| HEBEJ18 | 701802 | 174 | WUblastx.64 | (AAH00573) HSPC163 | AAH00573 | 100% | 51 | 467 |
| | | | | protein. | | | | |
| HEEAG23 | 684254 | 175 | HMMER | PFAM: emp24/gp25L/p24 | PF01105 | 36.2 | 63 | 185 |
| | | | 2.1.1 | family | | | | |
| | | | WUblastx.64 | (AAH23041) Similar to | AAH23041 | 100% | 114 | 185 |
| | | | | RIKEN cDNA | | 99% | 406 | 780 |
| | | | | 2400003B06 gene. | | | | |
| HEEAJ02 | 633657 | 176 | WUblastx.64 | (Q9BW86) | Q9BW86 | 80% | 54 | 761 |
| | | | | PHOSPHATIDYLETHANOLAMINE | | | | |
| | | | | N- | | | | |
| | | | | METHYLTRANSFERASE. | | | | |
| HEEAQ11 | 777843 | 177 | HMMER | PFAM: Cystatin domain | PF00031 | 39.7 | 360 | 638 |
| | | | 2.1.1 | | | | | |
| | | | WUblastx.64 | (Q9H4G1) BA218C14.1 | Q9H4G1 | 100% | 213 | 653 |
| | | | | (NOVEL CYSTATIN | | | | |
| | | | | FAMILY MEMBER). | | | | |
| HEEBI05 | 1307611 | 178 | WUblastx.64 | (Q9N7S5) PROBABLE | Q9N7S5 | 32% | 252 | 635 |
| | | | | PROTEOPHOSPHOGLYCAN | | | | |
| | | | | (FRAGMENT). | | | | |
| HEEBI05 | 1047700 | 712 | WUblastx.64 | (Q9N7S5) PROBABLE | Q9N7S5 | 32% | 332 | 715 |
| | | | | PROTEOPHOSPHOGLYCAN | | | | |
| | | | | (FRAGMENT). | | | | |
| HEGAH43 | 532596 | 179 | WUblastx.64 | (Q9H1M5) BA530N10.1 | Q9H1M5 | 100% | 29 | 361 |
| | | | | (NOVEL PROTEIN). | | | | |
| HEGAN94 | 885637 | 180 | WUblastx.64 | colipase precursor, | pir\|A46717\|A46717 | 36% | 148 | 393 |
| | | | | pancreatic - dog | | | | |
| HEGAN94 | 769649 | 713 | HMMER | PFAM: Colipase | PF01114 | 24 | 229 | 405 |
| | | | 2.1.1 | | | | | |
| | | | WUblastx.64 | colipase precursor, | pir\|A46717\|A46717 | 36% | 229 | 474 |
| | | | | pancreatic - dog | | | | |
| HEGBS69 | 1048170 | 714 | WUblastx.64 | (Q9H056) | Q9H056 | 100% | 1125 | 778 |
| | | | | HYPOTHETICAL 12.5 KDA | | | | |
| | | | | PROTEIN. | | | | |
| HELGK31 | 681138 | 182 | HMMER | PFAM: DHHC zinc finger | PF01529 | 95.1 | 659 | 820 |
| | | | 2.1.1 | domain | | | | |
| | | | WUblastx.64 | (Q9NPG8) CDNA | Q9NPG8 | 83% | 209 | 1240 |
| | | | | FLJ10479 FIS, CLONE | | | | |
| | | | | NT2RP2000120 (DC1) | | | | |
| | | | | (HYPOTHETICAL 39 | | | | |
| HELGK31 | 340352 | 715 | HMMER | PFAM: DHHC zinc finger | PF01529 | 95.1 | −82 | −243 |
| | | | 2.1.1 | domain | | | | |
| | | | WUblastx.64 | (Q9NPG8) CDNA | Q9NPG8 | 98% | 242 | 496 |
| | | | | FLJ10479 FIS, CLONE | | 36% | 36 | 128 |
| | | | | NT2RP2000120 (DC1) | | 100% | 498 | 1274 |
| | | | | (HYPOTHETICAL 39 | | | | |
| HELHD85 | 847372 | 183 | WUblastx.64 | (Q9N083) UNNAMED | Q9N083 | 52% | 1715 | 1653 |
| | | | | PORTEIN PRODUCT. | | 53% | 1648 | 1559 |
| | | | | | | 67% | 1881 | 1705 |
| HELHL48 | 696945 | 184 | HMMER | PFAM: DHHC zinc finger | PF01529 | 124.3 | 797 | 991 |
| | | | 2.1.1 | domain | | | | |
| | | | WUblastx.64 | hypothetical protein | pir\|T47144\|T47144 | 96% | 359 | 1414 |
| | | | | DKFZp761E1347.1 - | | | | |
| | | | | human (fragment) | | | | |
| HELHL48 | 610025 | 716 | HMMER | PFAM: DHHC zinc finger | PF01529 | 124.3 | 199 | 393 |
| | | | 2.1.1 | domain | | | | |
| | | | WUblastx.64 | hypothetical protein | pir\|T47144\|T47144 | 100% | 470 | 586 |
| | | | | DKFZp761E1347.1 - | | 98% | 585 | 818 |
| | | | | human (fragment) | | 90% | 10 | 471 |
| HEMAM41 | 741647 | 185 | WUblastx.64 | (Q8VDR1) Similar to | Q8VDR1 | 63% | 385 | 744 |
| | | | | RIKEN cDNA | | | | |
| | | | | 2310044D20 gene. | | | | |
| HEMAM41 | 419870 | 717 | WUblastx.64 | (Q8VDR1) Similar to | Q8VDR1 | 83% | 398 | 745 |
| | | | | RIKEN cDNA | | | | |
| | | | | 2310044D20 gene. | | | | |
| HEPAA46 | 596830 | 186 | WUblastx.64 | (Q96PH6) ESC42. | Q96PH6 | 100% | 18 | 386 |
| HESAJ10 | 526013 | 190 | WUblastx.64 | (Q8WWX9) | Q8WWX9 | 96% | 566 | 841 |
| | | | | Selenoprotein SelM. | | 95% | 405 | 545 |
| | | | | | | 64% | 541 | 582 |
| HETAB45 | 609827 | 191 | WUblastx.64 | (Q9NXH2) CDNA | Q9NXH2 | 98% | 646 | 795 |
| | | | | FLJ20254 FIS, CLONE | | 99% | 3 | 647 |
| | | | | COLF6926. | | | | |
| HETLM70 | 1177512 | 193 | WUblastx.64 | (AAH25323) Similar to | AAH25323 | 99% | 3 | 1022 |
| | | | | hypothetical protein | | | | |
| | | | | FLJ21240 | | | | |
| HETLM70 | 1046327 | 719 | WUblastx.64 | (AAH25323) Similar to | AAH25323 | 99% | 3 | 1022 |
| | | | | hypothetical protein | | | | |
| | | | | FLJ21240 | | | | |
| HETLM70 | 1046328 | 720 | WUblastx.64 | (AAH25323) Similar to | AAH25323 | 98% | 101 | 256 |
| | | | | hypothetical protein | | 100% | 2 | 46 |
| | | | | FLJ21240 | | | | |
| HFABG18 | 847073 | 194 | WUblastx.64 | (Q9QZE9) TM6P1. | Q9QZE9 | 95% | 53 | 253 |
| | | | | | | 88% | 237 | 797 |
| HFAMB72 | 490697 | 195 | WUblastx.64 | (Q9Y6F6) JAW1- | Q9Y6F6 | 94% | 672 | 722 |
| | | | | RELATED PROTEIN | | 69% | 1 | 669 |
| | | | | MRVI1A LONG | | | | |
| | | | | ISOFORM. | | | | |
| HFCCQ50 | 579993 | 197 | HMMER | PFAM: | PF01762 | 130.8 | 365 | 1042 |
| | | | 2.1.1 | Galactosyltransferase | | | | |
| | | | WUblastx.64 | (Q9C0J1) BETA-1,3-N- | Q9C0J1 | 95% | 35 | 1102 |
| | | | | ACETYLGLUCOSAMINYLTRANSFERASE | | | | |
| | | | | BGN-T4. | | | | |
| HFFAL36 | 560639 | 200 | WUblastx.64 | (O75525) T-STAR. | O75525 | 100% | 568 | 657 |
| HFGAD82 | 513669 | 201 | WUblastx.64 | membrane glycoprotein | pir\|I78556\|I78556 | 92% | 249 | 410 |
| | | | | M6 - mouse | | | | |
| HFIIZ70 | 1043350 | 202 | WUblastx.64 | (Q8WWX9) | Q8WWX9 | 93% | 833 | 919 |
| | | | | Selenoprotein SelM. | | 86% | 24 | 212 |
| | | | | | | 91% | 423 | 458 |
| | | | | | | 98% | 987 | 1145 |
| HFIIZ70 | 906708 | 721 | WUblastx.64 | (Q8WWX9) | Q8WWX9 | 98% | 1038 | 1196 |
| | | | | Selenoprotein SelM. | | 93% | 884 | 970 |
| | | | | | | 98% | 74 | 241 |
| | | | | | | 91% | 474 | 509 |
| HFKET18 | 889515 | 203 | WUblastx.64 | (Q9HAD8) CDNA | Q9HAD8 | 63% | 1384 | 1485 |
| | | | | FLJ11786 FIS, CLONE | | 54% | 1230 | 1397 |
| | | | | HEMBA1006036. | | 42% | 1444 | 1533 |
| | | | | | | 66% | 1390 | 1434 |
| | | | | | | 50% | 1471 | 1533 |
| HFKFG02 | 634743 | 204 | WUblastx.64 | ISOFORM OAT1.2 OF | tr_vs\|O95742- | 89% | 11 | 265 |
| | | | | O95742 | 01\|O95742 | 100% | 253 | 564 |
| HFPCX09 | 1309793 | 208 | WUblastx.64 | (O95970) LEUCINE- | O95970 | 100% | 161 | 1831 |
| | | | | RICH GLIOMA- | | | | |
| | | | | INACTIVATED | | | | |
| | | | | PROTEIN PRECURSOR. | | | | |
| HFPCX09 | 835390 | 722 | HMMER | PFAM: Leucine rich | PF01463 | 46.3 | 741 | 890 |
| | | | 2.1.1 | repeat C-terminal domain | | | | |
| | | | WUblastx.64 | (O95970) LEUCINE- | O95970 | 99% | 225 | 1895 |
| | | | | RICH GLIOMA- | | | | |
| | | | | INACTIVATED | | | | |
| | | | | PROTEIN PRECURSOR. | | | | |
| HFPCX09 | 598723 | 723 | WUblastx.64 | (O95970) LEUCINE- | O95970 | 86% | 161 | 298 |
| | | | | RICH GLIOMA- | | 94% | 169 | 1830 |
| | | | | INACTIVATED | | | | |
| | | | | PROTEIN PRECURSOR. | | | | |
| HFPCX36 | 526635 | 209 | WUblastx.64 | (Q96NR6) CDNA | Q96NR6 | 56% | 680 | 775 |
| | | | | FLJ30278 fis, clone | | 66% | 450 | 680 |
| | | | | BRACE2002755. | | | | |
| HFTCU19 | 735139 | 211 | WUblastx.64 | (Q96B80) Similar to | Q96B80 | 88% | 20 | 802 |
| | | | | RIKEN cDNA | | | | |
| | | | | 0610040E02 gene. | | | | |
| HFTDL56 | 695976 | 212 | HMMER | PFAM: Neurotransmitter- | PF00065 | 769.9 | 168 | 1574 |
| | | | 2.1.1 | gated ion-channel | | | | |
| | | | WUblastx.64 | (P04760) | ACHG_MOUSE | 99% | 93 | 1649 |
| | | | | ACETYLCHOLINE | | | | |
| | | | | RECEPTOR PROTEIN, | | | | |
| | | | | GAMMA CHAIN | | | | |
| | | | | PRECUR | | | | |
| HFVAB79 | 1300736 | 214 | WUblastx.64 | (Q9BX93) GROUP XIII | Q9BX93 | 100% | 133 | 714 |
| | | | | SECRETED | | | | |
| | | | | PHOSPHOLIPASE A2. | | | | |
| HFVAB79 | 565076 | 725 | WUblastx.64 | (Q9BX93) GROUP XIII | Q9BX93 | 100% | 139 | 720 |
| | | | | SECRETED | | | | |
| | | | | PHOSPHOLIPASE A2. | | | | |
| HFXGT26 | 745381 | 220 | WUblastx.64 | (O95662) POT. ORF VI | O95662 | 57% | 162 | 689 |
| | | | | (FRAGMENT). | | | | |
| HFXHK73 | 609826 | 223 | WUblastx.64 | (Q9H960) CDNA | Q9H960 | 58% | 1164 | 1042 |
| | | | | FLJ12988 FIS, CLONE | | 50% | 1749 | 1714 |
| | | | | NT2RP3000080. | | | | |
| HFXKJ03 | 505207 | 224 | WUblastx.64 | (O62658) LINE-1 | O62658 | 34% | 492 | 292 |
| | | | | ELEMENT ORF2. | | 36% | 920 | 525 |
| HFXKT05 | 658690 | 225 | WUblastx.64 | (Q9H5H7) CDNA: | Q9H5H7 | 81% | 5 | 1015 |
| | | | | FLJ23425 FIS, CLONE | | | | |
| | | | | HEP22862. | | | | |
| HFXKY27 | 634161 | 226 | WUblastx.64 | (Q9P147) PRO2822. | Q9P147 | 86% | 812 | 768 |
| | | | | | | 70% | 928 | 815 |
| HGBFO79 | 422794 | 227 | WUblastx.64 | (AAH06833) Similar to | AAH06833 | 78% | 72 | 140 |
| | | | | DKFZP586F1524 protein. | | 96% | 134 | 1147 |
| HGBIB74 | 837220 | 229 | WUblastx.64 | hypothetical protein | pir\|T28058\|T28058 | 50% | 1387 | 1494 |
| | | | | ZK858.6 - Caenorhabditis | | 51% | 2 | 439 |
| | | | | elegans | | 65% | 482 | 730 |
| | | | | | | 62% | 723 | 1403 |
| HGBIB74 | 838602 | 727 | WUblastx.64 | (Q9V3N6) | Q9V3N6 | 65% | 736 | 1257 |
| | | | | BG: DS00797.1 | | 82% | 537 | 740 |
| | | | | PROTEIN. | | 81% | 1251 | 1505 |
| | | | | | | 27% | 223 | 537 |
| | | | | | | 57% | 61 | 474 |
| HGBIB74 | 899864 | 728 | WUblastx.64 | (Q9V3N6) | Q9V3N6 | 71% | 12 | 950 |
| | | | | BG: DS00797.1 | | | | |
| | | | | PROTEIN. | | | | |
| HHAAF20 | 838603 | 231 | WUblastx.64 | (AAH06738) | AAH06738 | 85% | 540 | 728 |
| | | | | Hypothetical 47.5 kDa | | 81% | 245 | 580 |
| | | | | protein. | | | | |
| HHBCS39 | 1003028 | 232 | WUblastx.64 | (Q9H763) CDNA: | Q9H763 | 98% | 17 | 601 |
| | | | | FLJ21269 FIS, CLONE | | | | |
| | | | | COL01745. | | | | |
| HHBCS39 | 883427 | 729 | WUblastx.64 | (Q9H763) CDNA: | Q9H763 | 98% | 63 | 647 |
| | | | | FLJ21269 FIS, CLONE | | | | |
| | | | | COL01745. | | | | |
| HHEAA08 | 638231 | 233 | WUblastx.64 | (Q9BVD9) UNKNOWN | Q9BVD9 | 61% | 1923 | 1870 |
| | | | | (PROTEIN FOR | | 74% | 2147 | 1923 |
| | | | | MGC: 5149). | | | | |
| HHEMM74 | 941955 | 236 | WUblastx.64 | (Q96QU0) Calcium- | Q96QU0 | 99% | 1741 | 2046 |
| | | | | promoted Ras inactivator. | | | | |
| HHEMM74 | 906815 | 732 | WUblastx.64 | (Q9HBS7) | Q9HBS7 | 66% | 731 | 880 |
| | | | | HYPOTHETICAL 14.2 KDA | | 64% | 592 | 735 |
| | | | | PROTEIN. | | | | |
| HHEMM74 | 902458 | 733 | WUblastx.64 | (Q96QU0) Calcium- | Q96QU0 | 99% | 458 | 1681 |
| | | | | promoted Ras inactivator. | | 89% | 140 | 253 |
| HHEMM74 | 895682 | 734 | WUblastx.64 | (Q96QU0) Calcium- | Q96QU0 | 83% | 316 | 477 |
| | | | | promoted Ras inactivator. | | 100% | 287 | 316 |
| HHEPM33 | 877639 | 239 | WUblastx.64 | (Q96BH1) Ring finger | Q96BH1 | 97% | 10 | 1230 |
| | | | | protein25. | | 100% | 1185 | 1373 |
| HHEPU04 | 838217 | 241 | WUblastx.64 | (Q9BQB6) UNKNOWN | Q9BQB6 | 80% | 259 | 747 |
| | | | | (PROTEIN FOR | | | | |
| | | | | MGC: 11276) (PROTEIN | | | | |
| | | | | FOR IMAGE: 3455200). | | | | |
| HHEPU04 | 897457 | 735 | blastx.2 | (BC000828) Unknown | gb\|AAH00828.1\| | 80% | 267 | 755 |
| | | | | (protein for | AAH00828 | | | |
| | | | | IMAGE: 3455200) [Homo | | | | |
| | | | | sapiens] | | | | |
| HHEPU04 | 535730 | 736 | WUblastx.64 | (Q9BQB6) UNKNOWN | Q9BQB6 | 72% | 326 | 424 |
| | | | | (PROTEIN FOR | | 83% | 217 | 339 |
| | | | | MGC: 11276) (PROTEIN | | 100% | 45 | 218 |
| | | | | FOR IMAGE: 3455200). | | | | |
| HHFBY53 | 821330 | 242 | WUblastx.64 | (Q9LGZ9) GENOMIC | Q9LGZ9 | 100% | 746 | 868 |
| | | | | DNA, CHROMOSOME | | 100% | 745 | 867 |
| | | | | 3, BAC CLONE: F1D9. | | 100% | 744 | 866 |
| | | | | | | 100% | 745 | 867 |
| | | | | | | 100% | 744 | 866 |
| | | | | | | 100% | 745 | 867 |
| | | | | | | 100% | 744 | 866 |
| | | | | | | 100% | 745 | 867 |
| | | | | | | 100% | 744 | 866 |
| | | | | | | 100% | 745 | 867 |
| | | | | | | 100% | 744 | 866 |
| | | | | | | 100% | 745 | 867 |
| | | | | | | 100% | 744 | 866 |
| | | | | | | 100% | 745 | 867 |
| | | | | | | 100% | 744 | 866 |
| | | | | | | 100% | 745 | 867 |
| | | | | | | 100% | 744 | 866 |
| | | | | | | 100% | 745 | 867 |
| | | | | | | 100% | 744 | 866 |
| | | | | | | 100% | 745 | 867 |
| | | | | | | 100% | 744 | 866 |
| | | | | | | 100% | 745 | 867 |
| | | | | | | 100% | 744 | 866 |
| | | | | | | 100% | 745 | 867 |
| | | | | | | 100% | 744 | 866 |
| | | | | | | 100% | 745 | 867 |
| | | | | | | 100% | 744 | 866 |
| | | | | | | 100% | 745 | 867 |
| | | | | | | 100% | 744 | 866 |
| | | | | | | 100% | 745 | 867 |
| | | | | | | 100% | 744 | 866 |
| | | | | | | 100% | 745 | 867 |
| | | | | | | 100% | 744 | 866 |
| | | | | | | 100% | 745 | 867 |
| | | | | | | 100% | 744 | 866 |
| | | | | | | 100% | 745 | 867 |
| | | | | | | 100% | 744 | 866 |
| | | | | | | 100% | 745 | 867 |
| | | | | | | 100% | 744 | 866 |
| | | | | | | 100% | 745 | 867 |
| | | | | | | 100% | 744 | 866 |
| | | | | | | 100% | 745 | 867 |
| | | | | | | 100% | 744 | 866 |
| | | | | | | 100% | 745 | 867 |
| | | | | | | 100% | 744 | 866 |
| | | | | | | 100% | 745 | 867 |
| | | | | | | 100% | 744 | 866 |
| | | | | | | 100% | 745 | 867 |
| | | | | | | 100% | 744 | 866 |
| | | | | | | 100% | 745 | 867 |
| | | | | | | 100% | 744 | 866 |
| | | | | | | 100% | 745 | 867 |
| | | | | | | 100% | 744 | 866 |
| | | | | | | 100% | 745 | 867 |
| | | | | | | 100% | 744 | 866 |
| | | | | | | 100% | 745 | 867 |
| | | | | | | 100% | 744 | 866 |
| | | | | | | 100% | 745 | 867 |
| | | | | | | 100% | 744 | 866 |
| | | | | | | 100% | 745 | 867 |
| | | | | | | 100% | 744 | 866 |
| | | | | | | 100% | 745 | 867 |
| | | | | | | 100% | 744 | 866 |
| | | | | | | 100% | 745 | 867 |
| | | | | | | 100% | 744 | 866 |
| | | | | | | 100% | 745 | 867 |
| | | | | | | 100% | 744 | 866 |
| | | | | | | 100% | 745 | 867 |
| | | | | | | 100% | 744 | 866 |
| | | | | | | 100% | 745 | 867 |
| | | | | | | 100% | 744 | 866 |
| | | | | | | 100% | 745 | 867 |
| | | | | | | 100% | 744 | 866 |
| | | | | | | 100% | 745 | 867 |
| | | | | | | 100% | 745 | 867 |
| | | | | | | 100% | 745 | 867 |
| | | | | | | 100% | 744 | 866 |
| | | | | | | 100% | 745 | 867 |
| | | | | | | 100% | 744 | 866 |
| | | | | | | 100% | 745 | 867 |
| | | | | | | 100% | 744 | 866 |
| | | | | | | 100% | 745 | 867 |
| | | | | | | 100% | 744 | 866 |
| | | | | | | 100% | 745 | 867 |
| | | | | | | 100% | 744 | 866 |
| | | | | | | 100% | 745 | 867 |
| | | | | | | 100% | 744 | 866 |
| | | | | | | 100% | 745 | 867 |
| | | | | | | 100% | 744 | 866 |
| | | | | | | 100% | 745 | 867 |
| | | | | | | 100% | 744 | 866 |
| | | | | | | 100% | 745 | 867 |
| | | | | | | 100% | 744 | 866 |
| | | | | | | 100% | 745 | 867 |
| | | | | | | 100% | 744 | 866 |
| | | | | | | 100% | 745 | 867 |
| | | | | | | 100% | 744 | 866 |
| | | | | | | 100% | 745 | 867 |
| | | | | | | 100% | 744 | 866 |
| | | | | | | 100% | 745 | 867 |
| | | | | | | 100% | 744 | 866 |
| | | | | | | 100% | 745 | 867 |
| | | | | | | 100% | 744 | 866 |
| | | | | | | 100% | 745 | 867 |
| | | | | | | 100% | 744 | 866 |
| | | | | | | 100% | 745 | 867 |
| | | | | | | 100% | 744 | 866 |
| | | | | | | 100% | 745 | 867 |
| | | | | | | 100% | 744 | 866 |
| | | | | | | 100% | 745 | 867 |
| | | | | | | 100% | 744 | 866 |
| | | | | | | 100% | 745 | 867 |
| | | | | | | 100% | 744 | 866 |
| | | | | | | 100% | 745 | 867 |
| | | | | | | 100% | 744 | 866 |
| | | | | | | 100% | 745 | 867 |
| | | | | | | 100% | 744 | 866 |
| | | | | | | 100% | 745 | 867 |
| | | | | | | 100% | 744 | 866 |
| | | | | | | 100% | 745 | 867 |
| | | | | | | 100% | 744 | 866 |
| | | | | | | 100% | 745 | 867 |
| | | | | | | 100% | 744 | 866 |
| | | | | | | 100% | 745 | 867 |
| | | | | | | 100% | 744 | 866 |
| | | | | | | 100% | 745 | 867 |
| | | | | | | 100% | 744 | 866 |
| | | | | | | 100% | 745 | 867 |
| | | | | | | 100% | 744 | 866 |
| | | | | | | 100% | 745 | 867 |
| | | | | | | 100% | 744 | 866 |
| | | | | | | 100% | 745 | 867 |
| | | | | | | 100% | 744 | 866 |
| | | | | | | 100% | 745 | 867 |
| | | | | | | 100% | 744 | 866 |
| | | | | | | 100% | 745 | 867 |
| | | | | | | 100% | 744 | 866 |
| | | | | | | 100% | 744 | 866 |
| | | | | | | 100% | 744 | 866 |
| | | | | | | 100% | 745 | 867 |
| | | | | | | 100% | 744 | 866 |
| | | | | | | 100% | 745 | 867 |
| | | | | | | 100% | 744 | 866 |
| | | | | | | 100% | 745 | 867 |
| | | | | | | 100% | 744 | 866 |
| | | | | | | 100% | 745 | 867 |
| | | | | | | 100% | 744 | 866 |
| | | | | | | 100% | 745 | 867 |
| | | | | | | 100% | 744 | 866 |
| | | | | | | 100% | 745 | 867 |
| | | | | | | 100% | 744 | 866 |
| | | | | | | 100% | 745 | 867 |
| | | | | | | 100% | 744 | 866 |
| | | | | | | 100% | 745 | 867 |
| | | | | | | 100% | 744 | 866 |
| | | | | | | 100% | 745 | 867 |
| | | | | | | 100% | 744 | 866 |
| | | | | | | 100% | 745 | 867 |
| | | | | | | 100% | 744 | 866 |
| | | | | | | 100% | 745 | 867 |
| | | | | | | 100% | 744 | 866 |
| | | | | | | 100% | 745 | 867 |
| | | | | | | 100% | 744 | 866 |
| | | | | | | 100% | 745 | 867 |
| | | | | | | 100% | 744 | 866 |
| | | | | | | 100% | 745 | 867 |
| | | | | | | 100% | 744 | 866 |
| | | | | | | 100% | 745 | 867 |
| | | | | | | 100% | 744 | 866 |
| | | | | | | 100% | 745 | 867 |
| | | | | | | 100% | 744 | 866 |
| | | | | | | 100% | 745 | 867 |
| | | | | | | 100% | 744 | 866 |
| | | | | | | 100% | 745 | 867 |
| | | | | | | 100% | 744 | 866 |
| | | | | | | 100% | 745 | 867 |
| | | | | | | 100% | 744 | 866 |
| | | | | | | 100% | 745 | 867 |
| | | | | | | 100% | 744 | 866 |
| | | | | | | 100% | 745 | 867 |
| | | | | | | 100% | 744 | 866 |
| | | | | | | 100% | 745 | 867 |
| | | | | | | 100% | 744 | 866 |
| | | | | | | 100% | 745 | 867 |
| | | | | | | 100% | 744 | 866 |
| | | | | | | 100% | 745 | 867 |
| | | | | | | 100% | 744 | 866 |
| | | | | | | 100% | 745 | 867 |
| | | | | | | 100% | 744 | 866 |
| | | | | | | 100% | 745 | 867 |
| | | | | | | 100% | 744 | 866 |
| | | | | | | 100% | 745 | 867 |
| | | | | | | 100% | 744 | 866 |
| | | | | | | 100% | 745 | 867 |
| | | | | | | 100% | 744 | 866 |
| | | | | | | 100% | 745 | 867 |
| | | | | | | 100% | 744 | 866 |
| | | | | | | 100% | 745 | 867 |
| | | | | | | 100% | 744 | 866 |
| | | | | | | 100% | 745 | 867 |
| | | | | | | 100% | 744 | 866 |
| | | | | | | 100% | 745 | 867 |
| | | | | | | 100% | 744 | 866 |
| | | | | | | 100% | 745 | 867 |
| | | | | | | 100% | 744 | 866 |
| | | | | | | 100% | 745 | 867 |
| | | | | | | 100% | 744 | 866 |
| | | | | | | 100% | 745 | 867 |
| | | | | | | 100% | 744 | 866 |
| | | | | | | 100% | 745 | 867 |
| | | | | | | 100% | 744 | 866 |
| | | | | | | 100% | 745 | 867 |
| | | | | | | 100% | 744 | 866 |
| | | | | | | 100% | 745 | 867 |
| | | | | | | 100% | 744 | 866 |
| | | | | | | 100% | 745 | 867 |
| | | | | | | 100% | 744 | 866 |
| | | | | | | 100% | 745 | 867 |
| | | | | | | 100% | 744 | 866 |
| | | | | | | 100% | 745 | 867 |
| | | | | | | 100% | 744 | 866 |
| | | | | | | 100% | 745 | 867 |
| | | | | | | 100% | 744 | 866 |
| | | | | | | 100% | 745 | 867 |
| | | | | | | 100% | 744 | 866 |
| | | | | | | 100% | 745 | 867 |
| | | | | | | 100% | 744 | 866 |
| | | | | | | 100% | 745 | 867 |
| | | | | | | 100% | 744 | 866 |
| | | | | | | 100% | 745 | 867 |
| | | | | | | 100% | 744 | 866 |
| | | | | | | 100% | 745 | 867 |
| | | | | | | 100% | 744 | 866 |
| | | | | | | 100% | 745 | 867 |
| | | | | | | 100% | 744 | 866 |
| | | | | | | 100% | 745 | 867 |
| | | | | | | 100% | 744 | 866 |
| | | | | | | 100% | 745 | 867 |
| | | | | | | 100% | 744 | 866 |
| | | | | | | 100% | 745 | 867 |
| | | | | | | 100% | 744 | 866 |
| | | | | | | 100% | 745 | 867 |
| | | | | | | 100% | 744 | 866 |
| | | | | | | 100% | 745 | 867 |
| | | | | | | 100% | 744 | 866 |
| | | | | | | 100% | 745 | 867 |
| | | | | | | 100% | 744 | 866 |
| | | | | | | 100% | 745 | 867 |
| | | | | | | 100% | 744 | 866 |
| | | | | | | 100% | 745 | 867 |
| | | | | | | 100% | 744 | 866 |
| | | | | | | 100% | 745 | 867 |
| | | | | | | 100% | 744 | 866 |
| | | | | | | 100% | 745 | 867 |
| | | | | | | 100% | 744 | 866 |
| | | | | | | 100% | 745 | 867 |
| | | | | | | 100% | 744 | 866 |
| | | | | | | 100% | 745 | 867 |
| | | | | | | 100% | 744 | 866 |
| | | | | | | 100% | 745 | 867 |
| | | | | | | 100% | 744 | 866 |
| | | | | | | 100% | 745 | 867 |
| | | | | | | 100% | 744 | 866 |
| | | | | | | 100% | 745 | 867 |
| | | | | | | 100% | 744 | 866 |
| | | | | | | 100% | 744 | 866 |
| | | | | | | 100% | 744 | 866 |
| | | | | | | 100% | 745 | 867 |
| | | | | | | 100% | 744 | 866 |
| | | | | | | 100% | 745 | 867 |
| | | | | | | 100% | 744 | 866 |
| | | | | | | 100% | 745 | 867 |
| | | | | | | 100% | 744 | 866 |
| | | | | | | 100% | 745 | 867 |
| | | | | | | 100% | 744 | 866 |
| | | | | | | 100% | 745 | 867 |
| | | | | | | 100% | 744 | 866 |
| | | | | | | 100% | 745 | 867 |
| | | | | | | 100% | 744 | 866 |
| | | | | | | 100% | 745 | 867 |
| | | | | | | 100% | 744 | 866 |
| | | | | | | 100% | 745 | 867 |
| | | | | | | 100% | 744 | 866 |
| | | | | | | 100% | 745 | 867 |
| | | | | | | 100% | 744 | 866 |
| | | | | | | 100% | 745 | 867 |
| | | | | | | 100% | 744 | 866 |
| | | | | | | 100% | 745 | 867 |
| | | | | | | 100% | 744 | 866 |
| | | | | | | 100% | 745 | 867 |
| | | | | | | 100% | 744 | 866 |
| | | | | | | 100% | 745 | 867 |
| | | | | | | 100% | 744 | 866 |
| | | | | | | 100% | 745 | 867 |
| | | | | | | 100% | 744 | 866 |
| | | | | | | 100% | 745 | 867 |
| | | | | | | 100% | 744 | 866 |
| | | | | | | 100% | 745 | 867 |
| | | | | | | 100% | 744 | 866 |
| | | | | | | 100% | 745 | 867 |
| | | | | | | 100% | 744 | 866 |
| | | | | | | 100% | 745 | 867 |
| | | | | | | 100% | 744 | 866 |
| | | | | | | 100% | 745 | 867 |
| | | | | | | 100% | 744 | 866 |
| | | | | | | 100% | 745 | 867 |
| | | | | | | 100% | 744 | 866 |
| | | | | | | 100% | 745 | 867 |
| | | | | | | 100% | 744 | 866 |
| | | | | | | 100% | 745 | 867 |
| | | | | | | 100% | 744 | 866 |
| | | | | | | 100% | 745 | 867 |
| | | | | | | 100% | 744 | 866 |
| | | | | | | 100% | 745 | 867 |
| | | | | | | 100% | 744 | 866 |
| | | | | | | 100% | 745 | 867 |
| | | | | | | 100% | 744 | 866 |
| | | | | | | 100% | 745 | 867 |
| | | | | | | 100% | 744 | 866 |
| | | | | | | 100% | 745 | 867 |
| | | | | | | 100% | 744 | 866 |
| | | | | | | 100% | 745 | 867 |
| | | | | | | 100% | 744 | 866 |
| | | | | | | 100% | 745 | 867 |
| | | | | | | 100% | 744 | 866 |
| | | | | | | 100% | 745 | 867 |
| | | | | | | 100% | 744 | 866 |
| | | | | | | 100% | 745 | 867 |
| | | | | | | 100% | 744 | 866 |
| | | | | | | 100% | 744 | 866 |
| | | | | | | 100% | 744 | 866 |
| | | | | | | 100% | 745 | 867 |
| | | | | | | 100% | 744 | 866 |
| | | | | | | 100% | 745 | 867 |
| | | | | | | 100% | 744 | 866 |
| | | | | | | 100% | 745 | 867 |
| | | | | | | 100% | 744 | 866 |
| | | | | | | 100% | 745 | 867 |
| | | | | | | 100% | 744 | 866 |
| | | | | | | 100% | 745 | 867 |
| | | | | | | 100% | 744 | 866 |
| | | | | | | 100% | 745 | 867 |
| | | | | | | 100% | 744 | 866 |
| | | | | | | 100% | 745 | 867 |
| | | | | | | 100% | 744 | 866 |
| | | | | | | 100% | 745 | 867 |
| | | | | | | 100% | 744 | 866 |
| | | | | | | 100% | 745 | 867 |
| | | | | | | 100% | 744 | 866 |
| | | | | | | 100% | 745 | 867 |
| | | | | | | 100% | 744 | 866 |
| | | | | | | 100% | 745 | 867 |
| | | | | | | 100% | 744 | 866 |
| | | | | | | 100% | 745 | 867 |
| | | | | | | 100% | 744 | 866 |
| | | | | | | 100% | 745 | 867 |
| | | | | | | 100% | 744 | 866 |
| | | | | | | 100% | 745 | 867 |
| | | | | | | 100% | 744 | 866 |
| | | | | | | 100% | 745 | 867 |
| | | | | | | 100% | 744 | 866 |
| | | | | | | 100% | 745 | 867 |
| | | | | | | 100% | 745 | 867 |
| | | | | | | 100% | 745 | 867 |
| | | | | | | 100% | 744 | 866 |
| | | | | | | 100% | 745 | 867 |
| | | | | | | 100% | 744 | 866 |
| | | | | | | 100% | 745 | 867 |
| | | | | | | 100% | 744 | 866 |
| | | | | | | 100% | 745 | 867 |
| | | | | | | 100% | 744 | 866 |
| | | | | | | 100% | 745 | 867 |
| | | | | | | 100% | 744 | 866 |
| | | | | | | 100% | 745 | 867 |
| | | | | | | 100% | 744 | 866 |
| | | | | | | 100% | 745 | 867 |
| | | | | | | 100% | 744 | 866 |
| | | | | | | 100% | 745 | 867 |
| | | | | | | 100% | 745 | 867 |
| | | | | | | 100% | 745 | 867 |
| | | | | | | 100% | 744 | 866 |
| | | | | | | 100% | 745 | 867 |
| | | | | | | 100% | 744 | 866 |
| | | | | | | 100% | 745 | 867 |
| | | | | | | 100% | 744 | 866 |
| | | | | | | 100% | 745 | 867 |
| | | | | | | 100% | 745 | 867 |
| | | | | | | 100% | 745 | 867 |
| | | | | | | 100% | 744 | 866 |
| | | | | | | 100% | 744 | 866 |
| | | | | | | 100% | 744 | 866 |
| | | | | | | 95% | 745 | 867 |
| | | | | | | 95% | 744 | 866 |
| | | | | | | 89% | 724 | 867 |
| HHFEC49 | 905849 | 243 | WUblastx.64 | (Q9D1N2) | Q9D1N2 | 55% | 30 | 500 |
| | | | | 1110002J19RIK | | | | |
| | | | | PROTEIN. | | | | |
| HHFFJ48 | 634521 | 244 | WUblastx.64 | (Q9CWA7) | Q9CWA7 | 49% | 1362 | 1598 |
| | | | | 0610010F05RIK | | | | |
| | | | | PROTEIN | | | | |
| | | | | (FRAGMENT). | | | | |
| HHFGR93 | 865581 | 245 | WUblastx.64 | (Q96AP7) Hypothetical | Q96AP7 | 100% | 132 | 1301 |
| | | | | 41.2 kDa protein. | | | | |
| HHFGR93 | 691402 | 737 | HMMER | PFAM: Immunoglobulin | PF00047 | 36.3 | 628 | 807 |
| | | | 2.1.1. | domain | | | | |
| | | | WUblastx.64 | (Q96AP7) Hypothetical | Q96AP7 | 98% | 819 | 1298 |
| | | | | 41.2 kDa protein. | | 99% | 130 | 828 |
| HHFHR32 | 411470 | 247 | WUblastx.64 | (Q99LX9) SIMILAR TO | Q99LX9 | 100% | 1 | 762 |
| | | | | SINGLE-STRANDED- | | | | |
| | | | | DNA-BINDING | | | | |
| | | | | PROTEIN. | | | | |
| HHFOJ29 | 1127491 | 248 | WUblastx.64 | (Q9H7P4) FLJ00024 | Q9H7P4 | 99% | 592 | 65 |
| | | | | PROTEIN | | | | |
| | | | | (FRAGMENT). | | | | |
| HHFOJ29 | 1040264 | 738 | WUblastx.64 | (Q9H7P4) FLJ00024 | Q9H7P4 | 99% | 268 | 789 |
| | | | | PROTEIN | | | | |
| | | | | (FRAGMENT). | | | | |
| HHFOJ29 | 1042456 | 739 | WUblastx.64 | (Q9H7P4) FLJ00024 | Q9H7P4 | 61% | 81 | 4 |
| | | | | PROTEIN | | 90% | 196 | 101 |
| | | | | (FRAGMENT). | | | | |
| HHGBO91 | 520198 | 249 | WUblastx.64 | (Q96NR6) CDNA | Q96NR6 | 86% | 622 | 687 |
| | | | | FLJ30278 fis, clone | | 66% | 531 | 620 |
| | | | | BRACE2002755. | | 46% | 439 | 353 |
| | | | | | | 46% | 633 | 496 |
| HHGCM76 | 662329 | 250 | WUblastx.64 | (Q96FV2) Unknown | Q96FV2 | 94% | 7 | 114 |
| | | | | (protein for | | 98% | 378 | 536 |
| | | | | IMAGE: 3945715) | | | | |
| | | | | (Fragment). | | | | |
| HHGCM76 | 383547 | 740 | WUblastx.64 | (Q96FV2) Unknown | Q96FV2 | 94% | 7 | 114 |
| | | | | (protein for | | 98% | 378 | 536 |
| | | | | IMAGE: 3945715) | | | | |
| | | | | (Fragment). | | | | |
| HHGDW43 | 554613 | 253 | WUblastx.64 | (Q9P1J1) PRO1546. | Q9P1J1 | 59% | 707 | 787 |
| | | | | | | 52% | 774 | 887 |
| HHPGO40 | 1299927 | 255 | WUblastx.64 | (Q9HBW1) Brain tumor | Q9HBW1 | 74% | 191 | 976 |
| | | | | associated protein | | 30% | 338 | 928 |
| | | | | NAG14. | | | | |
| HHPGO40 | 753270 | 741 | HMMER | PFAM: Leucine Rich | PF00560 | 122 | 542 | 613 |
| | | | 2.1.1 | Repeat | | | | |
| | | | WUblastx.64 | (Q9HBW1) Brain tumor | Q9HBW1 | 74% | 191 | 967 |
| | | | | associated protein | | 30% | 338 | 928 |
| | | | | NAG14. | | | | |
| HHPGO40 | 560969 | 742 | HMMER | PFAM: Leucine Rich | PF00560 | 77 | 548 | 619 |
| | | | 2.1.1 | Repeat | | | | |
| | | | WUblastx.64 | (Q9HBW1) Brain tumor | Q9HBW1 | 71% | 739 | 984 |
| | | | | associated protein | | 31% | 691 | 933 |
| | | | | NAG14. | | 74% | 197 | 754 |
| HILCF66 | 636025 | 258 | WUblastx.64 | (Q9CWZ1) | Q9CWZ1 | 100% | 1435 | 1530 |
| | | | | 2400006A19RIK | | 96% | 1243 | 1323 |
| | | | | PROTEIN. | | | | |
| HJACG02 | 1307789 | 259 | WUblastx.64 | (Q9HD89) CYSTEINE- | Q9HD89 | 100% | 66 | 389 |
| | | | | RICH SECRETED | | | | |
| | | | | PROTEIN (C/EBP- | | | | |
| | | | | EPSILON REGULATED | | | | |
| | | | | MYEL | | | | |
| HJACG02 | 509948 | 743 | WUblastx.64 | (Q9HD89) CYSTEINE- | Q9HD89 | 100% | 47 | 370 |
| | | | | RICH SECRETED | | | | |
| | | | | PROTEIN (C/EBP- | | | | |
| | | | | EPSILON REGULATED | | | | |
| | | | | MYEL | | | | |
| HJACG30 | 895505 | 260 | WUblastx.64 | (Q9UM21) UDP- | Q9UM21 | 96% | 291 | 389 |
| | | | | GLCNAC: A-1, 3-D- | | | | |
| | | | | MANNOSIDE B-1, 4-N- | | | | |
| | | | | ACETYLGLUCOSAMINYL | | | | |
| | | | | TRANS | | | | |
| HJACG30 | 774300 | 745 | WUblastx.64 | (Q9D399) | Q9D399 | 80% | 220 | 297 |
| | | | | 6330415B21RIK | | | | |
| | | | | PROTEIN. | | | | |
| HJBCU04 | 877643 | 261 | WUblastx.64 | (Q9Y3P8) SIT PROTEIN | Q9Y3P8 | 100% | 36 | 623 |
| | | | | PRECURSOR. | | | | |
| HJBCY35 | 719729 | 262 | WUblastx.64 | hypothetical protein | pir\|T08758\|T08758 | 100% | 1 | 1212 |
| | | | | DKFZp586J0619.1 - | | | | |
| | | | | human (fragment) | | | | |
| HJMBM38 | 545752 | 264 | WUblastx.64 | (Q9CS66) | Q9CS66 | 83% | 3 | 722 |
| | | | | 5730496N17RIK | | | | |
| | | | | PROTEIN | | | | |
| | | | | (FRAGMENT). | | | | |
| HJPAD75 | 651337 | 267 | WUblastx.64 | (Q9H5F8) CDNA: | Q9H5F8 | 98% | 8 | 232 |
| | | | | FLJ23476 FIS, CLONE | | | | |
| | | | | HSI14935. | | | | |
| HJPCP42 | 852573 | 747 | WUblastx.64 | (Q9VL06) CG5604 | Q9VL06 | 54% | 19 | 315 |
| | | | | PROTEIN. | | | | |
| HJPCP42 | 824612 | 748 | WUblastx.64 | cut1 protein - fission yeast | pir\|A35694\|A35694 | 42% | 7 | 201 |
| | | | | (Schizosaccharomyces | | | | |
| | | | | pombe) | | | | |
| HKAAE44 | 564406 | 269 | WUblastx.64 | (Q969S6) Unknown | Q969S6 | 86% | 113 | 520 |
| | | | | (protein for MGC: 15961) | | | | |
| | | | | (protein for MGC: 14327). | | | | |
| HKAAH36 | 1352332 | 270 | WUblastx.64 | (AAH08036) Kallikrein 5. | AAH08036 | 100% | 128 | 1006 |
| HKAAH36 | 1352331 | 749 | WUblastx.64 | (AAH08036) Kallikrein 5. | AAH08036 | 71% | 295 | 846 |
| HKAAH36 | 1352330 | 750 | WUblastx.64 | (AAH08036) Kallikrein 5. | AAH08036 | 100% | 182 | 1060 |
| HKAAH36 | 836040 | 751 | WUblastx.64 | (AAH08036) Kallikrein 5. | AAH08036 | 90% | 184 | 348 |
| | | | | | | 100% | 399 | 1061 |
| HKAAH36 | 838068 | 752 | HMMER | PFAM: Trypsin | PF00089 | 270.2 | 452 | 1108 |
| | | | 2.1.1 | | | | | |
| | | | WUblastx.64 | (AAH08036) Kallikrein 5. | AAH08036 | 92% | 254 | 1132 |
| HKAAH36 | 815661 | 753 | HMMER | PFAM: Trypsin | PF00089 | 270.2 | 327 | 983 |
| | | | 2.1.1 | | | | | |
| | | | WUblastx.64 | (AAH08036) Kallikrein 5. | AAH08036 | 100% | 129 | 1007 |
| HKAAH36 | 590734 | 754 | WUblastx.64 | (AAH08036) Kallikrein 5. | AAH08036 | 100% | 189 | 353 |
| | | | | | | 86% | 301 | 1065 |
| HKAAK02 | 589945 | 271 | HMMER | PFAM: | PF01762 | 56.1 | 457 | 660 |
| | | | 2.1.1 | Galactosyltransferase | | | | |
| | | | WUblastx.64 | (Q8WWR6) Beta 1,6- | Q8WWR6 | 92% | 97 | 681 |
| | | | | GlcNAc-transferase. | | | | |
| HKABZ65 | 862030 | 273 | WUblastx.64 | (Q96LB9) Peptidoglycan | Q96LB9 | 99% | 77 | 802 |
| | | | | recognition protein-I- | | 45% | 137 | 541 |
| | | | | alpha precursor. | | | | |
| HKABZ65 | 665424 | 755 | WUblastx.64 | (Q96LB9) Peptidoglycan | Q96LB9 | 99% | 69 | 794 |
| | | | | recognition protein-I- | | 45% | 129 | 533 |
| | | | | alpha precursor. | | | | |
| HKACB56 | 554616 | 274 | HMMER | PFAM: Kazal-type serine | PF00050 | 76.3 | 114 | 266 |
| | | | 2.1.1 | protease inhibitor domain | | | | |
| | | | WUblastx.64 | (P01001) ACROSIN | IAC2_BOVIN | 82% | 96 | 266 |
| | | | | INHIBITORS IIA AND | | | | |
| | | | | IIB (BUSI-II). | | | | |
| HKACD58 | 1352202 | 275 | WUblastx.64 | (Q96BH2) Hypothetical | Q96BH2 | 86% | 786 | 1199 |
| | | | | 34.4 kDa protein. | | 28% | 46 | 186 |
| | | | | | | 100% | 125 | 715 |
| HKACD58 | 552465 | 756 | WUblastx.64 | (Q96BH2) Hypothetical | Q96BH2 | 86% | 795 | 1208 |
| | | | | 34.4 kDa protein. | | 28% | 43 | 183 |
| | | | | | | 88% | 122 | 724 |
| HKACM93 | 1352383 | 277 | blastx.14 | aqualysin (EC 3.4.21.—) I | pir\|A35742\|A35742 | 40% | 884 | 1039 |
| | | | | precursor - Thermus | | 41% | 1097 | 1276 |
| | | | | aquaticus | | 30% | 1274 | 1468 |
| | | | | | | 50% | 746 | 823 |
| | | | | | | 34% | 548 | 670 |
| | | | | | | 53% | 425 | 469 |
| | | | | | | 58% | 2201 | 2236 |
| HKACM93 | 907085 | 758 | WUblastx.64 | aqualysin (EC 3.4.21.—) I | pir\|A35742\|A35742 | 42% | 937 | 1071 |
| | | | | precursor - Thermus | | 35% | 521 | 919 |
| | | | | aquaticus | | | | |
| HKACM93 | 906150 | 760 | WUblastx.64 | (P80146) | SEPR_THESR | 39% | 40 | 603 |
| | | | | EXTRACELLULAR | | | | |
| | | | | SERINE PROTEINASE | | | | |
| | | | | PRECURSOR (EC 3.4. | | | | |
| HKAEL80 | 570865 | 278 | WUblastx.64 | (O60448) NEURONAL | O60448 | 63% | 789 | 935 |
| | | | | THREAD PROTEIN | | 68% | 934 | 999 |
| | | | | AD7C-NTP. | | 65% | 798 | 1052 |
| HKAEV06 | 1352263 | 279 | WUblastx.64 | (Q9NVA4) CDNA | Q9NVA4 | 99% | 501 | 1814 |
| | | | | FLJ10846 FIS, CLONE | | | | |
| | | | | NT2RP4001373. | | | | |
| HKAEV06 | 638238 | 761 | WUblastx.64 | (Q9NVA4) CDNA | Q9NVA4 | 96% | 367 | 459 |
| | | | | FLJ10846 FIS, CLONE | | 100% | 197 | 367 |
| | | | | NT2RP4001373. | | 96% | 480 | 1541 |
| HKAFK41 | 545018 | 280 | WUblastx.64 | (BAB55101) CDNA | BAB55101 | 91% | 18 | 371 |
| | | | | FLJ14515 fis, clone | | 60% | 130 | 537 |
| | | | | NT2RM1000800, w | | | | |
| HKAFT66 | 946512 | 281 | WUblastx.64 | (Q9CPS2) | Q9CPS2 | 72% | 29 | 61 |
| | | | | 4933428I03RIK | | 64% | 61 | 231 |
| | | | | PROTEIN. | | 84% | 274 | 828 |
| HKAFT66 | 889258 | 762 | WUblastx.64 | (Q9CPS2) | Q9CPS2 | 72% | 29 | 61 |
| | | | | 4933428I03RIK | | 64% | 61 | 231 |
| | | | | PROTEIN. | | 83% | 274 | 828 |
| HKAFT66 | 904790 | 763 | WUblastx.64 | (Q9CPS2) | Q9CPS2 | 80% | 298 | 555 |
| | | | | 4933428I03RIK | | 84% | 12 | 314 |
| | | | | PROTEIN. | | | | |
| HKDBF34 | 833065 | 282 | WUblastx.64 | (Q9HBJ8) KIDNEY- | Q9HBJ8 | 88% | 69 | 734 |
| | | | | SPECIFIC MEMBRANE | | | | |
| | | | | PROTEIN NX-17. | | | | |
| HKDBF34 | 587268 | 764 | WUblastx.64 | (Q9HBJ8) KIDNEY- | Q9HBJ8 | 100% | 18 | 257 |
| | | | | SPECIFIC MEMBRANE | | 80% | 239 | 682 |
| | | | | PROTEIN NX-17. | | | | |
| HKGAT94 | 762811 | 283 | WUblastx.64 | (Q9H919) CDNA | Q9H919 | 73% | 307 | 239 |
| | | | | FLJ13078 FIS, CLONE | | 80% | 128 | 84 |
| | | | | NT2RP3002002. | | 63% | 228 | 121 |
| HKGAT94 | 460631 | 765 | WUblastx.64 | (Q9H919) CDNA | Q9H919 | 73% | 314 | 246 |
| | | | | FLJ13078 FIS, CLONE | | 54% | 1056 | 907 |
| | | | | NT2RP3002002. | | 80% | 135 | 91 |
| | | | | | | 63% | 235 | 128 |
| HKISB57 | 625956 | 285 | WUblastx.64 | (Q8WWW1) Smoothelin- | Q8WWW1 | 28% | 262 | 582 |
| | | | | B3. | | 100% | 201 | 1013 |
| | | | | | | 98% | 1107 | 1256 |
| | | | | | | 27% | 271 | 480 |
| | | | | | | 26% | 532 | 966 |
| | | | | | | 44% | 954 | 1052 |
| HKMLM11 | 514788 | 287 | WUblastx.64 | (Q9P059) HSPC323 | Q9P059 | 71% | 332 | 562 |
| | | | | (FRAGMENT). | | 85% | 148 | 462 |
| HKMLP68 | 1037919 | 288 | WUblastx.64 | (Q8VD01) Hypothetical | Q8VD01 | 49% | 8 | 586 |
| | | | | 61.8 kDa protein. | | | | |
| HKMLP68 | 880047 | 767 | WUblastx.64 | (Q8VD01) Hypothetical | Q8VD01 | 49% | 31 | 609 |
| | | | | 61.8 kDa protein. | | | | |
| HKMND01 | 527402 | 290 | WUblastx.64 | (Q9H3C0) PRO0898. | Q9H3C0 | 83% | 867 | 757 |
| HL2AC08 | 610018 | 291 | HMMER | PFAM: Thioredoxin | PF00085 | 82.8 | 145 | 444 |
| | | | 2.1.1 | | | | | |
| | | | WUblastx.64 | hypothetical protein | pir\|T12471\|T12471 | 100% | 46 | 903 |
| | | | | DKFZp564E1962.1 - | | | | |
| | | | | human (fragment) | | | | |
| HLCND09 | 1172046 | 293 | HMMER | PFAM: PAP2 superfamily | PF01569 | 20.3 | 170 | 352 |
| | | | 2.1.1 | | | | | |
| | | | WUblastx.64 | (Q9H929) CDNA | Q9H929 | 88% | 107 | 421 |
| | | | | FLJ13055 FIS, CLONE | | | | |
| | | | | NT2RP3001538, | | | | |
| | | | | WEAKLY SIMILAR TO | | | | |
| | | | | HYP | | | | |
| HLCND09 | 1035153 | 769 | HMMER | PFAM: PAP2 superfamily | PF01569 | 20.4 | 62 | 244 |
| | | | 2.1.1 | | | | | |
| | | | WUblastx.64 | (Q9H929) CDNA | Q9H929 | 97% | 2 | 274 |
| | | | | FLJ13055 FIS, CLONE | | | | |
| | | | | NT2RP3001538, | | | | |
| | | | | WEAKLY SIMILAR TO | | | | |
| | | | | HYP | | | | |
| HLDBE54 | 836041 | 294 | WUblastx.64 | (Q9NR71) | Q9NR71 | 98% | 212 | 1051 |
| | | | | MITOCHONDRIAL | | | | |
| | | | | CERAMIDASE. | | | | |
| HLDBE54 | 600362 | 770 | WUblastx.64 | (Q9JHE3) NERUTAL | Q9JHE3 | 45% | 332 | 397 |
| | | | | CERAMIDASE | | 72% | 130 | 306 |
| | | | | (NEUTRAL | | 78% | 375 | 1028 |
| | | | | CERAMIDASE). | | | | |
| HLDBE54 | 800678 | 771 | HMMER | PFAM: Renal dipeptidase | PF01244 | 466.8 | 352 | 1410 |
| | | | 2.1.1 | | | | | |
| | | | WUblastx.64 | (Q9H4A9) PUTATIVE | Q9H4A9 | 100% | 133 | 1590 |
| | | | | DIPEPTIDASE. | | | | |
| HLDBX13 | 815665 | 295 | WUblastx.64 | (Q9H387) PRO2550. | Q9H387 | 76% | 1764 | 1681 |
| | | | | | | 60% | 1815 | 1756 |
| HLDNA86 | 1352197 | 296 | WUblastx.64 | (Q9BQB6) UNKNOWN | Q9BQB6 | 100% | 238 | 726 |
| | | | | (PROTEIN FOR | | | | |
| | | | | MGC: 11276) (PROTEIN | | | | |
| | | | | FOR IMAGE: 3455200). | | | | |
| HLDNA86 | 535730 | 772 | WUblastx.64 | (Q9BQB6) UNKNOWN | Q9BQB6 | 72% | 326 | 424 |
| | | | | (PROTEIN FOR | | 83% | 217 | 339 |
| | | | | MGC: 11276) (PROTEIN | | 100% | 45 | 218 |
| | | | | FOR IMAGE: 3455200). | | | | |
| HLDOW79 | 847396 | 298 | WUblastx.64 | (AAH24441) | AAH24441 | 83% | 10 | 699 |
| | | | | Hypothetical 37.8 kDa | | | | |
| | | | | protein. | | | | |
| HLDQC46 | 847397 | 299 | WUblastx.64 | (Q9BXJ8) | Q9BXJ8 | 100% | 28 | 423 |
| | | | | TRANSMEMBRANE | | | | |
| | | | | PROTEIN INDUCED BY | | | | |
| | | | | TUMOR NECROSIS | | | | |
| | | | | FACTOR ALPHA | | | | |
| HLDQR62 | 753742 | 300 | WUblastx.64 | (Q9NQW2) | Q9NQW2 | 100% | 41 | 382 |
| | | | | PROGRESSIVE | | 99% | 376 | 1002 |
| | | | | ANKYLOSIS-LIKE | | | | |
| | | | | PROTEIN. | | | | |
| HLDQU79 | 740755 | 301 | WUblastx.64 | (O75477) KE04P. | O75477 | 100% | 105 | 1142 |
| HLDRM43 | 846330 | 302 | WUblastx.64 | (Q96NZ9) Proline-rich | Q96NZ9 | 100% | 24 | 476 |
| | | | | acidic protein. | | | | |
| HLDRM43 | 638939 | 773 | WUblastx.64 | (Q96NZ9) Proline-rich | Q96NZ9 | 100% | 164 | 616 |
| | | | | acidic protein. | | | | |
| HLDRP33 | 647430 | 303 | WUblastx.64 | (Q9H743) CDNA: | Q9H743 | 38% | 340 | 278 |
| | | | | FLJ21394 FIS, CLONE | | 64% | 599 | 489 |
| | | | | COL03536. | | | | |
| HLHFP03 | 460467 | 304 | WUblastx.64 | (Q9WVC2) LY- | Q9WVC2 | 81% | 224 | 571 |
| | | | | 6/NEUROTOXIN | | | | |
| | | | | HOMOLOG (ADULT | | | | |
| | | | | MALE HIPPOCAMPUS | | | | |
| | | | | CDNA, RIKEN | | | | |
| HLHFR58 | 894001 | 776 | WUblastx.64 | macrophage inflammatory | pir\|JH0319\|A31767 | 100% | 610 | 335 |
| | | | | protein 1-beta precursor | | | | |
| | | | | [validated] - human | | | | |
| HLICQ90 | 791828 | 307 | WUblastx.64 | (Q96N65) CDNA | Q96N65 | 95% | 571 | 636 |
| | | | | FLJ31349 fis, clone | | 93% | 59 | 616 |
| | | | | MESAN2000092, | | | | |
| | | | | moderately similar to | | | | |
| HLQBE09 | 520375 | 309 | WUblastx.64 | second peroxisomal | pir\|JC7367\|JC7367 | 56% | 8 | 559 |
| | | | | thioesterase - human | | | | |
| HLQDR48 | 1307726 | 310 | WUblastx.64 | (Q9NQZ1) | Q9NQZ1 | 86% | 296 | 406 |
| | | | | HEPATOCELLULAR | | | | |
| | | | | CARCINOMA | | | | |
| | | | | ASSOCIATED PROTEIN | | | | |
| | | | | TD26. | | | | |
| HLQDR48 | 619979 | 777 | WUblastx.64 | (AAH24408) | AAH24408 | 65% | 54 | 572 |
| | | | | Hypothetical 20.3 kDa | | 100% | 675 | 701 |
| | | | | protein (Fragment) | | | | |
| HLTAU74 | 853614 | 311 | WUblastx.64 | (Q8WU84) Hypothetical | Q8WU84 | 77% | 6 | 704 |
| | | | | 113.9 kDa protein | | 100% | 657 | 803 |
| | | | | (Fragment). | | | | |
| HLTEJ06 | 543017 | 314 | WUblastx.64 | (AAL78047) Envelope | AAL78047 | 32% | 173 | 490 |
| | | | | protein. | | | | |
| HLTHG37 | 787530 | 316 | WUblastx.64 | (AAH01258) N- | AAH01258 | 100% | 960 | 1070 |
| | | | | acetylglucosamine- | | 93% | 2 | 955 |
| | | | | phosphate mutase. | | | | |
| HLTHG37 | 743169 | 778 | WUblastx.64 | (Q9NTT5) DJ202D23.2 | Q9NTT5 | 100% | 640 | 335 |
| | | | | (NOVEL PROTEIN) | | | | |
| | | | | (FRAGMENT). | | | | |
| HLWAA17 | 629552 | 317 | WUblastx.64 | (Q9NY26) IRT1 | Q9NY26 | 94% | 226 | 960 |
| | | | | PROTEIN (SIMILAR TO | | 100% | 85 | 123 |
| | | | | ZINC/IRON | | | | |
| | | | | REGULATED | | | | |
| | | | | TRANSPORTER-LIK | | | | |
| HLWAA88 | 588485 | 318 | WUblastx.64 | (Q9H8L6) CDNA | Q9H8L6 | 99% | 683 | 1768 |
| | | | | FLJ13465 FIS, CLONE | | 99% | 295 | 696 |
| | | | | PLACE1003493, | | 40% | 781 | 855 |
| | | | | WEAKLY SIMILAR TO | | 42% | 440 | 517 |
| | | | | END | | 92% | 35 | 322 |
| HLWAA88 | 769166 | 779 | WUblastx.64 | (Q9H8L6) CDNA | Q9H8L6 | 95% | 1567 | 1629 |
| | | | | FLJ13465 FIS, CLONE | | 93% | 1487 | 1573 |
| | | | | PLACE1003493, | | 98% | 51 | 1493 |
| | | | | WEAKLY SIMILAR TO | | | | |
| | | | | END | | | | |
| HLWAD77 | 653513 | 319 | WUblastx.64 | (Q9GZP9) F-LAN-1 | Q9GZP9 | 99% | 29 | 745 |
| | | | | (HYPOTHETICAL | | | | |
| | | | | TRANSMEMBRANE | | | | |
| | | | | PROTEIN SBBI53). | | | | |
| HLWAE11 | 783071 | 320 | HMMER | PFAM: C1q domain | PF00386 | 44.4 | 403 | 789 |
| | | | 2.1.1 | | | | | |
| | | | WUblastx.64 | (Q9BXI9) | Q9BXI9 | 99% | 28 | 861 |
| | | | | COMPLEMENT-C1Q | | | | |
| | | | | TUMOR NECROSIS | | | | |
| | | | | FACTOR-RELATED | | | | |
| | | | | PROTEIN. | | | | |
| HLWAO22 | 587270 | 321 | WUblastx.64 | (Q9NRG9) GL003 | Q9NRG9 | 78% | 449 | 1147 |
| | | | | (ADRACALIN) (AAAS | | 28% | 139 | 420 |
| | | | | PROTEIN) | | 97% | 1003 | 1263 |
| | | | | (UNKNOWN) | | 100% | 14 | 40 |
| | | | | (PROTEIN FOR MGC: | | 83% | 19 | 495 |
| | | | | | | 30% | 396 | 596 |
| | | | | | | 41% | 503 | 664 |
| | | | | | | 28% | 100 | 408 |
| | | | | | | 26% | 470 | 859 |
| | | | | | | 58% | 333 | 503 |
| HLWAY54 | 658702 | 322 | WUblastx.64 | (Q9BY87) | Q9BY87 | 99% | 38 | 1006 |
| | | | | PROACROSIN | | 79% | 997 | 1326 |
| | | | | BINDING PROTEIN | | 100% | 1448 | 1663 |
| | | | | SP32 PRECURSOR. | | 42% | 563 | 643 |
| | | | | | | 23% | 1445 | 1594 |
| | | | | | | 37% | 1260 | 1331 |
| | | | | | | 90% | 1251 | 1475 |
| HLWBH18 | 1045194 | 323 | WUblastx.64 | (Q96MM0) CDNA | Q96MM0 | 69% | 594 | 722 |
| | | | | FLJ32172 fis, clone | | | | |
| | | | | PLACE6000555. | | | | |
| HLWBK05 | 765310 | 325 | WUblastx.64 | (Q9CUS9) | Q9CUS9 | 84% | 10 | 1173 |
| | | | | 4833416I09RIK | | | | |
| | | | | PROTEIN | | | | |
| | | | | (FRAGMENT). | | | | |
| HLWBY76 | 797609 | 326 | WUblastx.64 | (AAH06651) Similar to | AAH06651 | 76% | 6 | 1127 |
| | | | | hypothetical protein | | | | |
| | | | | FLJ23153 | | | | |
| HLYAN59 | 553507 | 781 | WUblastx.64 | (AAL79706) Hypothetical | AAL79706 | 85% | 624 | 719 |
| | | | | 9.4 kDa protein. | | 93% | 639 | 728 |
| | | | | | | 82% | 617 | 721 |
| HLYAZ61 | 1352163 | 332 | WUblastx.64 | (O14626) PROBABLE G | H963_HUMAN | 100% | 1 | 855 |
| | | | | PROTEIN-COUPLED | | | | |
| | | | | RECEPTOR H963. | | | | |
| HLYAZ61 | 423998 | 782 | HMMER | PFAM: 7 transmembrane | PF00001 | 71.8 | 280 | −283 |
| | | | 2.1.1 | receptor (rhodopsin | | | | |
| | | | | family) | | | | |
| | | | WUblastx.64 | (O14626) PROBABLE G | H963_HUMAN | 98% | 1 | 846 |
| | | | | PROTEIN-COUPLED | | | | |
| | | | | RECEPTOR H963. | | | | |
| HLYES38 | 638042 | 334 | WUblastx.64 | (O95662) POT. ORF VI | O95662 | 81% | 743 | 856 |
| | | | | (FRAGMENT). | | 72% | 281 | 313 |
| | | | | | | 72% | 306 | 524 |
| | | | | | | 75% | 466 | 735 |
| | | | | | | 33% | 145 | 243 |
| HMADS41 | 596831 | 335 | WUblastx.64 | (AAH07725) Ceroid- | AAH07725 | 92% | 186 | 449 |
| | | | | lipofuscinosis, neuronal 8 | | 100% | 427 | 1041 |
| | | | | (epile | | | | |
| HMADU73 | 1352177 | 336 | WUblastx.64 | (Q9EPE8) LOW- | Q9EPE8 | 87% | 491 | 2626 |
| | | | | DENSITY | | | | |
| | | | | LIPOPROTEIN | | | | |
| | | | | RECEPTOR-RELATED | | | | |
| | | | | PROTEIN 9. | | | | |
| HMADU73 | 467053 | 783 | WUblastx.64 | (Q9EPE8) LOW- | Q9EPE8 | 78% | 115 | 294 |
| | | | | DENSITY | | | | |
| | | | | LIPOPROTEIN | | | | |
| | | | | RECEPTOR-RELATED | | | | |
| | | | | PROTEIN 9. | | | | |
| HMAMI15 | 1352406 | 337 | WUblastx.64 | (AAL84703) Citrate lyase | AAL84703 | 99% | 4 | 1023 |
| | | | | beta subunit. | | | | |
| HMAMI15 | 1049263 | 784 | WUblastx.64 | (AAL84703) Citrate lyase | AAL84703 | 100% | 3 | 440 |
| | | | | beta subunit. | | 79% | 372 | 920 |
| HMDAE65 | 520338 | 338 | WUblastx.64 | (Q9NLE3) PROBABLE | Q9NLE3 | 79% | 335 | 249 |
| | | | | (HHV-6) U1102, | | 70% | 342 | 250 |
| | | | | VARIANT A DNA, | | 63% | 333 | 235 |
| | | | | COMPLETE VIRION | | 64% | 330 | 235 |
| | | | | GENOM | | 67% | 333 | 250 |
| HMDAM24 | 514394 | 339 | WUblastx.64 | hypothetical protein | pir\|T42663\|T42663 | 92% | 155 | 325 |
| | | | | DKFZp434N0615.1 - | | 45% | 298 | 363 |
| | | | | human (fragment) | | 33% | 248 | 316 |
| | | | | | | 31% | 345 | 962 |
| | | | | | | 52% | 877 | 984 |
| | | | | | | 26% | 369 | 764 |
| | | | | | | 25% | 158 | 298 |
| | | | | | | 31% | 318 | 818 |
| | | | | | | 67% | 306 | 926 |
| HMEAI48 | 1352290 | 341 | WUblastx.64 | (Q9Y639) STROMAL | Q9Y639 | 80% | 36 | 158 |
| | | | | CELL-DERIVED | | | | |
| | | | | RECEPTOR-1 ALPHA. | | | | |
| HMECK83 | 636035 | 342 | WUblastx.64 | (O62658) LINE-1 | O62658 | 32% | 668 | 483 |
| | | | | ELEMENT ORF2. | | 50% | 65 | 6 |
| | | | | | | 49% | 483 | 100 |
| HMEET96 | 566720 | 343 | WUblastx.64 | (Q9CR48) | Q9CR48 | 86% | 121 | 915 |
| | | | | 2610318G18RIK | | | | |
| | | | | PROTEIN. | | | | |
| HMIAL37 | 603201 | 344 | HMMER | PFAM: PDZ domain | PF00595 | 57.7 | 127 | 327 |
| | | | 2.1.1 | (Also known as DHR or | | | | |
| | | | | GLGF). | | | | |
| | | | WUblastx.64 | (Q9Y6N9) ANTIGEN | Q9Y6N9 | 100% | 315 | 1100 |
| | | | | NY-CO-38. | | 100% | 76 | 315 |
| | | | | | | 38% | 109 | 318 |
| | | | | | | 27% | 870 | 1061 |
| | | | | | | 35% | 765 | 998 |
| | | | | | | 62% | 1111 | 1242 |
| | | | | | | 63% | 1067 | 1132 |
| HMIAP86 | 726831 | 345 | HMMER | PFAM: Mitochondrial | PF00153 | 262 | 329 | 1180 |
| | | | 2.1.1 | carrier proteins | | | | |
| | | | WUblastx.64 | (AAG29582) | AAG29582 | 97% | 182 | 1183 |
| | | | | Mitochondrial uncoupling | | | | |
| | | | | protein 5 long | | | | |
| HMMAH60 | 562776 | 347 | WUblastx.64 | (Q9H728) CDNA: | Q9H728 | 52% | 675 | 538 |
| | | | | FLJ21463 FIS, CLONE | | 53% | 820 | 665 |
| | | | | COL04765. | | | | |
| HMSBX80 | 597448 | 349 | WUblastx.64 | (Q9H728) CDNA: | Q9H728 | 55% | 1721 | 1413 |
| | | | | FLJ21463 FIS, CLONE | | | | |
| | | | | COL04765. | | | | |
| HMSGB14 | 570833 | 351 | WUblastx.64 | (Q9BGV8) | Q9BGV8 | 73% | 403 | 615 |
| | | | | HYPOTHETICAL 10.0 KDA | | | | |
| | | | | PROTEIN. | | | | |
| HMSGT42 | 383470 | 352 | WUblastx.64 | (Q9GZW0) DJ604K5.1 | Q9GZW0 | 99% | 40 | 525 |
| | | | | (15 KDA | | | | |
| | | | | SELENOPROTEIN). | | | | |
| HMSHS36 | 1127691 | 354 | WUblastx.64 | (O95662) POT. ORF VI | O95662 | 83% | 781 | 350 |
| | | | | (FRAGMENT). | | | | |
| HMSHS36 | 1028961 | 786 | WUblastx.64 | (Q9H8K5) CDNA | Q9H8K5 | 64% | 494 | 544 |
| | | | | FLJ13501 FIS, CLONE | | 78% | 340 | 381 |
| | | | | PLACE1004815. | | 79% | 367 | 489 |
| HMSKC04 | 799540 | 357 | WUblastx.64 | (Q9H743) CDNA: | Q9H743 | 66% | 1341 | 1225 |
| | | | | FLJ21394 FIS, CLONE | | 60% | 1414 | 1346 |
| | | | | COL03536. | | 56% | 1244 | 1053 |
| HMTBI36 | 1301451 | 358 | WUblastx.64 | (Q9VZF8) CG1332 | Q9VZF8 | 56% | 958 | 2556 |
| | | | | PROTEIN. | | 36% | 2488 | 3024 |
| | | | | | | 40% | 376 | 879 |
| | | | | | | 35% | 2341 | 2550 |
| | | | | | | 27% | 2494 | 2622 |
| | | | | | | 40% | 712 | 834 |
| HMTBI36 | 866466 | 787 | HMMER | PFAM: WD domain, G- | PF00400 | 45.8 | 2490 | 2600 |
| | | | 2.1.1 | beta repeat | | | | |
| | | | WUblastx.64 | (Q9VZF8) CG1332 | Q9VZF8 | 56% | 957 | 2555 |
| | | | | PROTEIN. | | 36% | 2487 | 3023 |
| | | | | | | 40% | 375 | 878 |
| | | | | | | 35% | 2340 | 2549 |
| | | | | | | 27% | 2493 | 2621 |
| | | | | | | 40% | 711 | 833 |
| HMUAP70 | 872208 | 359 | WUblastx.64 | (Q9EQH8) NEDD4 WW | Q9EQH8 | 89% | 69 | 845 |
| | | | | DOMAIN-BINDING | | | | |
| | | | | PROTEIN 5 | | | | |
| | | | | (FRAGMENT). | | | | |
| HMUAP70 | 723302 | 788 | WUblastx.64 | (Q9BT67) UNKNOWN | Q9BT67 | 73% | 60 | 104 |
| | | | | (PROTEIN FOR | | 99% | 107 | 721 |
| | | | | MGC: 10924). | | | | |
| HMUAP70 | 778820 | 789 | WUblastx.64 | (Q9BT67) UNKNOWN | Q9BT67 | 100% | 183 | 221 |
| | | | | (PROTEIN FOR | | 72% | 229 | 402 |
| | | | | MGC: 10924). | | 100% | 338 | 844 |
| HMUAP70 | 674913 | 790 | WUblastx.64 | (Q9BT67) UNKNOWN | Q9BT67 | 98% | 209 | 379 |
| | | | | (PROTEIN FOR | | 94% | 109 | 216 |
| | | | | MGC: 10924). | | 82% | 62 | 112 |
| HMUAP70 | 646810 | 791 | WUblastx.64 | (Q9BT67) UNKNOWN | Q9BT67 | 73% | 60 | 104 |
| | | | | (PROTEIN FOR | | 96% | 107 | 583 |
| | | | | MGC: 10924). | | | | |
| HMUAP70 | 381964 | 792 | WUblastx.64 | (Q9BT67) UNKNOWN | Q9BT67 | 86% | 60 | 104 |
| | | | | (PROTEIN FOR | | 99% | 106 | 720 |
| | | | | MGC: 10924). | | | | |
| HMWEB02 | 638159 | 361 | WUblastx.64 | (Q96MX0) CDNA | Q96MX0 | 100% | 61 | 207 |
| | | | | FLJ31762 fis, clone | | 34% | 187 | 300 |
| | | | | NT2RI2007754, weakly | | 97% | 333 | 449 |
| | | | | similar to INT | | | | |
| HMWFO02 | 542061 | 793 | WUblastx.64 | (Q9P1C6) PRO2738. | Q9P1C6 | 61% | 647 | 549 |
| | | | | | | 44% | 473 | 345 |
| HMWGY65 | 1308287 | 363 | WUblastx.64 | (Q8VCP9) RIKEN cDNA | Q8VCP9 | 66% | 42 | 1442 |
| | | | | 1200003C23 gene. | | | | |
| HMWGY65 | 794987 | 794 | WUblastx.64 | (Q8VCP9) RIKEN cDNA | Q8VCP9 | 58% | 542 | 1438 |
| | | | | 1200003C23 gene. | | 65% | 42 | 596 |
| HNEEB45 | 1036397 | 365 | WUblastx.64 | hypothetical protein 3 - | pir\|E41925\|E41925 | 78% | 861 | 929 |
| | | | | human | | 39% | 523 | 717 |
| | | | | | | 44% | 548 | 862 |
| HNFFC43 | 753337 | 366 | WUblastx.64 | (Q969J4) Lipocalin-1 | Q969J4 | 97% | 319 | 453 |
| | | | | interacting membrane | | 66% | 428 | 769 |
| | | | | receptor (Lipocalin- | | 87% | 651 | 839 |
| | | | | interac | | 99% | 903 | 1517 |
| HNFIU96 | 460611 | 367 | WUblastx.64 | (Q26195) PVA1 GENE. | Q26195 | 66% | 331 | 366 |
| | | | | | | 54% | 177 | 323 |
| | | | | | | 61% | 318 | 371 |
| HNFJF07 | 577013 | 368 | WUblastx.64 | (Q8WYX2) Hypothetical | Q8WYX2 | 65% | 585 | 457 |
| | | | | 14.1 kDa protein. | | | | |
| HNFJH45 | 410107 | 369 | WUblastx.64 | (Q9H7Z0) CDNA | Q9H7Z0 | 48% | 277 | 11 |
| | | | | FLJ14058 FIS, CLONE | | | | |
| | | | | HEMBB1000554. | | | | |
| HNGAK47 | 561488 | 370 | WUblastx.64 | (Q96EF8) Unknown | Q96EF8 | 33% | 12 | 206 |
| | | | | (protein for MGC: 21495). | | 31% | 12 | 206 |
| | | | | | | 20% | 492 | 617 |
| | | | | | | 34% | 492 | 557 |
| | | | | | | 25% | 486 | 569 |
| | | | | | | 39% | 190 | 2 |
| | | | | | | 29% | 537 | 487 |
| HNGEP09 | 499076 | 378 | WUblastx.64 | (AAK55521) PRO0764. | AAK55521 | 57% | 965 | 861 |
| | | | | | | 53% | 1021 | 977 |
| | | | | | | 50% | 867 | 715 |
| HNGIJ31 | 519120 | 381 | WUblastx.64 | (Q9N083) UNNAMED | Q9N083 | 73% | 566 | 610 |
| | | | | PORTEIN PRODUCT. | | 54% | 615 | 725 |
| | | | | | | 66% | 454 | 561 |
| HNGJE50 | 561568 | 383 | WUblastx.64 | (Q9HBS7) | Q9HBS7 | 64% | 1028 | 945 |
| | | | | HYPOTHETICAL 14.2 KDA | | 62% | 919 | 734 |
| | | | | PROTEIN. | | | | |
| HNGJP69 | 604891 | 385 | WUblastx.64 | (Q9H743) CDNA: | Q9H743 | 53% | 973 | 857 |
| | | | | FLJ21394 FIS, CLONE | | 71% | 860 | 693 |
| | | | | COL03536. | | | | |
| HNGKN89 | 834857 | 387 | WUblastx.64 | (Q9BGZ4) | Q9BGZ4 | 67% | 891 | 781 |
| | | | | HYPOTHETICAL 11.6 KDA | | | | |
| | | | | PROTEIN. | | | | |
| HNGOM56 | 836064 | 388 | WUblastx.64 | (Q96MM0) CDNA | Q96MM0 | 38% | 577 | 744 |
| | | | | FLJ32172 fis, clone | | 58% | 714 | 953 |
| | | | | PLACE6000555. | | | | |
| HNHFO29 | 463568 | 399 | WUblastx.64 | (Q9NX85) CDNA | Q9NX85 | 69% | 522 | 695 |
| | | | | FLJ20378 FIS, CLONE | | | | |
| | | | | KAIA0536. | | | | |
| HNHOD46 | 843488 | 402 | WUblastx.64 | (O60448) NEURONAL | O60448 | 76% | 334 | 552 |
| | | | | THREAD PROTEIN | | 56% | 646 | 921 |
| | | | | AD7C-NTP. | | 56% | 645 | 713 |
| | | | | | | 52% | 844 | 894 |
| | | | | | | 73% | 331 | 498 |
| | | | | | | 59% | 353 | 625 |
| | | | | | | 50% | 828 | 917 |
| | | | | | | 70% | 721 | 792 |
| | | | | | | 48% | 781 | 915 |
| | | | | | | 50% | 558 | 791 |
| | | | | | | 35% | 401 | 595 |
| | | | | | | 31% | 283 | 552 |
| | | | | | | 50% | 379 | 462 |
| | | | | | | 61% | 486 | 839 |
| HNTBI57 | 570877 | 405 | WUblastx.64 | (O95400) CD2 | O95400 | 100% | 173 | 1195 |
| | | | | CYTOPLASMIC | | | | |
| | | | | DOMAIN BINDING | | | | |
| | | | | PROTEIN (CD2 | | | | |
| | | | | ANTIGEN (CYTOPLA | | | | |
| HNTCE26 | 1160395 | 406 | HMMER | PFAM: 7 transmembrane | PF00001 | 137.5 | 282 | 1037 |
| | | | 2.1.1 | receptor (rhodopsin | | | | |
| | | | | family) | | | | |
| | | | WUblastx.64 | (Q9H1Y3) DJ317G22.2 | Q9H1Y3 | 100% | 111 | 1316 |
| | | | | (ENCEPHALOPSIN) | | | | |
| | | | | (PANOPSIN). | | | | |
| HNTCE26 | 853373 | 802 | HMMER | PFAM: 7 transmembrane | PF00001 | 23.2 | 63 | 218 |
| | | | 2.1.1 | receptor (rhodopsin | | | | |
| | | | | family) | | | | |
| | | | WUblastx.64 | (Q9H1Y3) DJ317G22.2 | Q9H1Y3 | 95% | 370 | 495 |
| | | | | (ENCEPHALOPSIN) | | 100% | 12 | 377 |
| | | | | (PANOPSIN). | | | | |
| HNTNC20 | 700627 | 407 | WUblastx | (AAH24118) Similar to | AAH24118 | 57% | 252 | 776 |
| | | | | Unknown (protein for | | | | |
| | | | | IMAGE: 44 | | | | |
| HNTSY18 | 1041383 | 409 | WUblastx.64 | (Q9XSV8) SCO- | Q9XSV8 | 70% | 51 | 644 |
| | | | | SPONDIN | | 63% | 1204 | 1236 |
| | | | | (FRAGMENT). | | 37% | 54 | 596 |
| | | | | | | 31% | 66 | 803 |
| | | | | | | 29% | 824 | 931 |
| | | | | | | 28% | 42 | 596 |
| | | | | | | 30% | 66 | 863 |
| | | | | | | 36% | 48 | 662 |
| | | | | | | 30% | 416 | 922 |
| | | | | | | 29% | 635 | 1276 |
| | | | | | | 29% | 1078 | 1356 |
| | | | | | | 41% | 1482 | 1517 |
| | | | | | | 50% | 1101 | 1157 |
| | | | | | | 78% | 539 | 1201 |
| | | | | | | 26% | 530 | 892 |
| | | | | | | 36% | 228 | 584 |
| | | | | | | 26% | 755 | 1198 |
| | | | | | | 29% | 84 | 551 |
| | | | | | | 33% | 379 | 537 |
| | | | | | | 32% | 15 | 329 |
| | | | | | | 34% | 99 | 389 |
| | | | | | | 30% | 54 | 329 |
| | | | | | | 25% | 66 | 581 |
| | | | | | | 42% | 1485 | 1523 |
| | | | | | | 40% | 1017 | 1076 |
| HNTSY18 | 897950 | 804 | WUblastx.64 | (Q9GMX5) | Q9GMX5 | 61% | 356 | 201 |
| | | | | HYPOTHETICAL 12.9 KDA | | | | |
| | | | | PROTEIN. | | | | |
| HOACB38 | 520201 | 411 | WUblastx.64 | (Q9H387) PRO2550. | Q9H387 | 71% | 420 | 295 |
| | | | | | | 77% | 589 | 419 |
| HODDN65 | 520348 | 414 | WUblastx.64 | (Q9N083) UNNAMED | Q9N083 | 74% | 743 | 663 |
| | | | | PORTEIN PRODUCT. | | 67% | 660 | 493 |
| HODDN92 | 422913 | 415 | WUblastx.64 | (Q9H1S5) BA110H4.2 | Q9H1S5 | 100% | 1119 | 1021 |
| | | | | (SIMILAR TO | | | | |
| | | | | MEMBRANE | | | | |
| | | | | PROTEIN). | | | | |
| HODDO08 | 790333 | 416 | WUblastx.64 | (Q8WZ36) Hypothetical | Q8WZ36 | 83% | 725 | 1042 |
| | | | | 11.9 kDa protein. | | | | |
| HODDW40 | 579256 | 417 | WUblastx.64 | (Q9GMP5) | Q9GMP5 | 60% | 657 | 520 |
| | | | | HYPOTHETICAL 6.6 KDA | | | | |
| | | | | PROTEIN. | | | | |
| HODGE68 | 834907 | 420 | WUblastx.64 | retrovirus-related | pir\|S23650\|S23650 | 36% | 370 | 278 |
| | | | | hypothetical protein II - | | 54% | 276 | 1 |
| | | | | human 1 | | | | |
| HOEBK34 | 768325 | 421 | HMMER | PFAM: von Willebrand | PF00093 | 54.1 | 455 | 619 |
| | | | 2.1.1 | factor type C domain | | | | |
| | | | WUblastx.64 | (O94769) | O94769 | 90% | 149 | 643 |
| | | | | EXTRACELLULAR | | | | |
| | | | | MATRIX PROTEIN. | | | | |
| HOEBK34 | 509951 | 807 | WUblastx.64 | (O94769) | O94769 | 96% | 68 | 325 |
| | | | | EXTRACELLULAR | | 93% | 316 | 561 |
| | | | | MATRIX PROTEIN. | | | | |
| HOEBZ89 | 828177 | 422 | WUblastx.64 | hypothetical protein | pir\|T18967\|T18967 | 31% | 133 | 969 |
| | | | | C05G5.5 - Caenorhabditis | | | | |
| | | | | elegans | | | | |
| HOEDB32 | 634994 | 423 | WUblastx.64 | (Q9Y2Y6) TADA1 | Q9Y2Y6 | 100% | 104 | 781 |
| | | | | PROTEIN | | | | |
| | | | | (DKFZP564K1964 | | | | |
| | | | | PROTEIN). | | | | |
| HOEDE28 | 1036480 | 424 | WUblastx.64 | (Q8WY86) PP3686. | Q8WY86 | 99% | 933 | 1535 |
| HOEDH84 | 748236 | 425 | WUblastx.64 | (Q960D8) SD05564p. | Q960D8 | 39% | 7 | 1449 |
| HOEFV61 | 833079 | 426 | HMMER | PFAM: Leucine Rich | PF00560 | 22 | 142 | 216 |
| | | | 2.1.1 | Repeat | | | | |
| | | | WUblastx.64 | (Q9C000) NAC-BETA | Q9C000 | 97% | 695 | 1507 |
| | | | | SPLICE VARIANT. | | 94% | 1496 | 1969 |
| | | | | | | 36% | 1163 | 1300 |
| | | | | | | 100% | 10 | 555 |
| | | | | | | 57% | 1419 | 1460 |
| | | | | | | 29% | 303 | 434 |
| | | | | | | 100% | 1945 | 2001 |
| | | | | | | 44% | 127 | 489 |
| | | | | | | 34% | 555 | 659 |
| | | | | | | 30% | 206 | 505 |
| | | | | | | 29% | 54 | 383 |
| | | | | | | 30% | 109 | 546 |
| | | | | | | 96% | 549 | 704 |
| HOFMQ33 | 1184465 | 427 | WUblastx.64 | (O15232) MATRILIN-3 | MTN3_HUMAN | 85% | 43 | 1500 |
| | | | | PRECURSOR. | | | | |
| HOFMQ33 | 919896 | 809 | HMMER | PFAM: von Willebrand | PF00092 | 189.8 | 288 | 815 |
| | | | 2.1.1 | factor type A domain | | | | |
| | | | WUblastx.64 | (O15232) MATRILIN-3 | MTN3_HUMAN | 85% | 42 | 1499 |
| | | | | PRECURSOR. | | | | |
| HOFMQ33 | 906694 | 810 | HMMER | PFAM: von Willebrand | PF00092 | 162.2 | 318 | 737 |
| | | | 2.1.1 | factor type A domain | | | | |
| | | | WUblastx.64 | (O15232) MATRILIN-3 | MTN3_HUMAN | 81% | 72 | 857 |
| | | | | PRECURSOR. | | | | |
| HOFMQ33 | 902639 | 811 | WUblastx.64 | (O15232) MATRILIN-3 | MTN3_HUMAN | 81% | 1584 | 877 |
| | | | | PRECURSOR. | | | | |
| HOFMQ33 | 702186 | 812 | WUblastx.64 | (Q8WUF2) Hypothetical | Q8WUF2 | 88% | 937 | 911 |
| | | | | 23.7 kDa protein. | | 99% | 914 | 327 |
| HOFMT75 | 911180 | 428 | HMMER | PFAM: Eukaryotic | PF00026 | 619 | 290 | 1303 |
| | | | 2.1.1 | aspartyl protease | | | | |
| | | | WUblastx.64 | cathepsin D (EC 3.4.23.5) | pir\|A25771\|KHHUD | 87% | 83 | 1312 |
| | | | | precursor [validated] - | | | | |
| | | | | human | | | | |
| HOFMT75 | 905365 | 813 | WUblastx.64 | cathepsin D (EC 3.4.23.5) | pir\|A25771\|KHHUD | 65% | 83 | 361 |
| | | | | precursor [validated] - | | | | |
| | | | | human | | | | |
| HOFMT75 | 892308 | 814 | WUblastx.64 | cathepsin D (EC 3.4.23.5) | pir\|A25771\|KHHUD | 88% | 1494 | 757 |
| | | | | precursor [validated] - | | | | |
| | | | | human | | | | |
| HOFMT75 | 892291 | 815 | HMMER | PFAM: Eukaryotic | PF00026 | 496.2 | 336 | 1232 |
| | | | 2.1.1 | aspartyl protease | | | | |
| | | | WUblastx.64 | cathepsin D (EC 3.4.23.5) | pir\|A25771\|KHHUD | 99% | 129 | 1232 |
| | | | | precursor [validated] - | | | | |
| | | | | human | | | | |
| HOFND85 | 847424 | 430 | HMMER | PFAM: Cadherin domain | PF00028 | 256 | 905 | 1180 |
| | | | 2.1.1 | | | | | |
| | | | WUblastx.64 | (AAK51617) | AAK51617 | 83% | 167 | 2047 |
| | | | | Protocadherin-beta7. | | 30% | 425 | 1858 |
| HOFOC33 | 1186156 | 432 | WUblastx.64 | clusterin precursor - dog | pir\|A40018\|A40018 | 69% | 1022 | 1414 |
| | | | | | | 81% | 115 | 1086 |
| HOFOC33 | 967554 | 817 | HMMER | PFAM: Clusterin | PF01093 | 236.4 | 81 | 395 |
| | | | 2.1.1 | | | | | |
| | | | WUblastx.64 | clusterin precursor - dog | pir\|A40018\|A40018 | 44% | 373 | 453 |
| | | | | | | 91% | 81 | 395 |
| HOFOC33 | 878690 | 818 | HMMER | PFAM: Clusterin | PF01093 | 236.6 | 81 | 395 |
| | | | 2.1.1 | | | | | |
| | | | WUblastx.64 | clusterin precursor - dog | pir\|A40018\|A40018 | 44% | 373 | 453 |
| | | | | | | 91% | 81 | 395 |
| HOFOC33 | 905734 | 819 | HMMER | PFAM: Clusterin | PF01093 | 301.2 | 76 | 432 |
| | | | 2.1.1 | | | | | |
| | | | WUblastx.64 | clusterin precursor - dog | pir\|A40018\|A40018 | 77% | 1023 | 1415 |
| | | | | | | 95% | 76 | 432 |
| | | | | | | 86% | 440 | 1087 |
| HOFOC33 | 902326 | 820 | WUblastx.64 | clusterin precursor - dog | pir\|A40018\|A40018 | 84% | 583 | 257 |
| HOFOC33 | 885140 | 821 | WUblastx.64 | clusterin precursor - dog | pir\|A40018\|A40018 | 77% | 839 | 36 |
| HOFOC33 | 806819 | 822 | HMMER | PFAM: 60s Acidic | PF00428 | 74.6 | −422 | −733 |
| | | | 2.1.1 | ribosomal protein | | | | |
| | | | WUblastx.64 | acidic ribosomal protein | pir\|A27125\| | 52% | 5 | 55 |
| | | | | P0, cytosolic [validated] - | R5HUP0 | 87% | 42 | 812 |
| | | | | human | | | | |
| HOFOC73 | 931871 | 433 | HMMER | PFAM: Papain family | PF00112 | 22.3 | 192 | 311 |
| | | | 2.1.1 | cysteine protease | | | | |
| | | | WUblastx.64 | (BAB22302) Adult male | BAB22302 | 87% | 316 | 918 |
| | | | | kidney cDNA, RIKEN | | 70% | 18 | 341 |
| | | | | full-lengt | | | | |
| HOFOC73 | 907073 | 823 | WUblastx.64 | (CAC09370) DJ543J19.3 | CAC09370 | 76% | 64 | 414 |
| | | | | (cathepsin Z). | | 84% | 411 | 920 |
| HOFOC73 | 878863 | 825 | WUblastx.64 | (BAB55004) CDNA | BAB55004 | 100% | 2291 | 819 |
| | | | | FLJ14357 fis, clone | | | | |
| | | | | HEMBA1000005, h | | | | |
| HOGAW62 | 579891 | 434 | WUblastx.64 | (Q8WUD4) Similar to | Q8WUD4 | 100% | 35 | 130 |
| | | | | RIKEN cDNA | | | | |
| | | | | 2700094L05 gene. | | | | |
| HOGCK20 | 745445 | 435 | WUblastx.64 | (Q969N2) Phosphatidyl | Q969N2 | 99% | 378 | 1622 |
| | | | | inositol glycan class T | | 97% | 57 | 389 |
| | | | | precursor (Hypothetical | | | | |
| HOGCK20 | 664499 | 826 | WUblastx.64 | (Q969N2) Phosphatidyl | Q969N2 | 92% | 1533 | 1616 |
| | | | | inositol glycan class T | | 97% | 68 | 382 |
| | | | | precursor (Hypothetical | | 44% | 51 | 125 |
| | | | | | | 50% | 52 | 81 |
| | | | | | | 99% | 371 | 1534 |
| HOGCK63 | 895880 | 436 | WUblastx.64 | (Q9Y386) CGI-78 | Q9Y386 | 76% | 1214 | 1264 |
| | | | | PROTEIN. | | 88% | 1161 | 1214 |
| | | | | | | 100% | 514 | 1161 |
| HOGCK63 | 902295 | 827 | WUblastx.64 | (Q96BI3) Hypothetical | Q96BI3 | 100% | 813 | 872 |
| | | | | 29.0 kDa protein (CGI-78 | | 96% | 22 | 477 |
| | | | | protein). | | | | |
| HOGCS52 | 919898 | 437 | WUblastx.64 | (Q9NY68) CTL2 | Q9NY68 | 99% | 31 | 1383 |
| | | | | PROTEIN. | | | | |
| HOGCS52 | 907118 | 828 | WUblastx.64 | (Q9NY68) CTL2 | Q9NY68 | 99% | 36 | 1388 |
| | | | | PROTEIN. | | | | |
| HOGCS52 | 867965 | 829 | WUblastx.64 | (Q9H728) CDNA: | Q9H728 | 59% | 1017 | 952 |
| | | | | FLJ21463 FIS, CLONE | | 74% | 931 | 719 |
| | | | | COL04765. | | | | |
| HOHBB49 | 833080 | 438 | WUblastx.64 | (Q9UI50) PRO0657 | Q9UI50 | 71% | 2294 | 2356 |
| | | | | (FRAGMENT). | | 60% | 2374 | 2493 |
| HOHBC68 | 603968 | 439 | WUblastx.64 | (Q8WUJ3) Hypothetical | Q8WUJ3 | 94% | 348 | 707 |
| | | | | 110.4 kDa protein. | | 97% | 676 | 1785 |
| HOHBY44 | 873264 | 441 | WUblastx.64 | (O60565) GREMLIN | O60565 | 100% | 170 | 721 |
| | | | | (DRM). | | | | |
| HOHCH55 | 827481 | 443 | WUblastx.64 | (O95965) TEN | O95965 | 100% | 221 | 1702 |
| | | | | INTEGRIN EGF-LIKE | | | | |
| | | | | REPEAT DOMAINS | | | | |
| | | | | PROTEIN PRECURSOR. | | | | |
| HOHCH55 | 815682 | 832 | WUblastx.64 | (O95965) TEN | O95965 | 100% | 1623 | 1712 |
| | | | | INTEGRIN EGF-LIKE | | 31% | 416 | 1576 |
| | | | | REPEAT DOMAINS | | 99% | 230 | 1621 |
| | | | | PROTEIN PRECURSOR. | | 40% | 326 | 1426 |
| HONAH29 | 1299928 | 444 | WUblastx.64 | (Q9NWM8) CDNA | Q9NWM8 | 100% | 136 | 768 |
| | | | | FLJ20731 FIS, CLONE | | | | |
| | | | | HEP10272 | | | | |
| | | | | (HYPOTHETICAL 24.2 KDA | | | | |
| | | | | PRO | | | | |
| HONAH29 | 457167 | 833 | HMMER | PFAM: FKBP-type | PF00254 | 95.1 | 288 | 539 |
| | | | 2.1.1 | peptidyl-prolyl cis-trans | | | | |
| | | | | isomerases | | | | |
| | | | WUblastx.64 | (Q9NWM8) CDNA | Q9NWM8 | 98% | 144 | 776 |
| | | | | FLJ20731 FIS, CLONE | | | | |
| | | | | HEP10272 | | | | |
| | | | | (HYPOTHETICAL 24.2 KDA | | | | |
| | | | | PRO | | | | |
| HOSDJ25 | 854234 | 445 | WUblastx.64 | (Q9D8Y9) | Q9D8Y9 | 85% | 468 | 593 |
| | | | | 1810018L05RIK | | 86% | 143 | 544 |
| | | | | PROTEIN. | | | | |
| HOSEG51 | 545809 | 446 | WUblastx.64 | (Q9NUT5) CDNA | Q9NUT5 | 51% | 2 | 82 |
| | | | | FLJ11152 FIS, CLONE | | 100% | 46 | 537 |
| | | | | PLACE1006901 | | | | |
| | | | | (FRAGMENT). | | | | |
| HOSFD58 | 614040 | 447 | HMMER | PFAM: ATP-sulfurylase | PF01747 | 697.3 | −647 | −1633 |
| | | | 2.1.1 | | | | | |
| | | | WUblastx.64 | 3′-phosphoadenosine-5′- | pir\|JW0087\|JW0087 | 100% | 56 | 1927 |
| | | | | phosphosulfate synthetase - | | | | |
| | | | | human | | | | |
| HOSFD58 | 383513 | 835 | WUblastx.64 | 3′-phosphoadenosine-5′- | pir\|JW0087\|JW0087 | 100% | 56 | 1927 |
| | | | | phosphosulfate synthetase - | | | | |
| | | | | human | | | | |
| HOUCQ17 | 429229 | 448 | HMMER | PFAM: Reprolysin family | PF01562 | 76.2 | 216 | −20 |
| | | | 2.1.1 | propeptide | | | | |
| | | | WUblastx.64 | (P97857) ADAM-TS 1 | ATS1_MOUSE | 81% | 508 | 3408 |
| | | | | PRECURSOR (EC | | | | |
| | | | | 3.4.24.—) (A | | | | |
| | | | | DISINTEGRIN A | | | | |
| HOUDK26 | 565393 | 449 | WUblastx.64 | (Q9NUX1) CDNA | Q9NUX1 | 87% | 4 | 585 |
| | | | | FLJ11082 FIS, CLONE | | | | |
| | | | | PLACE1005206. | | | | |
| HPASA81 | 1352382 | 451 | WUblastx.64 | (O35360) UTERUS- | O35360 | 73% | 1 | 1818 |
| | | | | OVARY SPECIFIC | | | | |
| | | | | PUTATIVE | | | | |
| | | | | TRANSMEMBRANE | | | | |
| | | | | PROTEIN. | | | | |
| HPASA81 | 900548 | 836 | HMMER | PFAM: CUB domain | PF00431 | 146.9 | 452 | 778 |
| | | | 2.1.1 | | | | | |
| | | | WUblastx.64 | (O35360) UTERUS- | O35360 | 67% | 8 | 928 |
| | | | | OVARY SPECIFIC | | 75% | 918 | 1814 |
| | | | | PUTATIVE | | | | |
| | | | | TRANSMEMBRANE | | | | |
| | | | | PROTEIN. | | | | |
| HPBCU51 | 411080 | 452 | WUblastx.64 | (Q9BWJ9) SIMILAR TO | Q9BWJ9 | 96% | 56 | 154 |
| | | | | NEUROBLASTOMA | | | | |
| | | | | (NERVE TISSUE) | | | | |
| | | | | PROTEIN. | | | | |
| HPFCL43 | 535710 | 457 | WUblastx.64 | (AAH07349) Adrenal | AAH07349 | 97% | 57 | 257 |
| | | | | gland protein AD-004. | | | | |
| HPFDG48 | 542227 | 458 | WUblastx.64 | (Q9Y6E5) HSPC024-ISO. | Q9Y6E5 | 90% | 564 | 623 |
| | | | | | | 88% | 313 | 387 |
| HPIAQ68 | 833082 | 459 | WUblastx.64 | (Q95LL4) Hypothetical | Q95LL4 | 46% | 905 | 1174 |
| | | | | 13.9 kDa protein. | | | | |
| HPIBO15 | 1310868 | 460 | WUblastx.64 | (Q9CQS3) | Q9CQS3 | 93% | 128 | 757 |
| | | | | 1110018M03RIK | | | | |
| | | | | PROTEIN. | | | | |
| HPIBO15 | 590741 | 840 | WUblastx.64 | (Q9CQS3) | Q9CQS3 | 88% | 127 | 402 |
| | | | | 1110018M03RIK | | 95% | 507 | 722 |
| | | | | PROTEIN. | | 97% | 401 | 508 |
| HPICB53 | 1042309 | 461 | WUblastx.64 | (Q9NX17) CDNA | Q9NX17 | 74% | 1138 | 848 |
| | | | | FLJ20489 FIS, CLONE | | | | |
| | | | | KAT08285. | | | | |
| HPJCL22 | 1146674 | 463 | WUblastx.64 | (Q9GKV3) | Q9GKV3 | 97% | 1420 | 2508 |
| | | | | HYPOTHETICAL 41.8 KDA | | 27% | 210 | 338 |
| | | | | PROTEIN. | | 75% | 2701 | 2823 |
| HPJCL22 | 1034817 | 845 | WUblastx.64 | (Q9VWN8) CG7307 | Q9VWN8 | 69% | 64 | 348 |
| | | | | PROTEIN. | | 61% | 468 | 992 |
| HPJCL22 | 1046434 | 846 | WUblastx.64 | (Q9H8F3) CDNA | Q9H8F3 | 94% | 346 | 582 |
| | | | | FLJ13680 FIS, CLONE | | 81% | 16 | 162 |
| | | | | PLACE2000007, | | | | |
| | | | | HIGHLY SIMILAR TO | | | | |
| | | | | HOM | | | | |
| HPJCW04 | 589969 | 464 | WUblastx.64 | (Q9P195) PRO1722. | Q9P195 | 39% | 1278 | 1093 |
| | | | | | | 60% | 1412 | 1263 |
| HPMAI22 | 635491 | 466 | WUblastx.64 | (Q9CX19) | Q9CX19 | 54% | 147 | 572 |
| | | | | 9430073N08RIK | | | | |
| | | | | PROTEIN. | | | | |
| HPQAC69 | 396804 | 469 | WUblastx.64 | (O75592) PROTEIN | O75592 | 100% | 202 | 297 |
| | | | | ASSOCIATED WITH | | 28% | 76 | 189 |
| | | | | MYC. | | 100% | 3 | 200 |
| HPRBC80 | 829136 | 470 | HMMER | PFAM: Protein | PF00481 | 336.4 | 157 | 957 |
| | | | 2.1.1 | phosphatase 2C | | | | |
| | | | WUblastx.64 | (Q9HAY8) SER/THR | Q9HAY8 | 99% | 94 | 1254 |
| | | | | PROTEIN | | | | |
| | | | | PHOSPHATASE TYPE | | | | |
| | | | | 2C BETA 2 ISOFORM | | | | |
| | | | | (PROTEIN | | | | |
| HPRBC80 | 720095 | 851 | WUblastx.64 | (Q9HAY8) SER/THR | Q9HAY8 | 98% | 3 | 284 |
| | | | | PROTEIN | | | | |
| | | | | PHOSPHATASE TYPE | | | | |
| | | | | 2C BETA 2 ISOFORM | | | | |
| | | | | (PROTEIN | | | | |
| HPRBF19 | 753282 | 471 | WUblastx.64 | (Q9H8I7) CDNA | Q9H8I7 | 99% | 15 | 632 |
| | | | | FLJ13593 FIS, CLONE | | | | |
| | | | | PLACE1009493. | | | | |
| HPTVX32 | 634353 | 473 | WUblastx.64 | (BAB84985) FLJ00232 | BAB84985 | 96% | 103 | 543 |
| | | | | protein (Fragment). | | | | |
| HPWDJ42 | 722246 | 476 | WUblastx.64 | (Q9H728) CDNA: | Q9H728 | 64% | 1100 | 1026 |
| | | | | FLJ21463 FIS, CLONE | | 67% | 1332 | 1102 |
| | | | | COL04765. | | | | |
| HPWDJ42 | 709662 | 854 | WUblastx.64 | (Q9H728) CDNA: | Q9H728 | 64% | 1100 | 1026 |
| | | | | FLJ21463 FIS, CLONE | | 67% | 1332 | 1102 |
| | | | | COL04765. | | | | |
| HPZAB47 | 585702 | 477 | WUblastx.64 | hypothetical protein 3 - | pir\|E41925\|E41925 | 34% | 1132 | 884 |
| | | | | human | | 55% | 1296 | 1183 |
| HRAAB15 | 658717 | 478 | WUblastx.64 | (AAH25678) Similar to | AAH25678 | 100% | 11 | 511 |
| | | | | putative. | | | | |
| HRABA80 | 882176 | 479 | WUblastx.64 | (Q9HA75) CDNA | Q9HA75 | 63% | 647 | 679 |
| | | | | FLJ12122 FIS, CLONE | | 48% | 144 | 371 |
| | | | | MAMMA1000129. | | 93% | 247 | 507 |
| HRABA80 | 588460 | 856 | WUblastx.64 | (Q9HA75) CDNA | Q9HA75 | 63% | 633 | 665 |
| | | | | FLJ12122 FIS, CLONE | | 48% | 130 | 357 |
| | | | | MAMMA1000129. | | 92% | 233 | 493 |
| HRACD15 | 871221 | 480 | WUblastx.64 | (AAH08084) | AAH08084 | 98% | 1452 | 253 |
| | | | | Hypothetical 50.4 kDa | | | | |
| | | | | protein. | | | | |
| HRACD15 | 706332 | 857 | WUblastx.64 | (AAH08084) | AAH08084 | 82% | 1649 | 1581 |
| | | | | Hypothetical 50.4 kDa | | 98% | 1596 | 253 |
| | | | | protein. | | | | |
| HRACD80 | 1309774 | 481 | WUblastx.64 | (CAC37630) Fibulin-6 | CAC37630 | 44% | 700 | 1866 |
| | | | | (Fragment). | | 36% | 37 | 1446 |
| | | | | | | 45% | 1282 | 1920 |
| | | | | | | 42% | 1291 | 1584 |
| | | | | | | 47% | 1291 | 1530 |
| HRACD80 | 882163 | 858 | HMMER | PFAM: EGF-like domain | PF00008 | 64.3 | 1337 | 1441 |
| | | | 2.1.1 | | | | | |
| | | | WUblastx.64 | (CAC37630) Fibulin-6 | CAC37630 | 44% | 695 | 1861 |
| | | | | (Fragment). | | 37% | 32 | 1441 |
| | | | | | | 45% | 1277 | 1915 |
| | | | | | | 42% | 1286 | 1579 |
| | | | | | | 47% | 1286 | 1525 |
| HRDDV47 | 637650 | 482 | WUblastx.64 | (Q9VXD6) CG9723 | Q9VXD6 | 27% | 224 | 964 |
| | | | | PROTEIN. | | | | |
| HRDFD27 | 567004 | 483 | WUblastx.64 | (Q9N032) UNNAMED | Q9N032 | 47% | 679 | 476 |
| | | | | PROTEIN PRODUCT. | | | | |
| HROAJ03 | 567005 | 484 | WUblastx.64 | (Q96A82) CDNA | Q96A82 | 88% | 7 | 786 |
| | | | | FLJ30106 fis, clone | | | | |
| | | | | BNGH41000190, weakly | | | | |
| | | | | similar to Rat | | | | |
| HSATR82 | 531973 | 486 | WUblastx.64 | (Q9UI58) PRO0483 | Q9UI58 | 80% | 678 | 707 |
| | | | | PROTEIN. | | 76% | 605 | 682 |
| HSAUL82 | 490879 | 488 | WUblastx.64 | (Q9BE22) | Q9BE22 | 63% | 546 | 701 |
| | | | | HYPOTHETICAL 13.4 KDA | | | | |
| | | | | PROTEIN. | | | | |
| HSAVH65 | 545459 | 489 | WUblastx.64 | (Q9CZR4) | Q9CZR4 | 92% | 23 | 403 |
| | | | | 2700018N07RIK | | | | |
| | | | | PROTEIN. | | | | |
| HSAVK10 | 561435 | 490 | WUblastx.64 | (Q9H728) CDNA: | Q9H728 | 70% | 1055 | 933 |
| | | | | FLJ21463 FIS, CLONE | | 63% | 1218 | 1030 |
| | | | | COL04765. | | | | |
| HSAWD74 | 460527 | 491 | WUblastx.64 | (Q9NX85) CDNA | Q9NX85 | 67% | 967 | 674 |
| | | | | FLJ20378 FIS, CLONE | | | | |
| | | | | KAIA0536. | | | | |
| HSAWZ41 | 580872 | 492 | WUblastx.64 | (Q9H387) PRO2550. | Q9H387 | 81% | 1386 | 1102 |
| HSAXA83 | 545051 | 493 | WUblastx.64 | (Q9NRX6) PROTEIN X | Q9NRX6 | 100% | 92 | 313 |
| | | | | 013. | | | | |
| HSAYB43 | 604143 | 494 | WUblastx.64 | (Q9N083) UNNAMED | Q9N083 | 60% | 1662 | 1573 |
| | | | | PORTEIN PRODUCT. | | 50% | 1580 | 1338 |
| HSDAJ46 | 692358 | 496 | HMMER | PFAM: Eukaryotic-type | PF00194 | 163.5 | 362 | 793 |
| | | | 2.1.1 | carbonic anhydrase | | | | |
| | | | WUblastx.64 | (Q9ULX7) CARBONIC | CAHE_HUMAN | 99% | 299 | 796 |
| | | | | ANHYDRASE XIV | | 98% | 791 | 1084 |
| | | | | PRECURSOR (EC | | | | |
| | | | | 4.2.1.1) (CAR | | | | |
| HSDEK49 | 1352253 | 497 | WUblastx.64 | (Q9Y279) Z39IG | Q9Y279 | 100% | 60 | 1256 |
| | | | | PROTEIN PRECURSOR. | | | | |
| HSDEK49 | 625998 | 862 | HMMER | PFAM: Immunoglobulin | PF00047 | 18.7 | 225 | 470 |
| | | | 2.1.1 | domain | | | | |
| | | | WUblastx.64 | (Q9Y279) Z39IG | Q9Y279 | 88% | 444 | 1040 |
| | | | | PROTEIN PRECURSOR. | | 99% | 126 | 542 |
| HSDEZ20 | 1352287 | 499 | WUblastx.64 | probable voltage-activated | pir\|T17101\|T17101 | 98% | 4 | 336 |
| | | | | cation channel - rat | | | | |
| HSDEZ20 | 704101 | 863 | WUblastx.64 | probable voltage-activated | pir\|T17101\|T17101 | 89% | 9 | 335 |
| | | | | cation channel - rat | | | | |
| HSDFW45 | 589974 | 500 | WUblastx.64 | (Q9NX85) CDNA | Q9NX85 | 77% | 1645 | 1352 |
| | | | | FLJ20378 FIS, CLONE | | | | |
| | | | | KAIA0536. | | | | |
| HSDJA15 | 795252 | 501 | WUblastx.64 | (Q9BZW5) | Q9BZW5 | 99% | 4 | 702 |
| | | | | TRANSMEMBRANE 6 | | | | |
| | | | | SUPERFAMILY | | | | |
| | | | | MEMBER 1. | | | | |
| HSDJL42 | 1036471 | 503 | WUblastx.64 | (Q9BVS2) UNKNOWN | Q9BVS2 | 65% | 57 | 590 |
| | | | | (PROTEIN FOR | | | | |
| | | | | IMAGE: 3451448) | | | | |
| | | | | (FRAGMENT). | | | | |
| HSDJL42 | 904821 | 864 | WUblastx.64 | (Q9BVS2) UNKNOWN | Q9BVS2 | 65% | 6 | 539 |
| | | | | (PROTEIN FOR | | | | |
| | | | | IMAGE: 3451448) | | | | |
| | | | | (FRAGMENT). | | | | |
| HSDJL42 | 905623 | 865 | WUblastx.64 | (Q9BVS2) UNKNOWN | Q9BVS2 | 64% | 57 | 590 |
| | | | | (PROTEIN FOR | | | | |
| | | | | IMAGE: 3451448) | | | | |
| | | | | (FRAGMENT). | | | | |
| HSDSE75 | 545057 | 506 | WUblastx.64 | (O60245) PCDH7 (BH- | O60245 | 100% | 10 | 702 |
| | | | | PCDH)A. | | | | |
| HSDZR57 | 651375 | 507 | WUblastx.64 | (Q9NX00) CDNA | Q9NX00 | 100% | 9 | 209 |
| | | | | FLJ20512 FIS, CLONE | | | | |
| | | | | KAT09739. | | | | |
| HSHAX21 | 612823 | 508 | WUblastx.64 | (Q9NV22) CDNA | Q9NV22 | 99% | 5 | 598 |
| | | | | FLJ10983 FIS, CLONE | | | | |
| | | | | PLACE1001781, | | | | |
| | | | | WEAKLY SIMILAR TO | | | | |
| | | | | PRO | | | | |
| HSIAS17 | 1352191 | 509 | WUblastx.64 | (Q9H6H4) CDNA: | Q9H6H4 | 100% | 431 | 1201 |
| | | | | FLJ22277 FIS, CLONE | | | | |
| | | | | HRC03740. | | | | |
| HSIAS17 | 514183 | 867 | WUblastx.64 | (Q9H6H4) CDNA: | Q9H6H4 | 100% | 108 | 362 |
| | | | | FLJ22277 FIS, CLONE | | 96% | 350 | 877 |
| | | | | HRC03740. | | | | |
| HSICV24 | 1352248 | 510 | WUblastx.64 | (Q96J88) Putative breast | Q96J88 | 100% | 153 | 884 |
| | | | | epithelial stromal | | | | |
| | | | | interaction protein. | | | | |
| HSICV24 | 612877 | 868 | WUblastx.64 | (Q96J88) Putative breast | Q96J88 | 100% | 251 | 916 |
| | | | | epithelial stromal | | | | |
| | | | | interaction protein. | | | | |
| HSIDJ81 | 589447 | 511 | WUblastx.64 | (Q9H728) CDNA: | Q9H728 | 74% | 1289 | 996 |
| | | | | FLJ21463 FIS, CLONE | | | | |
| | | | | COL04765. | | | | |
| HSIDX71 | 1033671 | 512 | WUblastx.64 | (AAK55521) PRO0764. | AAK55521 | 59% | 1829 | 1764 |
| | | | | | | 65% | 1786 | 1526 |
| HSIDX71 | 902162 | 869 | WUblastx.64 | (AAK55521) PRO0764. | AAK55521 | 59% | 1825 | 1760 |
| | | | | | | 65% | 1782 | 1522 |
| HSJBQ79 | 1304677 | 513 | WUblastx.64 | (Q96D15) Hypothetical | Q96D15 | 96% | 38 | 586 |
| | | | | 37.5 kDa protein. | | | | |
| HSJBQ79 | 661698 | 870 | HMMER | PFAM: EF hand | PF00036 | 23.4 | 663 | 734 |
| | | | 2.1.1 | | | | | |
| | | | WUblastx.64 | (Q96D15) Hypothetical | Q96D15 | 99% | 54 | 1037 |
| | | | | 37.5 kDa protein. | | | | |
| HSJBQ79 | 371784 | 871 | WUblastx.64 | (Q96D15) Hypothetical | Q96D15 | 97% | 32 | 586 |
| | | | | 37.5 kDa protein. | | | | |
| HSKCP69 | 702021 | 514 | WUblastx.64 | (Q9H5G5) CDNA: | Q9H5G5 | 99% | 49 | 906 |
| | | | | FLJ23462 FIS, CLONE | | | | |
| | | | | HSI08475. | | | | |
| HSKCP69 | 413210 | 872 | WUblastx.64 | (Q9H5G5) CDNA: | Q9H5G5 | 96% | 49 | 243 |
| | | | | FLJ23462 FIS, CLONE | | 98% | 234 | 905 |
| | | | | HSI08475. | | | | |
| HSKDA27 | 1352409 | 515 | WUblastx.64 | (BAB85613) URB. | BAB85613 | 83% | 786 | 3635 |
| HSKDA27 | 1074734 | 873 | WUblastx.64 | (BAB85613) URB. | BAB85613 | 60% | 1601 | 1789 |
| | | | | | | 60% | 1715 | 1789 |
| | | | | | | 52% | 1718 | 1792 |
| | | | | | | 73% | 127 | 1791 |
| | | | | | | 32% | 1716 | 1790 |
| HSKDA27 | 872570 | 874 | WUblastx.64 | (BAB85613) URB. | BAB85613 | 69% | 9 | 1670 |
| | | | | | | 32% | 1597 | 1671 |
| HSODE04 | 906498 | 879 | WUblastx.64 | protein BYJ15 - common | pir\|T02229\|T02229 | 36% | 1071 | 1136 |
| | | | | tobacco (fragment) | | 96% | 28 | 102 |
| HSQEO84 | 1306702 | 522 | WUblastx.64 | (Q96DA4) FK506- | Q96DA4 | 100% | 75 | 740 |
| | | | | binding protein. | | | | |
| HSQEO84 | 602258 | 880 | HMMER | PFAM: FKBP-type | PF00254 | 92 | −30 | −326 |
| | | | 2.1.1 | peptidyl-prolyl cis-trans | | | | |
| | | | | isomerases | | | | |
| | | | WUblastx.64 | (Q96DA4) FK506- | Q96DA4 | 100% | 79 | 744 |
| | | | | binding protein. | | | | |
| HSQEO84 | 401251 | 881 | WUblastx.64 | (O54998) FK506- | O54998 | 75% | 86 | 241 |
| | | | | BINDING PROTEIN 7 | | 86% | 216 | 740 |
| | | | | PRECURSOR (EC | | | | |
| | | | | 5.2.1.8) (FKBP-23) (PE | | | | |
| HSSDX51 | 566879 | 524 | WUblastx.64 | (Q9NQ80) ASPIC | Q9NQ80 | 83% | 15 | 368 |
| | | | | PRECURSOR. | | 40% | 301 | 399 |
| | | | | | | 72% | 10 | 69 |
| | | | | | | 41% | 174 | 266 |
| | | | | | | 32% | 78 | 251 |
| | | | | | | 26% | 99 | 257 |
| | | | | | | 87% | 323 | 1105 |
| HSSGD52 | 1352343 | 526 | WUblastx.64 | (Q96FI8) Unknown | Q96FI8 | 100% | 344 | 2161 |
| | | | | (protein for MGC: 9160). | | | | |
| HSSGD52 | 845666 | 882 | WUblastx.64 | (Q96FI8) Unknown | Q96FI8 | 100% | 338 | 2155 |
| | | | | (protein for MGC: 9160). | | | | |
| HSSJC35 | 1306937 | 528 | WUblastx.64 | (Q9H400) DJ583P15.4.1 | Q9H400 | 81% | 62 | 946 |
| | | | | (NOVEL PROTEIN | | | | |
| | | | | (TRANSLATION OF | | | | |
| | | | | CDNA FLJ20406 (E | | | | |
| HSSJC35 | 745409 | 883 | WUblastx.64 | (Q9H400) DJ583P15.4.1 | Q9H400 | 100% | 55 | 939 |
| | | | | (NOVEL PROTEIN | | | | |
| | | | | (TRANSLATION OF | | | | |
| | | | | CDNA FLJ20406 (E | | | | |
| HSSJC35 | 716424 | 884 | WUblastx.64 | (Q9H400) DJ583P15.4.1 | Q9H400 | 76% | 161 | 949 |
| | | | | (NOVEL PROTEIN | | 69% | 66 | 530 |
| | | | | (TRANSLATION OF | | | | |
| | | | | CDNA FLJ20406 (E | | | | |
| HSUBW09 | 413246 | 530 | WUblastx.64 | (Q95LL0) Hypothetical | Q95LL0 | 73% | 589 | 633 |
| | | | | 11.3 kDa protein. | | 77% | 327 | 611 |
| HSVBU91 | 596868 | 533 | WUblastx.64 | cytoplasmic linker protein | pir\|T42734\|T42734 | 85% | 356 | 171 |
| | | | | CLIP-115 - rat | | | | |
| HSXCG83 | 944388 | 534 | WUblastx.64 | (Q9H7F4) CDNA: | Q9H7F4 | 93% | 101 | 901 |
| | | | | FLJ20979 FIS, CLONE | | | | |
| | | | | ADSU01938. | | | | |
| HSXCG83 | 830673 | 885 | WUblastx.64 | (Q9H7F4) CDNA: | Q9H7F4 | 98% | 4 | 726 |
| | | | | FLJ20979 FIS, CLONE | | | | |
| | | | | ADSU01938. | | | | |
| HSXGI47 | 886200 | 536 | WUblastx.64 | (Q9H728) CDNA: | Q9H728 | 56% | 585 | 860 |
| | | | | FLJ21463 FIS, CLONE | | 55% | 762 | 965 |
| | | | | COL04765. | | | | |
| HSYAV50 | 847358 | 537 | HMMER | PFAM: Leucine Rich | PF00560 | 97.9 | 383 | 454 |
| | | | 2.1.1 | Repeat | | | | |
| | | | WUblastx.64 | (Q96CX1) Similar to | Q96CX1 | 96% | 371 | 2170 |
| | | | | RIKEN cDNA | | | | |
| | | | | 2610528G05 gene | | | | |
| | | | | (Fragment). | | | | |
| HSYAZ50 | 902235 | 889 | WUblastx.64 | (Q96NR6) CDNA | Q96NR6 | 70% | 1945 | 2064 |
| | | | | FLJ30278 fis, clone | | | | |
| | | | | BRACE2002755. | | | | |
| HSYAZ50 | 882732 | 890 | WUblastx.64 | (Q9NVZ3) CDNA | Q9NVZ3 | 100% | 50 | 838 |
| | | | | FLJ10420 FIS, CLONE | | | | |
| | | | | NT2RP1000170. | | | | |
| HSYAZ63 | 1177537 | 540 | WUblastx.64 | (Q9Y613) FH1/FH2 | FHOS_HUMAN | 98% | 889 | 1713 |
| | | | | DOMAINS- | | 55% | 272 | 544 |
| | | | | CONTAINING | | 81% | 2101 | 2514 |
| | | | | PROTEIN (FORMIN | | 100% | 478 | 750 |
| | | | | HOMOLOG | | 92% | 3007 | 3090 |
| | | | | | | 28% | 289 | 654 |
| | | | | | | 42% | 608 | 670 |
| | | | | | | 28% | 1015 | 1458 |
| | | | | | | 33% | 2030 | 2119 |
| | | | | | | 56% | 2005 | 2052 |
| | | | | | | 73% | 2573 | 2941 |
| HSYAZ63 | 862063 | 891 | WUblastx.64 | (Q9Y613) FH1/FH2 | FHOS_HUMAN | 69% | 458 | 871 |
| | | | | DOMAINS- | | 92% | 1364 | 1447 |
| | | | | CONTAINING | | 73% | 930 | 1298 |
| | | | | PROTEIN (FORMIN | | 52% | 362 | 418 |
| | | | | HOMOLOG | | 33% | 387 | 476 |
| | | | | | | 100% | 14 | 70 |
| HSYBG37 | 1056317 | 541 | WUblastx.64 | hypothetical protein | pir\|T45062\|T45062 | 100% | 47 | 961 |
| | | | | c316G12.3 [imported] - | | | | |
| | | | | human | | | | |
| HSYBG37 | 581098 | 892 | WUblastx.64 | hypothetical protein | pir\|T45062\|T45062 | 100% | 48 | 962 |
| | | | | c316G12.3 [imported] - | | | | |
| | | | | human | | | | |
| HSZAF47 | 1352172 | 542 | WUblastx.64 | (Q9BXJ2) | Q9BXJ2 | 100% | 106 | 972 |
| | | | | COMPLEMENT-C1Q | | | | |
| | | | | TUMOR NECROSIS | | | | |
| | | | | FACTOR-RELATED | | | | |
| | | | | PROTEIN. | | | | |
| HSZAF47 | 456551 | 893 | HMMER | PFAM: Collagen triple | PF01391 | 54.4 | 299 | 478 |
| | | | 2.1.1 | helix repeat (20 copies) | | | | |
| | | | WUblastx.64 | (Q9BXJ2) | Q9BXJ2 | 92% | 107 | 976 |
| | | | | COMPLEMENT-C1Q | | | | |
| | | | | TUMOR NECROSIS | | | | |
| | | | | FACTOR-RELATED | | | | |
| | | | | PROTEIN. | | | | |
| HT3SF53 | 884170 | 543 | WUblastx.64 | (Q9H5B4) DJ470L14.2.1 | Q9H5B4 | 100% | 312 | 533 |
| | | | | (STAUFEN (RNA | | | | |
| | | | | BINDING PROTEIN) | | | | |
| | | | | ISOFORM 1). | | | | |
| HT5GJ57 | 1299921 | 544 | WUblastx.64 | (Q9GZY6) CDNA | Q9GZY6 | 89% | 105 | 833 |
| | | | | FLJ11237 FIS, CLONE | | | | |
| | | | | PLACE1008531 | | | | |
| | | | | (WBSCR5) (WBSCR15 | | | | |
| | | | | PROT | | | | |
| HT5GJ57 | 740767 | 894 | WUblastx.64 | (Q9GZY6) CDNA | Q9GZY6 | 84% | 122 | 856 |
| | | | | FLJ11237 FIS, CLONE | | | | |
| | | | | PLACE1008531 | | | | |
| | | | | (WBSCR5) (WBSCR15 | | | | |
| | | | | PROT | | | | |
| HTADW91 | 844835 | 545 | WUblastx.64 | (Q8WV10) Hypothetical | Q8WV10 | 86% | 155 | 1117 |
| | | | | 38.4 kDa protein. | | | | |
| HTADX17 | 753289 | 546 | WUblastx.64 | (Q96A28) CD84-H1 | Q96A28 | 100% | 92 | 412 |
| | | | | (CD2 FAMILY 10). | | 99% | 408 | 959 |
| HTADX17 | 457172 | 895 | WUblastx.64 | (Q96A28) CD84-H1 | Q96A28 | 78% | 490 | 585 |
| | | | | (CD2 FAMILY 10). | | 97% | 548 | 952 |
| | | | | | | 99% | 84 | 488 |
| HTAEE28 | 1018291 | 547 | WUblastx.64 | (Q9D4I2) | Q9D4I2 | 78% | 319 | 1161 |
| | | | | 4932408F18RIK | | | | |
| | | | | PROTEIN. | | | | |
| HTAEE28 | 882919 | 896 | WUblastx.64 | (Q9D4I2) | Q9D4I2 | 78% | 372 | 617 |
| | | | | 4932408F18RIK | | | | |
| | | | | PROTEIN. | | | | |
| HTAEE28 | 864120 | 897 | WUblastx.64 | (Q9D4I2) | Q9D4I2 | 76% | 142 | 768 |
| | | | | 4932408F18RIK | | | | |
| | | | | PROTEIN. | | | | |
| HTDAF28 | 396835 | 548 | WUblastx.64 | (Q9BX79) STRA6 | Q9BX79 | 98% | 17 | 298 |
| | | | | ISOFORM 1. | | | | |
| HTEAF65 | 866485 | 549 | WUblastx.64 | (AAH25354) Similar to | AAH25354 | 100% | 9 | 257 |
| | | | | putative. | | | | |
| HTEBI28 | 462221 | 550 | WUblastx.64 | (Q95LI0) Epididymis- | Q95LI0 | 46% | 43 | 231 |
| | | | | specific protein ESP13.6. | | | | |
| HTEDF80 | 587326 | 551 | WUblastx.64 | (Q9NP89) | Q9NP89 | 100% | 253 | 327 |
| | | | | HYPOTHETICAL 42.7 | | 91% | 353 | 451 |
| | | | | KDA PROTEIN | | 100% | 852 | 1073 |
| | | | | (FRAGMENT). | | 75% | 112 | 210 |
| | | | | | | 98% | 698 | 856 |
| | | | | | | 66% | 450 | 863 |
| HTEDY42 | 1352193 | 552 | WUblastx.64 | (Q96L06) Similar to | Q96L06 | 100% | 19 | 717 |
| | | | | RIKEN cDNA | | | | |
| | | | | 1700011E04 gene. | | | | |
| HTEDY42 | 519372 | 898 | HMMER | PFAM: SCP-like | PF00188 | 20 | −98 | −193 |
| | | | 2.1.1 | extracellular protein | | | | |
| | | | WUblastx.64 | (Q96L06) Similar to | Q96L06 | 100% | 19 | 231 |
| | | | | RIKEN cDNA | | 33% | 576 | 719 |
| | | | | 1700011E04 gene. | | 94% | 224 | 700 |
| HTEGI42 | 908143 | 555 | WUblastx.64 | (Q8WW43) Hypothetical | Q8WW43 | 99% | 26 | 796 |
| | | | | 28.5 kDa protein. | | | | |
| HTEGI42 | 904624 | 899 | WUblastx.64 | (Q8WW43) Hypothetical | Q8WW43 | 99% | 145 | 915 |
| | | | | 28.5 kDa protein. | | | | |
| HTEGI42 | 850770 | 900 | WUblastx.64 | (AAL93028) Hypothetical | AAL93028 | 76% | 154 | 26 |
| | | | | 26.9 kDa protein. | | 79% | 154 | 38 |
| | | | | | | 79% | 154 | 38 |
| | | | | | | 79% | 154 | 38 |
| | | | | | | 79% | 154 | 38 |
| | | | | | | 72% | 153 | 25 |
| | | | | | | 81% | 155 | 45 |
| | | | | | | 83% | 156 | 46 |
| | | | | | | 96% | 155 | 72 |
| | | | | | | 85% | 154 | 62 |
| | | | | | | 79% | 154 | 38 |
| HTEGI42 | 847564 | 901 | WUblastx.64 | (Q14288) | Q14288 | 92% | 503 | 429 |
| | | | | HYPOTHETICAL | | 61% | 444 | 1 |
| | | | | PROTEIN | | | | |
| | | | | (FRAGMENT). | | | | |
| HTEHR24 | 835894 | 556 | WUblastx.64 | (Q9HBV2) SPERM | Q9HBV2 | 76% | 84 | 959 |
| | | | | MEMBRANE ANTIGEN | | | | |
| | | | | SMARC32. | | | | |
| HTEHR24 | 513039 | 903 | WUblastx.64 | (Q9HBV2) SPERM | Q9HBV2 | 76% | 41 | 529 |
| | | | | MEMBRANE ANTIGEN | | 100% | 692 | 922 |
| | | | | SMARC32. | | 96% | 514 | 693 |
| HTEHU93 | 722254 | 557 | WUblastx.64 | (O60676) CYSTATIN- | CRES_HUMAN | 100% | 188 | 613 |
| | | | | RELATED | | | | |
| | | | | EPIDIDYMAL | | | | |
| | | | | SPERMATOGENIC | | | | |
| | | | | PROTEIN | | | | |
| HTEHU93 | 423009 | 904 | HMMER | PFAM: Cystatin domain | PF00031 | 31.7 | 35 | −105 |
| | | | 2.1.1 | | | | | |
| | | | WUblastx.64 | (O60676) CYSTATIN- | CRES_HUMAN | 100% | 504 | 614 |
| | | | | RELATED | | 78% | 187 | 552 |
| | | | | EPIDIDYMAL | | | | |
| | | | | SPERMATOGENIC | | | | |
| | | | | PROTEIN | | | | |
| HTEJN13 | 1352272 | 560 | WUblastx.64 | (Q9BWY1) BA552M11.5 | Q9BWY1 | 100% | 158 | 193 |
| | | | | (NOVEL PROTEIN) | | 100% | 351 | 779 |
| | | | | (FRAGMENT). | | | | |
| HTEJN13 | 658744 | 905 | WUblastx.64 | (Q9DAR9) | Q9DAR9 | 60% | 525 | 743 |
| | | | | 1700001D09RIK | | 77% | 163 | 516 |
| | | | | PROTEIN. | | | | |
| HTEJN13 | 381941 | 906 | WUblastx.64 | (Q9HBK8) AD026. | Q9HBK8 | 92% | 191 | 229 |
| | | | | | | 94% | 214 | 633 |
| HTEPG70 | 834931 | 562 | WUblastx.64 | (O75295) R27328_2. | O75295 | 93% | 23 | 268 |
| HTGAU75 | 597467 | 563 | WUblastx.64 | (Q9NZX5) HSPC062. | Q9NZX5 | 55% | 502 | 672 |
| | | | | | | 72% | 149 | 661 |
| HTGEP89 | 410582 | 564 | WUblastx.64 | (Q9DAL9) | Q9DAL9 | 44% | 258 | 566 |
| | | | | 1700007K09RIK | | | | |
| | | | | PROTEIN. | | | | |
| HTHBG43 | 919911 | 565 | WUblastx.64 | (Q9NX17) CDNA | Q9NX17 | 52% | 846 | 517 |
| | | | | FLJ20489 FIS, CLONE | | | | |
| | | | | KAT08285. | | | | |
| HTHDJ94 | 693652 | 567 | HMMER | PFAM: Oxidoreductase | PF00175 | 160.3 | 552 | 896 |
| | | | 2.1.1 | FAD/NAD-binding | | | | |
| | | | | domain | | | | |
| | | | WUblastx.64 | (Q9UHQ9) NADH- | Q9UHQ9 | 89% | 66 | 941 |
| | | | | CYTOCHROME B5 | | | | |
| | | | | REDUCTASE | | | | |
| | | | | ISOFORM. | | | | |
| HTHDS25 | 772559 | 568 | WUblastx.64 | (Q9P1H3) PRO1438. | Q9P1H3 | 66% | 1045 | 911 |
| HTJMA95 | 706618 | 569 | HMMER | PFAM: Ammonium | PF00909 | 62.1 | 533 | 691 |
| | | | 2.1.1 | Transporter Family | | | | |
| | | | WUblastx.64 | (Q9UBD6) RH TYPE C | Q9UBD6 | 98% | 3 | 455 |
| | | | | GLYCOPROTEIN | | 100% | 449 | 1069 |
| | | | | (TUMOR-RELATED | | | | |
| | | | | PROTEIN DRC2). | | | | |
| HTJML75 | 1040047 | 570 | WUblastx.64 | (Q9UJX6) ANAPHASE- | Q9UJX6 | 100% | 30 | 2495 |
| | | | | PROMOTING | | | | |
| | | | | COMPLEX SUBUNIT 2. | | | | |
| HTJML75 | 873355 | 909 | WUblastx.64 | (Q9UJX6) ANAPHASE- | Q9UJX6 | 95% | 40 | 423 |
| | | | | PROMOTING | | 98% | 423 | 1016 |
| | | | | COMPLEX SUBUNIT 2. | | 94% | 911 | 2503 |
| HTLAA40 | 519329 | 571 | WUblastx.64 | (Q9NV11) CDNA | Q9NV11 | 100% | 360 | 482 |
| | | | | FLJ11004 FIS, CLONE | | 100% | 14 | 217 |
| | | | | PLACE1002941. | | | | |
| HTLBE23 | 902187 | 572 | WUblastx.64 | (Q96M29) CDNA | Q96M29 | 98% | 176 | 838 |
| | | | | FLJ32871 fis, clone | | 93% | 840 | 980 |
| | | | | TESTI2003914, weakly | | 81% | 1112 | 1177 |
| | | | | similar to Tek | | | | |
| HTLBE23 | 885431 | 910 | WUblastx.64 | (Q96M29) CDNA | Q96M29 | 92% | 796 | 98 |
| | | | | FLJ32871 fis, clone | | | | |
| | | | | TESTI2003914, weakly | | | | |
| | | | | similar to Tek | | | | |
| HTLEP53 | 634852 | 573 | WUblastx.64 | (Q8WTZ3) Hypothetical | Q8WTZ3 | 66% | 543 | 499 |
| | | | | 27.2 kDa protein. | | 68% | 806 | 534 |
| HTLFE42 | 460583 | 574 | WUblastx.64 | (Q9NSI0) PRED58 | Q9NSI0 | 99% | 17 | 346 |
| | | | | PROTEIN | | | | |
| | | | | (FRAGMENT). | | | | |
| HTLFE57 | 1352310 | 575 | WUblastx.64 | (Q9D2V1) | Q9D2V1 | 88% | 1 | 687 |
| | | | | 2310009N05RIK | | | | |
| | | | | PROTEIN. | | | | |
| HTLFE57 | 791409 | 911 | WUblastx.64 | (Q9D7G6) | Q9D7G6 | 90% | 12 | 698 |
| | | | | 2310009N05RIK | | | | |
| | | | | PROTEIN. | | | | |
| HTLFE57 | 608317 | 912 | WUblastx.64 | (Q9D7G6) | Q9D7G6 | 90% | 2 | 619 |
| | | | | 2310009N05RIK | | | | |
| | | | | PROTEIN. | | | | |
| HTLGE31 | 1035130 | 576 | WUblastx.64 | (Q9NY64) GLUCOSE | Q9NY64 | 81% | 3 | 149 |
| | | | | TRANSPORTER. | | | | |
| HTLHY14 | 838460 | 577 | WUblastx.64 | (Q96L02) Hypothetical | Q96L02 | 99% | 36 | 434 |
| | | | | 24.5 kDa protein. | | 100% | 528 | 773 |
| HTLIT32 | 833906 | 578 | WUblastx.64 | (Q96QH1) NB1 | Q96QH1 | 32% | 312 | 932 |
| | | | | Glycoprotein precursor. | | 28% | 330 | 1007 |
| HTLIV19 | 1046341 | 579 | WUblastx.64 | (Q96LS9) CDNA | Q96LS9 | 50% | 119 | 172 |
| | | | | FLJ25101 fis, clone | | 69% | 178 | 315 |
| | | | | CBR01328. | | | | |
| HTODK73 | 526021 | 582 | WUblastx.64 | (Q9H8P2) CDNA | Q9H8P2 | 93% | 404 | 448 |
| | | | | FLJ13348 FIS, CLONE | | 100% | 567 | 707 |
| | | | | OVARC1002127, | | 71% | 433 | 474 |
| | | | | WEAKLY SIMILAR TO | | 43% | 4 | 189 |
| | | | | SOD | | 61% | 418 | 519 |
| | | | | | | 80% | 21 | 401 |
| HTOHM15 | 1028538 | 585 | WUblastx.64 | (Q9NVL9) CDNA | Q9NVL9 | 96% | 1641 | 1718 |
| | | | | FLJ10649 FIS, CLONE | | 100% | 1507 | 1650 |
| | | | | NT2RP2005835, | | | | |
| | | | | WEAKLY SIMILAR TO | | | | |
| | | | | SHP | | | | |
| HTOHM15 | 848200 | 915 | HMMER | PFAM: UBX domain | PF00789 | 97.6 | 794 | 1033 |
| | | | 2.1.1 | | | | | |
| | | | WUblastx.64 | (Q9H102) DJ776F14.1 | Q9H102 | 100% | 37 | 129 |
| | | | | (ORTHOLOG OF | | 97% | 95 | 1036 |
| | | | | MOUSE P47). | | | | |
| HTOHM15 | 848196 | 916 | WUblastx.64 | (Q9NVL9) CDNA | Q9NVL9 | 96% | 1307 | 1384 |
| | | | | FLJ10649 FIS, CLONE | | 100% | 1173 | 1316 |
| | | | | NT2RP2005835, | | | | |
| | | | | WEAKLY SIMILAR TO | | | | |
| | | | | SHP | | | | |
| HTOIZ02 | 847904 | 917 | WUblastx.64 | ataxin 7 - human | pir\|T09193\|T09193 | 99% | 714 | 1196 |
| | | | | | | 31% | 437 | 619 |
| | | | | | | 47% | 303 | 359 |
| | | | | | | 28% | 224 | 718 |
| | | | | | | 97% | 2 | 736 |
| HTOJA73 | 797108 | 589 | WUblastx.64 | (Q9H387) PRO2550. | Q9H387 | 63% | 1044 | 955 |
| | | | | | | 74% | 1246 | 1046 |
| HTOJK60 | 545067 | 590 | WUblastx.64 | (Q9HA67) CDNA | Q9HA67 | 73% | 745 | 644 |
| | | | | FLJ12155 FIS, CLONE | | 78% | 870 | 757 |
| | | | | MAMMA1000472. | | | | |
| HTPBW79 | 1317835 | 591 | WUblastx.64 | (Q96S93) Hypothetical | Q96S93 | 100% | 178 | 1263 |
| | | | | 41.7 kDa protein. | | | | |
| HTPBW79 | 581435 | 918 | WUblastx.64 | (Q96S93) Hypothetical | Q96S93 | 99% | 302 | 1387 |
| | | | | 41.7 kDa protein. | | | | |
| HTPBW79 | 396459 | 919 | WUblastx.64 | (Q9BWS9) UNKNOWN | Q9BWS9 | 62% | 1198 | 1269 |
| | | | | (PROTEIN FOR | | 99% | 92 | 1243 |
| | | | | MGC: 3234). | | | | |
| HTTDB46 | 812763 | 593 | WUblastx.64 | (Q9Y2C7) | Q9Y2C7 | 70% | 106 | 543 |
| | | | | BUTYROPHILIN LIKE | | 83% | 727 | 762 |
| | | | | RECEPTOR. | | 59% | 1007 | 1072 |
| | | | | | | 100% | 1644 | 2180 |
| HTTDB46 | 909573 | 920 | HMMER | PFAM: SPRY domain | PF00622 | 65.9 | −956 | −1276 |
| | | | 2.1.1 | | | | | |
| HTWCT03 | 429618 | 594 | WUblastx.64 | (O95014) | O95014 | 82% | 1488 | 1592 |
| | | | | WUGSC: H_DJ0855D21.2 | | | | |
| | | | | PROTEIN. | | | | |
| HTWDF76 | 714344 | 595 | WUblastx.64 | (Q9BTF2) REC8P, A | Q9BTF2 | 100% | 792 | 875 |
| | | | | MEIOTIC | | 92% | 370 | 510 |
| | | | | RECOMBINATION | | 27% | 7 | 498 |
| | | | | AND SISTER | | 35% | 179 | 238 |
| | | | | CHROMATID | | 37% | 379 | 525 |
| | | | | COHESION | | 79% | 542 | 688 |
| | | | | | | 70% | 179 | 280 |
| | | | | | | 76% | 4 | 192 |
| HTXAJ12 | 1310814 | 596 | WUblastx.64 | (Q9D7W4) | Q9D7W4 | 45% | 12 | 77 |
| | | | | 2210021G21RIK | | 57% | 97 | 273 |
| | | | | PROTEIN. | | | | |
| HTXAJ12 | 567434 | 921 | WUblastx.64 | (AAH24685) Similar to | AAH24685 | 100% | 9 | 95 |
| | | | | transmembrane 4 | | 98% | 97 | 267 |
| | | | | superfamily m | | | | |
| HTXDW56 | 695765 | 598 | WUblastx.64 | (Q96A54) Similar to CGI- | Q96A54 | 99% | 7 | 819 |
| | | | | 45 protein (Hypothetical | | | | |
| | | | | 42.6 kDa protein). | | | | |
| HTXFL30 | 620001 | 599 | WUblastx.64 | (Q96KR5) | Q96KR5 | 98% | 305 | 1990 |
| | | | | Leishmanolysin-like | | 100% | 30 | 68 |
| | | | | peptidase, variant 2 (EC | | 100% | 213 | 299 |
| | | | | 3.4.24.36). | | 100% | 68 | 94 |
| HTXKF95 | 891275 | 600 | WUblastx.64 | (AAH08360) Similar to | AAH08360 | 84% | 324 | 644 |
| | | | | hypothetical protein | | 92% | 81 | 203 |
| | | | | FLJ22376 | | | | |
| HTXKF95 | 834438 | 923 | WUblastx.64 | (AAH08360) Similar to | AAH08360 | 100% | 2 | 553 |
| | | | | hypothetical protein | | | | |
| | | | | FLJ22376 | | | | |
| HTXKP61 | 824083 | 601 | WUblastx.64 | (Q9H0S8) | Q9H0S8 | 83% | 3 | 1064 |
| | | | | HYPOTHETICAL 53.0 KDA | | | | |
| | | | | PROTEIN. | | | | |
| HUDBZ89 | 1352211 | 602 | WUblastx.64 | (Q9VH80) CG16908 | Q9VH80 | 23% | 271 | 1530 |
| | | | | PROTEIN. | | | | |
| HUDBZ89 | 562791 | 924 | WUblastx.64 | (Q9VH80) CG16908 | Q9VH80 | 22% | 7 | 327 |
| | | | | PROTEIN. | | 33% | 330 | 641 |
| HUFEF62 | 645101 | 604 | WUblastx.64 | hypothetical L1 protein | pir\|JU0033\|JU0033 | 81% | 355 | 308 |
| | | | | (third intron of gene TS) - | | 84% | 314 | 12 |
| | | | | human | | | | |
| HUFEF62 | 630097 | 926 | WUblastx.64 | hypothetical L1 protein | pir\|JU0033\|JU0033 | 81% | 347 | 300 |
| | | | | (third intron of gene TS) - | | 84% | 306 | 4 |
| | | | | human | | | | |
| HUKAH51 | 1352424 | 605 | WUblastx.64 | (Q96NZ9) Proline-rich | Q96NZ9 | 100% | 286 | 738 |
| | | | | acidic protein. | | | | |
| HUKAH51 | 1300737 | 927 | WUblastx.64 | (Q96NZ9) Proline-rich | Q96NZ9 | 94% | 144 | 569 |
| | | | | acidic protein. | | | | |
| HUKAH51 | 603538 | 928 | WUblastx.64 | (Q96NZ9) Proline-rich | Q96NZ9 | 100% | 462 | 479 |
| | | | | acidic protein. | | 93% | 55 | 462 |
| HUKBT29 | 694590 | 606 | WUblastx.64 | (Q96AA2) Obscurin. | Q96AA2 | 82% | 131 | 1300 |
| | | | | | | 30% | 520 | 597 |
| | | | | | | 33% | 500 | 571 |
| | | | | | | 29% | 152 | 370 |
| | | | | | | 100% | 1039 | 1338 |
| | | | | | | 34% | 597 | 710 |
| | | | | | | 28% | 134 | 316 |
| HUSIG64 | 566762 | 607 | WUblastx.64 | (O60763) GENERAL | VDP_HUMAN | 100% | 9 | 977 |
| | | | | VESICULAR | | | | |
| | | | | TRANSPORT FACTOR | | | | |
| | | | | P115 (TRANSCYTO | | | | |
| HUSXS50 | 1352367 | 608 | WUblastx.64 | (Q9Y311) F-BOX ONLY | FBX7_HUMAN | 100% | 280 | 1845 |
| | | | | PROTEIN 7. | | | | |
| HUSXS50 | 883176 | 929 | WUblastx.64 | (AAH08361) F-box only | AAH08361 | 99% | 281 | 1069 |
| | | | | protein 7. | | 42% | 1566 | 1622 |
| | | | | | | 100% | 1067 | 1666 |
| HUSXS50 | 655372 | 930 | WUblastx.64 | (AAH08361) F-box only | AAH08361 | 77% | 1 | 459 |
| | | | | protein 7. | | 26% | 43 | 219 |
| | | | | | | 100% | 317 | 700 |
| HVARW53 | 1194812 | 609 | WUblastx.64 | (Q9V6L4) CG12251 | Q9V6L4 | 38% | 623 | 748 |
| | | | | PROTEIN. | | 24% | 87 | 620 |
| HVARW53 | 1044491 | 931 | WUblastx.64 | (Q9V6L4) CG12251 | Q9V6L4 | 40% | 569 | 673 |
| | | | | PROTEIN. | | 25% | 72 | 581 |
| HWAAD63 | 838626 | 610 | HMMER | PFAM: Sodium/calcium | PF01699 | 62.8 | 346 | 453 |
| | | | 2.1.1 | exchanger protein | | | | |
| | | | WUblastx.64 | (Q9HC58) | Q9HC58 | 65% | 229 | 813 |
| | | | | SODIUM/CALCIUM | | | | |
| | | | | EXCHANGER NCKX3. | | | | |
| HWAAD63 | 833089 | 932 | HMMER | PFAM: Sodium/calcium | PF01699 | 37.8 | 346 | 453 |
| | | | 2.1.1 | exchanger protein | | | | |
| | | | WUblastx.64 | (Q9HC58) | Q9HC58 | 78% | 229 | 453 |
| | | | | SODIUM/CALCIUM | | 55% | 429 | 596 |
| | | | | EXCHANGER NCKX3. | | 72% | 533 | 814 |
| HWAAD63 | 793875 | 933 | HMMER | PFAM: Sodium/calcium | PF01699 | 113.7 | 336 | 773 |
| | | | 2.1.1 | exchanger protein | | | | |
| | | | WUblastx.64 | (Q9HC58) | Q9HC58 | 76% | 219 | 806 |
| | | | | SODIUM/CALCIUM | | | | |
| | | | | EXCHANGER NCKX3. | | | | |
| HWABY10 | 768334 | 612 | WUblastx.64 | (Q96AW1) Hypothetical | Q96AW1 | 100% | 165 | 665 |
| | | | | 19.2 kDa protein. | | | | |
| HWBAO62 | 838164 | 614 | HMMER | PFAM: Immunoglobulin | PF00047 | 27.9 | 202 | 402 |
| | | | 2.1.1 | domain | | | | |
| | | | WUblastx.64 | (Q14288) | Q14288 | 45% | 1331 | 1618 |
| | | | | HYPOTHETICAL | | 66% | 1158 | 1334 |
| | | | | PROTEIN | | 62% | 1847 | 1894 |
| | | | | (FRAGMENT). | | 55% | 1594 | 1839 |
| HWBAO62 | 625914 | 934 | WUblastx.64 | (Q14288) | Q14288 | 43% | 1358 | 1645 |
| | | | | HYPOTHETICAL | | 62% | 1874 | 1921 |
| | | | | PROTEIN | | 66% | 1185 | 1361 |
| | | | | (FRAGMENT). | | 55% | 1621 | 1866 |
| HWBAR88 | 836469 | 615 | WUblastx.64 | (Q9Y2C2) | Q9Y2C2 | 96% | 215 | 982 |
| | | | | DERMATAN/CHONDROITIN | | 100% | 107 | 241 |
| | | | | SULFATE 2- | | 83% | 958 | 1050 |
| | | | | SULFOTRANSFERASE. | | | | |
| HWBCB89 | 1093347 | 616 | WUblastx.64 | (BAB55294) CDNA | BAB55294 | 100% | 37 | 597 |
| | | | | FLJ14777 fis, clone | | | | |
| | | | | NT2RP4000259, w | | | | |
| HWBCB89 | 886210 | 935 | HMMER | PFAM: Glutathione | PF00255 | 170.2 | 104 | 433 |
| | | | 2.1.1 | peroxidases | | | | |
| | | | WUblastx.64 | (BAB55294) CDNA | BAB55294 | 100% | 35 | 595 |
| | | | | FLJ14777 fis, clone | | | | |
| | | | | NT2RP4000259, w | | | | |
| HWBCP79 | 846382 | 617 | WUblastx.64 | (Q96MM0) CDNA | Q96MM0 | 27% | 340 | 143 |
| | | | | FLJ32172 fis, clone | | 85% | 158 | 78 |
| | | | | PLACE6000555. | | | | |
| HWBCP79 | 646977 | 936 | WUblastx.64 | (Q96MM0) CDNA | Q96MM0 | 27% | 330 | 133 |
| | | | | FLJ32172 fis, clone | | 85% | 148 | 68 |
| | | | | PLACE6000555. | | | | |
| HWBDP28 | 1352265 | 618 | WUblastx.64 | (Q9H687) CDNA: | Q9H687 | 99% | 480 | 1079 |
| | | | | FLJ22494 FIS, CLONE | | | | |
| | | | | HRC11131. | | | | |
| HWBFE57 | 907063 | 619 | WUblastx.64 | (Q9NR73) | Q9NR73 | 93% | 206 | 1048 |
| | | | | MACROPHAGE ABC | | | | |
| | | | | TRANSPORTER. | | | | |
| HWBFE57 | 907067 | 938 | WUblastx.64 | (Q96S58) ABCA-SSN. | Q96S58 | 99% | 2784 | 196 |
| | | | | | | 50% | 952 | 905 |
| | | | | | | 97% | 5801 | 5133 |
| | | | | | | 29% | 4499 | 4134 |
| | | | | | | 47% | 4550 | 4500 |
| | | | | | | 29% | 528 | 109 |
| | | | | | | 29% | 3727 | 3587 |
| | | | | | | 29% | 5062 | 4907 |
| | | | | | | 37% | 4123 | 3362 |
| | | | | | | 32% | 3274 | 3038 |
| | | | | | | 37% | 1293 | 532 |
| | | | | | | 36% | 2152 | 2003 |
| | | | | | | 52% | 5014 | 4964 |
| | | | | | | 31% | 254 | 123 |
| | | | | | | 29% | 5233 | 5132 |
| | | | | | | 20% | 4881 | 4561 |
| | | | | | | 94% | 4462 | 2783 |
| | | | | | | 97% | 5169 | 4423 |
| | | | | | | 20% | 2049 | 1708 |
| HWBFE57 | 876136 | 939 | WUblastx.64 | (Q14287) | Q14287 | 58% | 252 | 13 |
| | | | | HYPOTHETICAL | | | | |
| | | | | PROTEIN | | | | |
| | | | | (FRAGMENT). | | | | |
| HWDAH38 | 1028519 | 621 | WUblastx.64 | (Q9NX85) CDNA | Q9NX85 | 71% | 943 | 1119 |
| | | | | FLJ20378 FIS, CLONE | | 69% | 1113 | 1250 |
| | | | | KAIA0536. | | 48% | 1600 | 1340 |
| HWDAH38 | 889281 | 941 | WUblastx.64 | (Q64150) NUCLEAR | Q64150 | 60% | 795 | 673 |
| | | | | LOCALIZATION | | | | |
| | | | | SIGNAL BINDING | | | | |
| | | | | PROTEIN. | | | | |
| HWHGP71 | 995431 | 622 | HMMER | PFAM: 7 transmembrane | PF00001 | 31.2 | 389 | 766 |
| | | | 2.1.1 | receptor (rhodopsin | | | | |
| | | | | family) | | | | |
| | | | WUblastx.64 | leukotriene B4 receptor 2, | pir\|JC7356\|JC7356 | 56% | 766 | 1020 |
| | | | | BLTR2 - human | | 47% | 434 | 484 |
| | | | | | | 74% | 101 | 766 |
| HWHGP71 | 839250 | 942 | blastx.2 | (AJ278605) leukotriene | emb\|CAB96134.1 \| | 77% | 106 | 465 |
| | | | | B4 receptor 2 [Homo | | 100% | 555 | 770 |
| | | | | sapiens] | | 58% | 776 | 1036 |
| HWHGQ49 | 1352257 | 623 | WUblastx.64 | (AAH25278) Androgen | AAH25278 | 100% | 26 | 706 |
| | | | | induced protein. | | | | |
| HWHGQ49 | 636080 | 943 | WUblastx.64 | (AAH25278) Androgen | AAH25278 | 93% | 42 | 725 |
| | | | | induced protein. | | | | |
| HWHGU54 | 695695 | 624 | HMMER | PFAM: Serpins (serine | PF00079 | 501.1 | 277 | 1377 |
| | | | 2.1.1 | protease inhibitors) | | | | |
| | | | WUblastx.64 | (AAL99574) OL-64 | AAL99574 | 62% | 145 | 1377 |
| | | | | protein. | | | | |
| HWHGZ51 | 886212 | 625 | WUblastx.64 | (Q9UJ74) | Q9UJ74 | 100% | 33 | 1070 |
| | | | | HYPOTHETICAL 36.0 | | | | |
| | | | | KDA PROTEIN (C4.4A | | | | |
| | | | | PROTEIN). | | | | |
| HWHHL34 | 805642 | 626 | WUblastx.64 | (O75915) JWA PROTEIN | O75915 | 100% | 131 | 694 |
| | | | | (HSPC127) (VITAMIN A | | | | |
| | | | | RESPONSIVE, | | | | |
| | | | | CYTOSKELETON RE | | | | |
| HWHHL34 | 801943 | 944 | WUblastx.64 | (O75915) JWA PROTEIN | O75915 | 92% | 53 | 613 |
| | | | | (HSPC127) (VITAMIN A | | | | |
| | | | | RESPONSIVE, | | | | |
| | | | | CYTOSKELETON RE | | | | |
| HWHHL34 | 341560 | 945 | WUblastx.64 | (O75915) JWA PROTEIN | O75915 | 100% | 101 | 664 |
| | | | | (HSPC127) (VITAMIN A | | | | |
| | | | | RESPONSIVE, | | | | |
| | | | | CYTOSKELETON RE | | | | |
| HWLEV32 | 1032602 | 627 | WUblastx.64 | (O00378) PUTATIVE | O00378 | 44% | 684 | 535 |
| | | | | P150. | | 38% | 556 | 17 |
| HWLEV32 | 873296 | 946 | WUblastx.64 | retrovirus-related reverse | pir\|A25313\| | 50% | 614 | 525 |
| | | | | transcriptase pseudogene - | GNHUL1 | 40% | 510 | 7 |
| | | | | human | | | | |
| HWLEV32 | 881710 | 947 | WUblastx.64 | (BAB85074) CDNA | BAB85074 | 97% | 61 | 396 |
| | | | | FLJ23835 fis, clone | | | | |
| | | | | KAIA2214. | | | | |
| HWLEV32 | 846351 | 948 | WUblastx.64 | (BAB85074) CDNA | BAB85074 | 99% | 2 | 409 |
| | | | | FLJ23835 fis, clone | | | | |
| | | | | KAIA2214. | | | | |
| HWLIH65 | 793713 | 628 | HMMER | PFAM: Integral | PF01940 | 49.3 | 147 | 455 |
| | | | 2.1.1 | membrane protein | | | | |
| | | | WUblastx.64 | (AAH08596) Unknown | AAH08596 | 98% | 81 | 623 |
| | | | | (protein for MGC: 16985). | | | | |
| HYAAJ71 | 826754 | 630 | WUblastx.64 | (Q9NX17) CDNA | Q9NX17 | 62% | 1147 | 1464 |
| | | | | FLJ20489 FIS, CLONE | | | | |
| | | | | KAT08285. | | | | |
| HUSBA88 | 895435 | 631 | HMMER | PFAM: Glycosyl | PF01532 | 694 | 783 | 2102 |
| | | | 2.1.1 | hydrolase family 47 | | | | |
| | | | WUblastx.64 | (Q9UKM7) ALPHA 1,2- | Q9UKM7 | 94% | 18 | 2114 |
| | | | | MANNOSIDASE. | | | | |

[0133] RACE Protocol for Recovery of Full-Length Genes

[0134] Partial cDNA clones can be made full-length by utilizing the rapid amplification of cDNA ends (RACE) procedure described in Frohman, M. A., et al., Proc. Nat'l. Acad. Sci. USA, 85:8998-9002 (1988). A cDNA clone missing either the 5′ or 3′ end can be reconstructed to include the absent base pairs extending to the translational start or stop codon, respectively. In some cases, cDNAs are missing the start codon of translation, therefor. The following briefly describes a modification of this original 5′ RACE procedure. Poly A+ or total RNA is reverse transcribed with Superscript II (Gibco/BRL) and an antisense or complementary primer specific to the cDNA sequence. The primer is removed from the reaction with a Microcon Concentrator (Amicon). The first-strand cDNA is then tailed with dATP and terminal deoxynucleotide transferase (Gibco/BRL). Thus, an anchor sequence is produced which is needed for PCR amplification. The second strand is synthesized from the dA-tail in PCR buffer, Taq DNA polymerase (Perkin-Elmer Cetus), an oligo-dT primer containing three adjacent restriction sites (XhoI, SalI and ClaI) at the 5′ end and a primer containing just these restriction sites. This double-stranded cDNA is PCR amplified for 40 cycles with the same primers as well as a nested cDNA-specific antisense primer. The PCR products are size-separated on an ethidium bromide-agarose gel and the region of gel containing cDNA products the predicted size of missing protein-coding DNA is removed. cDNA is purified from the agarose with the Magic PCR Prep kit (Promega), restriction digested with XhoI or SalI, and ligated to a plasmid such as pBluescript SKII (Stratagene) at XhoI and EcoRV sites. This DNA is transformed into bacteria and the plasmid clones sequenced to identify the correct protein-coding inserts. Correct 5′ ends are confirmed by comparing this sequence with the putatively identified homologue and overlap with the partial cDNA clone. Similar methods known in the art and/or commercial kits are used to amplify and recover 3′ ends.

[0135] Several quality-controlled kits are commercially available for purchase. Similar reagents and methods to those above are supplied in kit form from Gibco/BRL for both 5′ and 3′ RACE for recovery of full length genes. A second kit is available from Clontech which is a modification of a related technique, SLIC (single-stranded ligation to single-stranded cDNA), developed by Dumas et al., Nucleic Acids Res., 19:5227-32 (1991). The major differences in procedure are that the RNA is alkaline hydrolyzed after reverse transcription and RNA ligase is used to join a restriction site-containing anchor primer to the first-strand cDNA. This obviates the necessity for the dA-tailing reaction which results in a polyT stretch that is difficult to sequence past.

[0136] An alternative to generating 5′ or 3′ cDNA from RNA is to use cDNA library double-stranded DNA. An asymmetric PCR-amplified antisense cDNA strand is synthesized with an antisense cDNA-specific primer and a plasmid-anchored primer. These primers are removed and a symmetric PCR reaction is performed with a nested cDNA-specific antisense primer and the plasmid-anchored primer.

[0137] RNA Ligase Protocol for Generating the 5′ or 3′ End Sequences to Obtain Full Length Genes

[0138] Once a gene of interest is identified, several methods are available for the identification of the 5′ or 3′ portions of the gene which may not be present in the original cDNA plasmid. These methods include, but are not limited to, filter probing, clone enrichment using specific probes and protocols similar and identical to 5′ and 3′ RACE. While the full length gene may be present in the library and can be identified by probing, a useful method for generating the 5′ or 3′ end is to use the existing sequence information from the original cDNA to generate the missing information. A method similar to 5′ RACE is available for generating the missing 5′ end of a desired full-length gene. (This method was published by Fromont-Racine et al., Nucleic Acids Res., 21(7):1683-1684 (1993)). Briefly, a specific RNA oligonucleotide is ligated to the 5′ ends of a population of RNA presumably containing full-length gene RNA transcript and a primer set containing a primer specific to the ligated RNA oligonucleotide and a primer specific to a known sequence of the gene of interest, is used to PCR amplify the 5′ portion of the desired full length gene which may then be sequenced and used to generate the full length gene. This method starts with total RNA isolated from the desired source, poly A RNA may be used but is not a prerequisite for this procedure. The RNA preparation may then be treated with phosphatase if necessary to eliminate 5′ phosphate groups on degraded or damaged RNA which may interfere with the later RNA ligase step. The phosphatase if used is then inactivated and the RNA is treated with tobacco acid pyrophosphatase in order to remove the cap structure present at the 5′ ends of messenger RNAs. This reaction leaves a 5′ phosphate group at the 5′ end of the cap cleaved RNA which can then be ligated to an RNA oligonucleotide using T4 RNA ligase. This modified RNA preparation can then be used as a template for first strand cDNA synthesis using a gene specific oligonucleotide. The first strand synthesis reaction can then be used as a template for PCR amplification of the desired 5′ end using a primer specific to the ligated RNA oligonucleotide and a primer specific to the known sequence of the gene of interest. The resultant product is then sequenced and analyzed to confirm that the 5′ end sequence belongs to the relevant gene.

[0139] The present invention also relates to vectors or plasmids which include such DNA sequences, as well as the use of the DNA sequences. The material deposited with the ATCC (e.g., as described in columns 2 and 3 of Table 1A, and/or as set forth in Table 1B, Table 6, or Table 7) is a mixture of cDNA clones derived from a variety of human tissue and cloned in either a plasmid vector or a phage vector, as described, for example, in Table 1A and Table 7. These deposits are referred to as “the deposits” herein. The tissues from which some of the clones were derived are listed in Table 7, and the vector in which the corresponding cDNA is contained is also indicated in Table 7. The deposited material includes cDNA clones corresponding to SEQ ID NO:X described, for example, in Table 1A and/or Table 1B (ATCC Deposit No:Z). A clone which is isolatable from the ATCC Deposits by use of a sequence listed as SEQ ID NO:X, may include the entire coding region of a human gene or in other cases such clone may include a substantial portion of the coding region of a human gene. Furthermore, although the sequence listing may in some instances list only a portion of the DNA sequence in a clone included in the ATCC Deposits, it is well within the ability of one skilled in the art to sequence the DNA included in a clone contained in the ATCC Deposits by use of a sequence (or portion thereof) described in, for example Tables 1A and/or Table 1B or Table 2, by procedures hereinafter further described, and others apparent to those skilled in the art.

[0140] Also provided in Table 1A and Table 7 is the name of the vector which contains the cDNA clone. Each vector is routinely used in the art. The following additional information is provided for convenience.

[0141] Vectors Lambda Zap (U.S. Pat. Nos. 5,128,256 and 5,286,636), Uni-Zap XR (U.S. Pat. Nos. 5,128,256 and 5,286,636), Zap Express (U.S. Pat. Nos. 5,128,256 and 5,286,636), pBluescript (pBS) (Short, J. M. et al., Nucleic Acids Res. 16:7583-7600 (1988); Alting-Mees, M. A. and Short, J. M., Nucleic Acids Res. 17:9494 (1989)) and pBK (Alting-Mees, M. A. et al., Strategies 5:58-61 (1992)) are commercially available from Stratagene Cloning Systems, Inc., 11011 N. Torrey Pines Road, La Jolla, Calif., 92037. pBS contains an ampicillin resistance gene and pBK contains a neomycin resistance gene. Phagemid pBS may be excised from the Lambda Zap and Uni-Zap XR vectors, and phagemid pBK may be excised from the Zap Express vector. Both phagemids may be transformed into E. coli strain XL-1 Blue, also available from Stratagene.

[0142] Vectors pSport1, pCMVSport 1.0, pCMVSport 2.0 and pCMVSport 3.0, were obtained from Life Technologies, Inc., P.O. Box 6009, Gaithersburg, Md. 20897. All Sport vectors contain an ampicillin resistance gene and may be transformed into E. coli strain DH10B, also available from Life Technologies. See, for instance, Gruber, C. E., et al., Focus 15:59-(1993). Vector lafmid BA (Bento Soares, Columbia University, New York, N.Y.) contains an ampicillin resistance gene and can be transformed into E. coli strain XL-1 Blue. Vector pCR®2.1, which is available from Invitrogen, 1600 Faraday Avenue, Carlsbad, Calif. 92008, contains an ampicillin resistance gene and may be transformed into E. coli strain DH10B, available from Life Technologies. See, for instance, Clark, J. M., Nuc. Acids Res. 16:9677-9686 (1988) and Mead, D. et al., Bio/Technology 9: (1991).

[0143] The present invention also relates to the genes corresponding to SEQ ID NO:X, SEQ ID NO:Y, and/or the deposited clone (ATCC Deposit No:Z). The corresponding gene can be isolated in accordance with known methods using the sequence information disclosed herein. Such methods include preparing probes or primers from the disclosed sequence and identifying or amplifying the corresponding gene from appropriate sources of genomic material.

[0144] Also provided in the present invention are allelic variants, orthologs, and/or species homologs. Procedures known in the art can be used to obtain full-length genes, allelic variants, splice variants, full-length coding portions, orthologs, and/or species homologs of genes corresponding to SEQ ID NO:X or the complement thereof, polypeptides encoded by genes corresponding to SEQ ID NO:X or the complement thereof, and/or the cDNA contained in ATCC Deposit No:Z, using information from the sequences disclosed herein or the clones deposited with the ATCC. For example, allelic variants and/or species homologs may be isolated and identified by making suitable probes or primers from the sequences provided herein and screening a suitable nucleic acid source for allelic variants and/or the desired homologue.

[0145] The polypeptides of the invention can be prepared in any suitable manner. Such polypeptides include isolated naturally occurring polypeptides, recombinantly produced polypeptides, synthetically produced polypeptides, or polypeptides produced by a combination of these methods. Means for preparing such polypeptides are well understood in the art.

[0146] The polypeptides may be in the form of the secreted protein, including the mature form, or may be a part of a larger protein, such as a fusion protein (see below). It is often advantageous to include an additional amino acid sequence which contains secretory or leader sequences, pro-sequences, sequences which aid in purification, such as multiple histidine residues, or an additional sequence for stability during recombinant production.

[0147] The polypeptides of the present invention are preferably provided in an isolated form, and preferably are substantially purified. A recombinantly produced version of a polypeptide, including the secreted polypeptide, can be substantially purified using techniques described herein or otherwise known in the art, such as, for example, by the one-step method described in Smith and Johnson, Gene 67:31-40 (1988). Polypeptides of the invention also can be purified from natural, synthetic or recombinant sources using techniques described herein or otherwise known in the art, such as, for example, antibodies of the invention raised against the polypeptides of the present invention in methods which are well known in the art.

[0148] The present invention provides a polynucleotide comprising, or alternatively consisting of, the nucleic acid sequence of SEQ ID NO:X, and/or the cDNA sequence contained in ATCC Deposit No:Z. The present invention also provides a polypeptide comprising, or alternatively, consisting of, the polypeptide sequence of SEQ ID NO:Y, a polypeptide encoded by SEQ ID NO:X or a complement thereof, a polypeptide encoded by the cDNA contained in ATCC Deposit No:Z, and/or the polypeptide sequence encoded by a nucleotide sequence in SEQ ID NO:B as defined in column 6 of Table 1C. Polynucleotides encoding a polypeptide comprising, or alternatively consisting of the polypeptide sequence of SEQ ID NO:Y, a polypeptide encoded by SEQ ID NO:X, a polypeptide encoded by the cDNA contained in ATCC Deposit No:Z, and/or a polypeptide sequence encoded by a nucleotide sequence in SEQ ID NO:B as defined in column 6 of Table 1C are also encompassed by the invention. The present invention further encompasses a polynucleotide comprising, or alternatively consisting of, the complement of the nucleic acid sequence of SEQ ID NO:X, a nucleic acid sequence encoding a polypeptide encoded by the complement of the nucleic acid sequence of SEQ ID NO:X, and/or the cDNA contained in ATCC Deposit No:Z.

[0149] Moreover, representative examples of polynucleotides of the invention comprise, or alternatively consist of, one, two, three, four, five, six, seven, eight, nine, ten, or more of the sequences delineated in Table 1C column 6, or any combination thereof. Additional, representative examples of polynucleotides of the invention comprise, or alternatively consist of, one, two, three, four, five, six, seven, eight, nine, ten, or more of the complementary strand(s) of the sequences delineated in Table 1C column 6, or any combination thereof. In further embodiments, the above-described polynucleotides of the invention comprise, or alternatively consist of, sequences delineated in Table 1C, column 6, and have a nucleic acid sequence which is different from that of the BAC fragment having the sequence disclosed in SEQ ID NO:B (see Table 1C, column 5). In additional embodiments, the above-described polynucleotides of the invention comprise, or alternatively consist of, sequences delineated in Table 1C, column 6, and have a nucleic acid sequence which is different from that published for the BAC clone identified as BAC ID NO:A (see Table 1C, column 4). In additional embodiments, the above-described polynucleotides of the invention comprise, or alternatively consist of, sequences delineated in Table 1C, column 6, and have a nucleic acid sequence which is different from that contained in the BAC clone identified as BAC ID NO:A (see Table 1C, column 4). Polypeptides encoded by these polynucleotides, other polynucleotides that encode these polypeptides, and antibodies that bind these polypeptides are also encompassed by the invention. Additionally, fragments and variants of the above-described polynucleotides and polypeptides are also encompassed by the invention.

[0150] Further, representative examples of polynucleotides of the invention comprise, or alternatively consist of, one, two, three, four, five, six, seven, eight, nine, ten, or more of the sequences delineated in column 6 of Table 1C which correspond to the same Clone ID (see Table 1C, column 1), or any combination thereof. Additional, representative examples of polynucleotides of the invention comprise, or alternatively consist of, one, two, three, four, five, six, seven, eight, nine, ten, or more of the complementary strand(s) of the sequences delineated in column 6 of Table 1C which correspond to the same Clone ID (see Table 1C, column 1), or any combination thereof. In further embodiments, the above-described polynucleotides of the invention comprise, or alternatively consist of, sequences delineated in column 6 of Table 1C which correspond to the same Clone ID (see Table 1C, column 1) and have a nucleic acid sequence which is different from that of the BAC fragment having the sequence disclosed in SEQ ID NO:B (see Table 1C, column 5). In additional embodiments, the above-described polynucleotides of the invention comprise, or alternatively consist of, sequences delineated in column 6 of Table 1C which correspond to the same Clone ID (see Table 1C, column 1) and have a nucleic acid sequence which is different from that published for the BAC clone identified as BAC ID NO:A (see Table 1C, column 4). In additional embodiments, the above-described polynucleotides of the invention comprise, or alternatively consist of, sequences delineated in column 6 of Table 1C which correspond to the same Clone ID (see Table 1C, column 1) and have a nucleic acid sequence which is different from that contained in the BAC clone identified as BAC ID NO:A (see Table 1C, column 4). Polypeptides encoded by these polynucleotides, other polynucleotides that encode these polypeptides, and antibodies that bind these polypeptides are also encompassed by the invention. Additionally, fragments and variants of the above-described polynucleotides and polypeptides are also encompassed by the invention.

[0151] Further, representative examples of polynucleotides of the invention comprise, or alternatively consist of, one, two, three, four, five, six, seven, eight, nine, ten, or more of the sequences delineated in column 6 of Table 1C which correspond to the same contig sequence identifier SEQ ID NO:X (see Table 1C, column 2), or any combination thereof. Additional, representative examples of polynucleotides of the invention comprise, or alternatively consist of, one, two, three, four, five, six, seven, eight, nine, ten, or more of the complementary strand(s) of the sequences delineated in column 6 of Table 1C which correspond to the same contig sequence identifier SEQ ID NO:X (see Table 1C, column 2), or any combination thereof. In further embodiments, the above-described polynucleotides of the invention comprise, or alternatively consist of, sequences delineated in column 6 of Table 1C which correspond to the same contig sequence identifier SEQ ID NO:X (see Table 1C, column 2) and have a nucleic acid sequence which is different from that of the BAC fragment having the sequence disclosed in SEQ ID NO:B (see Table 1C, column 5). In additional embodiments, the above-described polynucleotides of the invention comprise, or alternatively consist of, sequences delineated in column 6 of Table 1C which correspond to the same contig sequence identifier SEQ ID NO:X (see Table 1C, column 2) and have a nucleic acid sequence which is different from that published for the BAC clone identified as BAC ID NO:A (see Table 1C, column 4). In additional embodiments, the above-described polynucleotides of the invention comprise, or alternatively consist of, sequences delineated in column 6 of Table 1C which correspond to the same contig sequence identifier SEQ ID NO:X (see Table 1C, column 2) and have a nucleic acid sequence which is different from that contained in the BAC clone identified as BAC ID NO:A (See Table 1C, column 4). Polypeptides encoded by these polynucleotides, other polynucleotides that encode these polypeptides, and antibodies that bind these polypeptides are also encompassed by the invention. Additionally, fragments and variants of the above-described polynucleotides and polypeptides are also encompassed by the invention.

[0152] Moreover, representative examples of polynucleotides of the invention comprise, or alternatively consist of, one, two, three, four, five, six, seven, eight, nine, ten, or more of the sequences delineated in the same row of Table 1C column 6, or any combination thereof. Additional, representative examples of polynucleotides of the invention comprise, or alternatively consist of, one, two, three, four, five, six, seven, eight, nine, ten, or more of the complementary strand(s) of the sequences delineated in the same row of Table 1C column 6, or any combination thereof. In preferred embodiments, the polynucleotides of the invention comprise, or alternatively consist of, one, two, three, four, five, six, seven, eight, nine, ten, or more of the complementary strand(s) of the sequences delineated in the same row of Table 1C column 6, wherein sequentially delineated sequences in the table (i.e. corresponding to those exons located closest to each other) are directly contiguous in a 5′ to 3′ orientation. In further embodiments, above-described polynucleotides of the invention comprise, or alternatively consist of, sequences delineated in the same row of Table 1C, column 6, and have a nucleic acid sequence which is different from that of the BAC fragment having the sequence disclosed in SEQ ID NO:B (see Table 1C, column 5). In additional embodiments, the above-described polynucleotides of the invention comprise, or alternatively consist of, sequences delineated in the same row of Table 1C, column 6, and have a nucleic acid sequence which is different from that published for the BAC clone identified as BAC ID NO:A (see Table 1C, column 4). In additional embodiments, the above-described polynucleotides of the invention comprise, or alternatively consist of, sequences delineated in the same row of Table 1C, column 6, and have a nucleic acid sequence which is different from that contained in the BAC clone identified as BAC ID NO:A (see Table 1C, column 4). Polypeptides encoded by these polynucleotides, other polynucleotides that encode these polypeptides, and antibodies that bind these polypeptides are also encompassed by the invention.

[0153] In additional specific embodiments, polynucleotides of the invention comprise, or alternatively consist of, one, two, three, four, five, six, seven, eight, nine, ten, or more of the sequences delineated in column 6 of Table 1C, and the polynucleotide sequence of SEQ ID NO:X (e.g., as defined in Table 1C, column 2) or fragments or variants thereof. Polypeptides encoded by these polynucleotides, other polynucleotides that encode these polypeptides, and antibodies that bind these polypeptides are also encompassed by the invention.

[0154] In additional specific embodiments, polynucleotides of the invention comprise, or alternatively consist of, one, two, three, four, five, six, seven, eight, nine, ten, or more of the sequences delineated in column 6 of Table 1C which correspond to the same Clone ID (see Table 1C, column 1), and the polynucleotide sequence of SEQ ID NO:X (e.g., as defined in Table 1A, Table 1B, or Table 1C) or fragments or variants thereof. In preferred embodiments, the delineated sequence(s) and polynucleotide sequence of SEQ ID NO:X correspond to the same Clone ID. Polypeptides encoded by these polynucleotides, other polynucleotides that encode these polypeptides, and antibodies that bind these polypeptides are also encompassed by the invention.

[0155] In further specific embodiments, polynucleotides of the invention comprise, or alternatively consist of, one, two, three, four, five, six, seven, eight, nine, ten, or more of the sequences delineated in the same row of column 6 of Table 1C, and the polynucleotide sequence of SEQ ID NO:X (e.g., as defined in Table 1A, Table 1B, or Table 1C) or fragments or variants thereof. In preferred embodiments, the delineated sequence(s) and polynucleotide sequence of SEQ ID NO:X correspond to the same row of column 6 of Table 1C. Polypeptides encoded by these polynucleotides, other polynucleotides that encode these polypeptides, and antibodies that bind these polypeptides are also encompassed by the invention.

[0156] In additional specific embodiments, polynucleotides of the invention comprise, or alternatively consist of a polynucleotide sequence in which the 3′ 10 polynucleotides of one of the sequences delineated in column 6 of Table 1C and the 5′ 10 polynucleotides of the sequence of SEQ ID NO:X are directly contiguous. Nucleic acids which hybridize to the complement of these 20 contiguous polynucleotides under stringent hybridization conditions or alternatively, under lower stringency conditions, are also encompassed by the invention. Polypeptides encoded by these polynucleotides and/or nucleic acids, other polynucleotides and/or nucleic acids that encode these polypeptides, and antibodies that bind these polypeptides are also encompassed by the invention. Additionally, fragments and variants of the above-described polynucleotides, nucleic acids, and polypeptides are also encompassed by the invention.

[0157] In additional specific embodiments, polynucleotides of the invention comprise, or alternatively consist of, a polynucleotide sequence in which the 3′ 10 polynucleotides of one of the sequences delineated in column 6 of Table 1C and the 5′ 10 polynucleotides of a fragment or variant of the sequence of SEQ ID NO:X are directly contiguous Nucleic acids which hybridize to the complement of these 20 contiguous polynucleotides under stringent hybridization conditions or alternatively, under lower stringency conditions, are also encompassed by the invention. Polypeptides encoded by these polynucleotides and/or nucleic acids, other polynucleotides and/or nucleic acids encoding these polypeptides, and antibodies that bind these polypeptides are also encompassed by the invention. Additionally, fragments and variants of the above-described polynucleotides, nucleic acids, and polypeptides are also encompassed by the invention.

[0158] In specific embodiments, polynucleotides of the invention comprise, or alternatively consist of, a polynucleotide sequence in which the 3′ 10 polynucleotides of the sequence of SEQ ID NO:X and the 5′ 10 polynucleotides of the sequence of one of the sequences delineated in column 6 of Table 1C are directly contiguous. Nucleic acids which hybridize to the complement of these 20 contiguous polynucleotides under stringent hybridization conditions or alternatively, under lower stringency conditions, are also encompassed by the invention. Polypeptides encoded by these polynucleotides and/or nucleic acids, other polynucleotides and/or nucleic acids encoding these polypeptides, and antibodies that bind these polypeptides are also encompassed by the invention. Additionally, fragments and variants of the above-described polynucleotides, nucleic acids, and polypeptides are also encompassed by the invention.

[0159] In specific embodiments, polynucleotides of the invention comprise, or alternatively consist of, a polynucleotide sequence in which the 3′ 10 polynucleotides of a fragment or variant of the sequence of SEQ ID NO:X and the 5′ 10 polynucleotides of the sequence of one of the sequences delineated in column 6 of Table 1C are directly contiguous. Nucleic acids which hybridize to the complement of these 20 contiguous polynucleotides under stringent hybridization conditions or alternatively, under lower stringency conditions, are also encompassed by the invention. Polypeptides encoded by these polynucleotides and/or nucleic acids, other polynucleotides and/or nucleic acids encoding these polypeptides, and antibodies that bind these polypeptides are also encompassed by the invention. Additionally, fragments and variants of the above-described polynucleotides, nucleic acids, and polypeptides, are also encompassed by the invention.

[0160] In further specific embodiments, polynucleotides of the invention comprise, or alternatively consist of, a polynucleotide sequence in which the 3′ 10 polynucleotides of one of the sequences delineated in column 6 of Table 1C and the 5′ 10 polynucleotides of another sequence in column 6 are directly contiguous. Nucleic acids which hybridize to the complement of these 20 contiguous polynucleotides under stringent hybridization conditions or alternatively, under lower stringency conditions, are also encompassed by the invention. Polypeptides encoded by these polynucleotides and/or nucleic acids, other polynucleotides and/or nucleic acids encoding these polypeptides, and antibodies that bind these polypeptides are also encompassed by the invention. Additionally, fragments and variants of the above-described polynucleotides, nucleic acids, and polypeptides are also encompassed by the invention.

[0161] In specific embodiments, polynucleotides of the invention comprise, or alternatively consist of, a polynucleotide sequence in which the 3′ 10 polynucleotides of one of the sequences delineated in column 6 of Table 1C and the 5′ 10 polynucleotides of another sequence in column 6 corresponding to the same Clone ID (see Table 1C, column 1) are directly contiguous. Nucleic acids which hybridize to the complement of these 20 lower stringency conditions, are also encompassed by the invention. Polypeptides encoded by these polynucleotides and/or nucleic acids, other polynucleotides and/or nucleic acids encoding these polypeptides, and antibodies that bind these polypeptides are also encompassed by the invention. Additionally, fragments and variants of the above-described polynucleotides, nucleic acids, and polypeptides are also encompassed by the invention.

[0162] In specific embodiments, polynucleotides of the invention comprise, or alternatively consist of, a polynucleotide sequence in which the 3′ 10 polynucleotides of one sequence in column 6 corresponding to the same contig sequence identifer SEQ ID NO:X (see Table 1C, column 2) are directly contiguous. Nucleic acids which hybridize to the complement of these 20 contiguous polynucleotides under stringent hybridization conditions or alternatively, under lower stringency conditions, are also encompassed by the invention. Polypeptides encoded by these polynucleotides and/or nucleic acids, other polynucleotides and/or nucleic acids encoding these polypeptides, and antibodies that bind these polypeptides are also encompassed by the invention. Additionally, fragments and variants of the above-described polynucleotides, nucleic acids, and polypeptides are also encompassed by the invention.

[0163] In specific embodiments, polynucleotides of the invention comprise, or alternatively consist of a polynucleotide sequence in which the 3′ 10 polynucleotides of one of the sequences delineated in column 6 of Table 1C and the 5′ 10 polynucleotides of another sequence in column 6 corresponding to the same row are directly contiguous. In preferred embodiments, the 3′ 10 polynucleotides of one of the sequences delineated in column 6 of Table 1C is directly contiguous with the 5′ 10 polynucleotides of the next sequential exon delineated in Table 1C, column 6. Nucleic acids which hybridize to the complement of these 20 contiguous polynucleotides under stringent hybridization conditions or alternatively, under lower stringency conditions, are also encompassed by the invention. Polypeptides encoded by these polynucleotides and/or nucleic acids, other polynucleotides and/or nucleic acids encoding these polypeptides, and antibodies that bind these polypeptides are also encompassed by the invention. Additionally, fragments and variants of the above-described polynucleotides, nucleic acids, and polypeptides are also encompassed by the invention.

[0164] Table 3

[0165] Many polynucleotide sequences, such as EST sequences, are publicly available and accessible through sequence databases and may have been publicly available prior to conception of the present invention. Preferably, such related polynucleotides are specifically excluded from the scope of the present invention. Accordingly, for each contig sequence (SEQ ID NO:X) listed in the fifth column of Table 1A and/or the fourth column of Table 1B, preferably excluded are one or more polynucleotides comprising a nucleotide sequence described by the general formula of a-b, where a is any integer between 1 and the final nucleotide minus 15 of SEQ ID NO:X, b is an integer of 15 to the final nucleotide of SEQ ID NO:X, where both a and b correspond to the positions of nucleotide residues shown in SEQ ID NO:X, and where b is greater than or equal to a +14. More specifically, preferably excluded are one or more polynucleotides comprising a nucleotide sequence described by the general formula of a-b, where a and b are integers as defined in columns 4 and 5, respectively, of Table 3. In specific embodiments, the polynucleotides of the invention do not consist of at least one, two, three, four, five, ten, or more of the specific polynucleotide sequences referenced by the Genbank Accession No. as disclosed in column 6 of Table 3 (including for example, published sequence in connection with a particular BAC clone). In further embodiments, preferably excluded from the invention are the specific polynucleotide sequence(s) contained in the clones corresponding to at least one, two, three, four, five, ten, or more of the available material having the accession numbers identified in the sixth column of this Table (including for example, the actual sequence contained in an identified BAC clone). In no way is this listing meant to encompass all of the sequences which may be excluded by the general formula, it is just a representative example. All references available through these accessions are hereby incorporated by reference in their entirety

LENGTHY TABLE REFERENCED HERE
US20070015696A1-20070118-T00003
Please refer to the end of the specification for access instructions.

[0166] Description of Table 4

[0167] Table 4 provides a key to the tissue/cell source identifier code disclosed in Table 1B.2, column 5. Column 1 of Table 4 provides the tissue/cell source identifier code disclosed in Table 1B.2, Column 5. Columns 2-5 provide a description of the tissue or cell source. Note that “Description” and “Tissue” sources (i.e. columns 2 and 3) having the prefix “a_” indicates organs, tissues, or cells derived from “adult” sources. Codes corresponding to diseased tissues are indicated in column 6 with the word “disease.” The use of the word “disease” in column 6 is non-limiting. The tissue or cell source may be specific (e.g. a neoplasm), or may be disease-associated (e.g., a tissue sample from a normal portion of a diseased organ). Furthermore, tissues and/or cells lacking the “disease” designation may still be derived from sources directly or indirectly involved in a disease state or disorder, and therefore may have a further utility in that disease state or disorder. In numerous cases where the tissue/cell source is a library, column 7 identifies the vector used to generate the library.

TABLE 4

| Code | Description | Tissue | Organ | Cell Line | Disease | Vector |
|---|---|---|---|---|---|---|
| AR022 | a_Heart | a_Heart | | | | |
| AR023 | a_Liver | a_Liver | | | | |
| AR024 | a_mammary gland | a_mammary gland | | | | |
| AR025 | a_Prostate | a_Prostate | | | | |
| AR026 | a_small intestine | a_small intestine | | | | |
| AR027 | a_Stomach | a_Stomach | | | | |
| AR028 | Blood B cells | Blood B cells | | | | |
| AR029 | Blood B cells activated | Blood B cells activated | | | | |
| AR030 | Blood B cells resting | Blood B cells resting | | | | |
| AR031 | Blood T cells activated | Blood T cells activated | | | | |
| AR032 | Blood T cells resting | Blood T cells resting | | | | |
| AR033 | brain | brain | | | | |
| AR034 | breast | breast | | | | |
| AR035 | breast cancer | breast cancer | | | | |
| AR036 | Cell Line CAOV3 | Cell Line CAOV3 | | | | |
| AR037 | cell line PA-1 | cell line PA-1 | | | | |
| AR038 | cell line transformed | cell line transformed | | | | |
| AR039 | colon | colon | | | | |
| AR040 | colon (9808co65R) | colon (9808co65R) | | | | |
| AR041 | colon (9809co15) | colon (9809co15) | | | | |
| AR042 | colon cancer | colon cancer | | | | |
| AR043 | colon cancer | colon cancer (9808co64R) | | | | |
| | (9808co64R) | | | | | |
| AR044 | colon cancer 9809co14 | colon cancer 9809co14 | | | | |
| AR050 | Donor II B Cells 24 hrs | Donor II B Cells 24 hrs | | | | |
| AR051 | Donor II B Cells 72 hrs | Donor II B Cells 72 hrs | | | | |
| AR052 | Donor II B-Cells 24 hrs. | Donor II B-Cells 24 hrs. | | | | |
| AR053 | Donor II B-Cells 72 hrs | Donor II B-Cells 72 hrs | | | | |
| AR054 | Donor II Resting B Cells | Donor II Resting B Cells | | | | |
| AR055 | Heart | Heart | | | | |
| AR056 | Human Lung (clonetech) | Human Lung (clonetech) | | | | |
| AR057 | Human Mammary | Human Mammary | | | | |
| | (clontech) | (clontech) | | | | |
| AR058 | Human Thymus | Human Thymus | | | | |
| | (clonetech) | (clonetech) | | | | |
| AR059 | Jurkat (unstimulated) | Jurkat (unstimulated) | | | | |
| AR060 | Kidney | Kidney | | | | |
| AR061 | Liver | Liver | | | | |
| AR062 | Liver (Clontech) | Liver (Clontech) | | | | |
| AR063 | Lymphocytes chronic | Lymphocytes chronic | | | | |
| | lymphocytic leukaemia | lymphocytic leukaemia | | | | |
| AR064 | Lymphocytes diffuse | Lymphocytes diffuse large | | | | |
| | large B cell lymphoma | B cell lymphoma | | | | |
| AR065 | Lymphocytes follicular | Lymphocytes follicular | | | | |
| | lymphoma | lymphoma | | | | |
| AR066 | normal breast | normal breast | | | | |
| AR067 | Normal Ovarian | Normal Ovarian | | | | |
| | (4004901) | (4004901) | | | | |
| AR068 | Normal Ovary 9508G045 | Normal Ovary 9508G045 | | | | |
| AR069 | Normal Ovary 9701G208 | Normal Ovary 9701G208 | | | | |
| AR070 | Normal Ovary 9806G005 | Normal Ovary 9806G005 | | | | |
| AR071 | Ovarian Cancer | Ovarian Cancer | | | | |
| AR072 | Ovarian Cancer | Ovarian Cancer | | | | |
| | (9702G001) | (9702G001) | | | | |
| AR073 | Ovarian Cancer | Ovarian Cancer | | | | |
| | (9707G029) | (9707G029) | | | | |
| AR074 | Ovarian Cancer | Ovarian Cancer | | | | |
| | (9804G011) | (9804G011) | | | | |
| AR075 | Ovarian Cancer | Ovarian Cancer | | | | |
| | (9806G019) | (9806G019) | | | | |
| AR076 | Ovarian Cancer | Ovarian Cancer | | | | |
| | (9807G017) | (9807G017) | | | | |
| AR077 | Ovarian Cancer | Ovarian Cancer | | | | |
| | (9809G001) | (9809G001) | | | | |
| AR078 | ovarian cancer 15799 | ovarian cancer 15799 | | | | |
| AR079 | Ovarian Cancer | Ovarian Cancer 17717AID | | | | |
| | 17717AID | | | | | |
| AR080 | Ovarian Cancer | Ovarian Cancer | | | | |
| | 4004664B1 | 4004664B1 | | | | |
| AR081 | Ovarian Cancer | Ovarian Cancer | | | | |
| | 4005315A1 | 4005315A1 | | | | |
| AR082 | ovarian cancer 94127303 | ovarian cancer 94127303 | | | | |
| AR083 | Ovarian Cancer | Ovarian Cancer 96069304 | | | | |
| | 96069304 | | | | | |
| AR084 | Ovarian Cancer | Ovarian Cancer 9707G029 | | | | |
| | 9707G029 | | | | | |
| AR085 | Ovarian Cancer | Ovarian Cancer 9807G045 | | | | |
| | 9807G045 | | | | | |
| AR086 | ovarian cancer | ovarian cancer 9809G001 | | | | |
| | 9809G001 | | | | | |
| AR087 | Ovarian Cancer | Ovarian Cancer | | | | |
| | 9905C032RC | 9905C032RC | | | | |
| AR088 | Ovarian cancer 9907 C00 | Ovarian cancer 9907 C00 | | | | |
| | 3rd | 3rd | | | | |
| AR089 | Prostate | Prostate | | | | |
| AR090 | Prostate (clonetech) | Prostate (clonetech) | | | | |
| AR091 | prostate cancer | prostate cancer | | | | |
| AR092 | prostate cancer #15176 | prostate cancer #15176 | | | | |
| AR093 | prostate cancer #15509 | prostate cancer #15509 | | | | |
| AR094 | prostate cancer #15673 | prostate cancer #15673 | | | | |
| AR095 | Small Intestine | Small Intestine (Clontech) | | | | |
| | (Clontech) | | | | | |
| AR096 | Spleen | Spleen | | | | |
| AR097 | Thymus T cells activated | Thymus T cells activated | | | | |
| AR098 | Thymus T cells resting | Thymus T cells resting | | | | |
| AR099 | Tonsil | Tonsil | | | | |
| AR100 | Tonsil geminal center | Tonsil geminal center | | | | |
| | centroblast | centroblast | | | | |
| AR101 | Tonsil germinal center B | Tonsil germinal center B | | | | |
| | cell | cell | | | | |
| AR102 | Tonsil lymph node | Tonsil lymph node | | | | |
| AR103 | Tonsil memory B cell | Tonsil memory B cell | | | | |
| AR104 | Whole Brain | Whole Brain | | | | |
| AR105 | Xenograft ES-2 | Xenograft ES-2 | | | | |
| AR106 | Xenograft SW626 | Xenograft SW626 | | | | |
| AR119 | 001: IL-2 | 001: IL-2 | | | | |
| AR120 | 001: IL-2.1 | 001: IL-2.1 | | | | |
| AR121 | 001: IL-2_b | 001: IL-2_b | | | | |
| AR124 | 002: Monocytes | 002: Monocytes untreated | | | | |
| | untreated (1 hr) | (1 hr) | | | | |
| AR125 | 002: Monocytes | 002: Monocytes untreated | | | | |
| | untreated (5 hrs) | (5 hrs) | | | | |
| AR126 | 002: Control.1C | 002: Control.1C | | | | |
| AR127 | 002: IL2.1C | 002: IL2.1C | | | | |
| AR130 | 003: Placebo-treated Rat | 003: Placebo-treated Rat | | | | |
| | Lacrimal Gland | Lacrimal Gland | | | | |
| AR131 | 003: Placebo-treated Rat | 003: Placebo-treated Rat | | | | |
| | Submandibular Gland | Submandibular Gland | | | | |
| AR135 | 004: Monocytes | 004: Monocytes untreated | | | | |
| | untreated (5 hrs) | (5 hrs) | | | | |
| AR136 | 004: Monocytes | 004: Monocytes untreated | | | | |
| | untreated 1 hr | 1 hr | | | | |
| AR139 | 005: Placebo (48 hrs) | 005: Placebo (48 hrs) | | | | |
| AR140 | 006: pC4 (24 hrs) | 006: pC4 (24 hrs) | | | | |
| AR141 | 006: pC4 (48 hrs) | 006: pC4 (48 hrs) | | | | |
| AR152 | 007: PHA(1 hr) | 007: PHA(1 hr) | | | | |
| AR153 | 007: PHA(6 HRS) | 007: PHA(6 HRS) | | | | |
| AR154 | 007: PMA(6 hrs) | 007: PMA(6 hrs) | | | | |
| AR155 | 008: 1449_#2 | 008: 1449_#2 | | | | |
| AR161 | 01: A - max 24 | 01: A - max 24 | | | | |
| AR162 | 01: A - max 26 | 01: A - max 26 | | | | |
| AR163 | 01: A - max 30 | 01: A - max 30 | | | | |
| AR164 | 01: B - max 24 | 01: B - max 24 | | | | |
| AR165 | 01: B - max 26 | 01: B - max 26 | | | | |
| AR166 | 01: B - max 30 | 01: B - max 30 | | | | |
| AR167 | 1449 Sample | 1449 Sample | | | | |
| AR168 | 3T3P10 1.0 uM insulin | 3T3P10 1.0 uM insulin | | | | |
| AR169 | 3T3P10 10 nM Insulin | 3T3P10 10 nM Insulin | | | | |
| AR170 | 3T3P10 10 uM insulin | 3T3P10 10 uM insulin | | | | |
| AR171 | 3T3P10 No Insulin | 3T3P10 No Insulin | | | | |
| AR172 | 3T3P4 | 3T3P4 | | | | |
| AR173 | Adipose (41892) | Adipose (41892) | | | | |
| AR174 | Adipose Diabetic | Adipose Diabetic (41611) | | | | |
| | (41611) | | | | | |
| AR175 | Adipose Diabetic | Adipose Diabetic (41661) | | | | |
| | (41661) | | | | | |
| AR176 | Adipose Diabetic | Adipose Diabetic (41689) | | | | |
| | (41689) | | | | | |
| AR177 | Adipose Diabetic | Adipose Diabetic (41706) | | | | |
| | (41706) | | | | | |
| AR178 | Adipose Diabetic | Adipose Diabetic (42352) | | | | |
| | (42352) | | | | | |
| AR179 | Adipose Diabetic | Adipose Diabetic (42366) | | | | |
| | (42366) | | | | | |
| AR180 | Adipose Diabetic | Adipose Diabetic (42452) | | | | |
| | (42452) | | | | | |
| AR181 | Adipose Diabetic | Adipose Diabetic (42491) | | | | |
| | (42491) | | | | | |
| AR182 | Adipose Normal (41843) | Adipose Normal (41843) | | | | |
| AR183 | Adipose Normal (41893) | Adipose Normal (41893) | | | | |
| AR184 | Adipose Normal (42452) | Adipose Normal (42452) | | | | |
| AR185 | Adrenal Gland | Adrenal Gland | | | | |
| AR186 | Adrenal Gland + Whole | Adrenal Gland + Whole | | | | |
| | Brain | Brain | | | | |
| AR187 | B7(1 hr)+ (inverted) | B7(1 hr)+ (inverted) | | | | |
| AR188 | Breast (18275A2B) | Breast (18275A2B) | | | | |
| AR189 | Breast (4004199) | Breast (4004199) | | | | |
| AR190 | Breast (4004399) | Breast (4004399) | | | | |
| AR191 | Breast (4004943B7) | Breast (4004943B7) | | | | |
| AR192 | Breast (4005570B1) | Breast (4005570B1) | | | | |
| AR193 | Breast Cancer | Breast Cancer | | | | |
| | (4004127A30) | (4004127A30) | | | | |
| AR194 | Breast Cancer | Breast Cancer | | | | |
| | (400443A21) | (400443A21) | | | | |
| AR195 | Breast Cancer | Breast Cancer | | | | |
| | (4004643A2) | (4004643A2) | | | | |
| AR196 | Breast Cancer | Breast Cancer | | | | |
| | (4004710A7) | (4004710A7) | | | | |
| AR197 | Breast Cancer | Breast Cancer | | | | |
| | (4004943A21) | (4004943A21) | | | | |
| AR198 | Breast Cancer | Breast Cancer (400553A2) | | | | |
| | (400553A2) | | | | | |
| AR199 | Breast Cancer | Breast Cancer | | | | |
| | (9805C046R) | (9805C046R) | | | | |
| AR200 | Breast Cancer | Breast Cancer | | | | |
| | (9806C012R) | (9806C012R) | | | | |
| AR201 | Breast Cancer (ODQ | Breast Cancer (ODQ | | | | |
| | 45913) | 45913) | | | | |
| AR202 | Breast Cancer | Breast Cancer | | | | |
| | (ODQ45913) | (ODQ45913) | | | | |
| AR203 | Breast Cancer | Breast Cancer | | | | |
| | (ODQ4591B) | (ODQ4591B) | | | | |
| AR204 | Colon Cancer (15663) | Colon Cancer (15663) | | | | |
| AR205 | Colon Cancer | Colon Cancer | | | | |
| | (4005144A4) | (4005144A4) | | | | |
| AR206 | Colon Cancer | Colon Cancer | | | | |
| | (4005413A4) | (4005413A4) | | | | |
| AR207 | Colon Cancer | Colon Cancer | | | | |
| | (4005570B1) | (4005570B1) | | | | |
| AR208 | Control RNA #1 | Control RNA #1 | | | | |
| AR209 | Control RNA #2 | Control RNA #2 | | | | |
| AR210 | Cultured Preadipocyte | Cultured Preadipocyte | | | | |
| | (blue) | (blue) | | | | |
| AR211 | Cultured Preadipocyte | Cultured Preadipocyte | | | | |
| | (Red) | (Red) | | | | |
| AR212 | Donor II B-Cells 24 hrs | Donor II B-Cells 24 hrs | | | | |
| AR213 | Donor II Resting B-Cells | Donor II Resting B-Cells | | | | |
| AR214 | H114EP12 10 nM Insulin | H114EP12 10 nM Insulin | | | | |
| AR215 | H114EP12 (10 nM | H114EP12 (10 nM insulin) | | | | |
| | insulin) | | | | | |
| AR216 | H114EP12 (2.6 ug/ul) | H114EP12 (2.6 ug/ul) | | | | |
| AR217 | H114EP12 (3.6 ug/ul) | H114EP12 (3.6 ug/ul) | | | | |
| AR218 | HUVEC #1 | HUVEC #1 | | | | |
| AR219 | HUVEC #2 | HUVEC #2 | | | | |
| AR221 | L6 undiff. | L6 undiff. | | | | |
| AR222 | L6 Undifferentiated | L6 Undifferentiated | | | | |
| AR223 | L6P8 + 10 nM Insulin | L6P8 + 10 nM Insulin | | | | |
| AR224 | L6P8 + HS | L6P8 + HS | | | | |
| AR225 | L6P8 10 nM Insulin | L6P8 10 nM Insulin | | | | |
| AR226 | Liver (00-06-A007B) | Liver (00-06-A007B) | | | | |
| AR227 | Liver (96-02-A075) | Liver (96-02-A075) | | | | |
| AR228 | Liver (96-03-A144) | Liver (96-03-A144) | | | | |
| AR229 | Liver (96-04-A138) | Liver (96-04-A138) | | | | |
| AR230 | Liver (97-10-A074B) | Liver (97-10-A074B) | | | | |
| AR231 | Liver (98-09-A242A) | Liver (98-09-A242A) | | | | |
| AR232 | Liver Diabetic (1042) | Liver Diabetic (1042) | | | | |
| AR233 | Liver Diabetic (41616) | Liver Diabetic (41616) | | | | |
| AR234 | Liver Diabetic (41955) | Liver Diabetic (41955) | | | | |
| AR235 | Liver Diabetic (42352R) | Liver Diabetic (42352R) | | | | |
| AR236 | Liver Diabetic (42366) | Liver Diabetic (42366) | | | | |
| AR237 | Liver Diabetic (42483) | Liver Diabetic (42483) | | | | |
| AR238 | Liver Diabetic (42491) | Liver Diabetic (42491) | | | | |
| AR239 | Liver Diabetic (99-09- | Liver Diabetic (99-09- | | | | |
| | A281A) | A281A) | | | | |
| AR240 | Lung | Lung | | | | |
| AR241 | Lung (27270) | Lung (27270) | | | | |
| AR242 | Lung (2727Q) | Lung (2727Q) | | | | |
| AR243 | Lung Cancer | Lung Cancer (4005116A1) | | | | |
| | (4005116A1) | | | | | |
| AR244 | Lung Cancer | Lung Cancer (4005121A5) | | | | |
| | (4005121A5) | | | | | |
| AR245 | Lung Cancer | Lung Cancer | | | | |
| | (4005121A5)) | (4005121A5)) | | | | |
| AR246 | Lung Cancer | Lung Cancer (4005340A4) | | | | |
| | (4005340A4) | | | | | |
| AR247 | Mammary Gland | Mammary Gland | | | | |
| AR248 | Monocyte (CT) | Monocyte (CT) | | | | |
| AR249 | Monocyte (OCT) | Monocyte (OCT) | | | | |
| AR250 | Monocytes (CT) | Monocytes (CT) | | | | |
| AR251 | Monocytes (INFG 18 hr) | Monocytes (INFG 18 hr) | | | | |
| AR252 | Monocytes (INFG 18 hr) | Monocytes (INFG 18 hr) | | | | |
| AR253 | Monocytes (INFG 8-11) | Monocytes (INFG 8-11) | | | | |
| AR254 | Monocytes (O CT) | Monocytes (O CT) | | | | |
| AR255 | Muscle (91-01-A105) | Muscle (91-01-A105) | | | | |
| AR256 | Muscle (92-04-A059) | Muscle (92-04-A059) | | | | |
| AR257 | Muscle (97-11-A056d) | Muscle (97-11-A056d) | | | | |
| AR258 | Muscle (99-06-A210A) | Muscle (99-06-A210A) | | | | |
| AR259 | Muscle (99-07-A203B) | Muscle (99-07-A203B) | | | | |
| AR260 | Muscle (99-7-A203B) | Muscle (99-7-A203B) | | | | |
| AR261 | Muscle Diabetic | Muscle Diabetic (42352R) | | | | |
| | (42352R) | | | | | |
| AR262 | Muscle Diabetic (42366) | Muscle Diabetic (42366) | | | | |
| AR263 | NK-19 Control | NK-19 Control | | | | |
| AR264 | NK-19 IL Treated 72 hrs | NK-19 IL Treated 72 hrs | | | | |
| AR265 | NK-19 UK Treated 72 hrs. | NK-19 UK Treated 72 hrs. | | | | |
| AR266 | Omentum Normal (94- | Omentum Normal (94-08- | | | | |
| | 08-B009) | B009) | | | | |
| AR267 | Omentum Normal (97- | Omentum Normal (97-01- | | | | |
| | 01-A039A) | A039A) | | | | |
| AR268 | Omentum Normal (97- | Omentum Normal (97-04- | | | | |
| | 04-A114C) | A114C) | | | | |
| AR269 | Omentum Normal (97- | Omentum Normal (97-06- | | | | |
| | 06-A117C) | A117C) | | | | |
| AR270 | Omentum Normal (97- | Omentum Normal (97-09- | | | | |
| | 09-B004C) | B004C) | | | | |
| AR271 | Ovarian Cancer | Ovarian Cancer | | | | |
| | (17717AID) | (17717AID) | | | | |
| AR272 | Ovarian Cancer | Ovarian Cancer | | | | |
| | (9905C023RC) | (9905C023RC) | | | | |
| AR273 | Ovarian Cancer | Ovarian Cancer | | | | |
| | (9905C032RC) | (9905C032RC) | | | | |
| AR274 | Ovary (9508G045) | Ovary (9508G045) | | | | |
| AR275 | Ovary (9701G208) | Ovary (9701G208) | | | | |
| AR276 | Ovary 9806G005 | Ovary 9806G005 | | | | |
| AR277 | Pancreas | Pancreas | | | | |
| AR278 | Placebo | Placebo | | | | |
| AR279 | rIL2 Control | rIL2 Control | | | | |
| AR280 | RSS288L | RSS288L | | | | |
| AR281 | RSS288LC | RSS288LC | | | | |
| AR282 | Salivary Gland | Salivary Gland | | | | |
| AR283 | Skeletal Muscle | Skeletal Muscle | | | | |
| AR284 | Skeletal Muscle (91-01- | Skeletal Muscle (91-01- | | | | |
| | A105) | A105) | | | | |
| AR285 | Skeletal Muscle (42180) | Skeletal Muscle (42180) | | | | |
| AR286 | Skeletal Muscle (42386) | Skeletal Muscle (42386) | | | | |
| AR287 | Skeletal Muscle (42461) | Skeletal Muscle (42461) | | | | |
| AR288 | Skeletal Muscle (91-01- | Skeletal Muscle (91-01- | | | | |
| | A105) | A105) | | | | |
| AR289 | Skeletal Muscle (92-04- | Skeletal Muscle (92-04- | | | | |
| | A059) | A059) | | | | |
| AR290 | Skeletal Muscle (96-08- | Skeletal Muscle (96-08- | | | | |
| | A171) | A171) | | | | |
| AR291 | Skeletal Muscle (97-07- | Skeletal Muscle (97-07- | | | | |
| | A190A) | A190A) | | | | |
| AR292 | Skeletal Muscle Diabetic | Skeletal Muscle Diabetic | | | | |
| | (42352) | (42352) | | | | |
| AR293 | Skeletal Muscle Diabetic | Skeletal Muscle Diabetic | | | | |
| | (42366) | (42366) | | | | |
| AR294 | Skeletal Muscle Diabetic | Skeletal Muscle Diabetic | | | | |
| | (42395) | (42395) | | | | |
| AR295 | Skeletal Muscle Diabetic | Skeletal Muscle Diabetic | | | | |
| | (42483) | (42483) | | | | |
| AR296 | Skeletal Muscle Diabetic | Skeletal Muscle Diabetic | | | | |
| | (42491) | (42491) | | | | |
| AR297 | Skeletal Muscle Diabetic | Skeletal Muscle Diabetic | | | | |
| | 42352 | 42352 | | | | |
| AR298 | Skeletal Musle (42461) | Skeletal Musle (42461) | | | | |
| AR299 | Small Intestine | Small Intestine | | | | |
| AR300 | Stomach | Stomach | | | | |
| AR301 | T-Cell + HDPBQ71.fc | T-Cell + HDPBQ71.fc | | | | |
| | 1449 16 hrs | 1449 16 hrs | | | | |
| AR302 | T-Cell + HDPBQ71.fc | T-Cell + HDPBQ71.fc | | | | |
| | 1449 6 hrs | 1449 6 hrs | | | | |
| AR303 | T-Cell + IL2 16 hrs | T-Cell + IL2 16 hrs | | | | |
| AR304 | T-Cell + IL2 6 hrs | T-Cell + IL2 6 hrs | | | | |
| AR306 | T-Cell Untreated 16 hrs | T-Cell Untreated 16 hrs | | | | |
| AR307 | T-Cell Untreated 6 hrs | T-Cell Untreated 6 hrs | | | | |
| AR308 | T-Cells 24 hours | T-Cells 24 hours | | | | |
| AR309 | T-Cells 24 hrs | T-Cells 24 hrs | | | | |
| AR310 | T-Cells 24 hrs. | T-Cells 24 hrs. | | | | |
| AR311 | T-Cells 24 hrs | T-Cells 24 hrs | | | | |
| AR312 | T-Cells 4 days | T-Cells 4 days | | | | |
| AR313 | Thymus | Thymus | | | | |
| AR314 | TRE | TRE | | | | |
| AR315 | TREC | TREC | | | | |
| AR317 | B lymphocyte, | B lymphocyte, | | | | |
| AR318 | (non-T; non-B) | (non-T; non-B) | | | | |
| AR326 | 001 - 293 RNA (Vector | 001 - 293 RNA (Vector | | | | |
| | Control) | Control) | | | | |
| AR327 | 001: Control | 001: Control | | | | |
| AR328 | 001: Control.1 | 001: Control.1 | | | | |
| AR355 | Acute Lymphocyte | Acute Lymphocyte | | | | |
| | Leukemia | Leukemia | | | | |
| AR356 | AML Patient #11 | AML Patient #11 | | | | |
| AR357 | AML Patient #2 | AML Patient #2 | | | | |
| AR358 | AML Patient #2 SGAH | AML Patient #2 SGAH | | | | |
| AR359 | AML Patient#2 | AML Patient#2 | | | | |
| AR360 | Aorta | Aorta | | | | |
| AR361 | B Cell | B Cell | | | | |
| AR362 | B lymphoblast | B lymphoblast | | | | |
| AR363 | B lymphocyte | B lymphocyte | | | | |
| AR364 | B lymphocytes | B lymphocytes | | | | |
| AR365 | B-cell | B-cell | | | | |
| AR366 | B-Cells | B-Cells | | | | |
| AR367 | B-Lymphoblast | B-Lymphoblast | | | | |
| AR368 | B-Lymphocytes | B-Lymphocytes | | | | |
| AR369 | Bladder | Bladder | | | | |
| AR370 | Bone Marrow | Bone Marrow | | | | |
| AR371 | Bronchial Epithelial Cell | Bronchial Epithelial Cell | | | | |
| AR372 | Bronchial Epithelial | Bronchial Epithelial Cells | | | | |
| | Cells | | | | | |
| AR373 | Caco-2A | Caco-2A | | | | |
| AR374 | Caco-2B | Caco-2B | | | | |
| AR375 | Caco-2C | Caco-2C | | | | |
| AR376 | Cardiac #1 | Cardiac #1 | | | | |
| AR377 | Cardiac #2 | Cardiac #2 | | | | |
| AR378 | Chest Muscle | Chest Muscle | | | | |
| AR381 | Dendritic Cell | Dendritic Cell | | | | |
| AR382 | Dendritic cells | Dendritic cells | | | | |
| AR383 | E. coli | E. coli | | | | |
| AR384 | Epithelial Cells | Epithelial Cells | | | | |
| AR385 | Esophagus | Esophagus | | | | |
| AR386 | FPPS | FPPS | | | | |
| AR387 | FPPSC | FPPSC | | | | |
| AR388 | HepG2 Cell Line | HepG2 Cell Line | | | | |
| AR389 | HepG2 Cell line Buffer | HepG2 Cell line Buffer 1 hr. | | | | |
| | 1 hr. | | | | | |
| AR390 | HepG2 Cell line Buffer | HepG2 Cell line Buffer 06 hr | | | | |
| | 06 hr | | | | | |
| AR391 | HepG2 Cell line Buffer | HepG2 Cell line Buffer 24 hr. | | | | |
| | 24 hr. | | | | | |
| AR392 | HepG2 Cell line Insulin | HepG2 Cell line Insulin 01 hr. | | | | |
| | 01 hr. | | | | | |
| AR393 | HepG2 Cell line Insulin | HepG2 Cell line Insulin 06 hr. | | | | |
| | 06 hr. | | | | | |
| AR394 | HepG2 Cell line Insulin | HepG2 Cell line Insulin 24 hr. | | | | |
| | 24 hr. | | | | | |
| AR398 | HMC-1 | HMC-1 | | | | |
| AR399 | HMCS | HMCS | | | | |
| AR400 | HMSC | HMSC | | | | |
| AR401 | HUVEC #3 | HUVEC #3 | | | | |
| AR402 | HUVEC #4 | HUVEC #4 | | | | |
| AR404 | KIDNEY NORMAL | KIDNEY NORMAL | | | | |
| AR405 | KIDNEY TUMOR | KIDNEY TUMOR | | | | |
| AR406 | KIDNEY TUMOR | | | | | |
| AR407 | Lymph Node | Lymph Node | | | | |
| AR408 | Macrophage | Macrophage | | | | |
| AR409 | Megakarioblast | Megakarioblast | | | | |
| AR410 | Monocyte | Monocyte | | | | |
| AR411 | Monocytes | Monocytes | | | | |
| AR412 | Myocardium | Myocardium | | | | |
| AR413 | Myocardium #3 | Myocardium #3 | | | | |
| AR414 | Myocardium #4 | Myocardium #4 | | | | |
| AR415 | Myocardium #5 | Myocardium #5 | | | | |
| AR416 | NK | NK | | | | |
| AR417 | NK cell | NK cell | | | | |
| AR418 | NK cells | NK cells | | | | |
| AR419 | NKYa | NKYa | | | | |
| AR420 | NKYa019 | NKYa019 | | | | |
| AR421 | Ovary | Ovary | | | | |
| AR422 | Patient #11 | Patient #11 | | | | |
| AR423 | Peripheral blood | Peripheral blood | | | | |
| AR424 | Primary Adipocytes | Primary Adipocytes | | | | |
| AR425 | Promyeloblast | Promyeloblast | | | | |
| AR427 | RSSWT | RSSWT | | | | |
| AR428 | RSSWTC | RSSWTC | | | | |
| AR429 | SW 480(G1) | SW 480(G1) | | | | |
| AR430 | SW 480(G2) | SW 480(G2) | | | | |
| AR431 | SW 480(G3) | SW 480(G3) | | | | |
| AR432 | SW 480(G4) | SW 480(G4) | | | | |
| AR433 | SW 480(G5) | SW 480(G5) | | | | |
| AR434 | T Lymphoblast | T Lymphoblast | | | | |
| AR435 | T Lymphocyte | T Lymphocyte | | | | |
| AR436 | T-Cell | T-Cell | | | | |
| AR438 | T-Cell, | T-Cell, | | | | |
| AR439 | T-Cells | T-Cells | | | | |
| AR440 | T-lymphoblast | T-lymphoblast | | | | |
| AR441 | Th 1 | Th 1 | | | | |
| AR442 | Th 2 | Th 2 | | | | |
| AR443 | Th1 | Th1 | | | | |
| AR444 | Th2 | Th2 | | | | |
| H0002 | Human Adult Heart | Human Adult Heart | Heart | | | Uni-ZAP XR |
| H0004 | Human Adult Spleen | Human Adult Spleen | Spleen | | | Uni-ZAP XR |
| H0007 | Human Cerebellum | Human Cerebellum | Brain | | | Uni-ZAP XR |
| H0008 | Whole 6 Week Old | | | | | Uni-ZAP XR |
| | Embryo | | | | | |
| H0009 | Human Fetal Brain | | | | | Uni-ZAP XR |
| H0011 | Human Fetal Kidney | Human Fetal Kidney | Kidney | | | Uni-ZAP XR |
| H0012 | Human Fetal Kidney | Human Fetal Kidney | Kidney | | | Uni-ZAP XR |
| H0013 | Human 8 Week Whole | Human 8 Week Old | Embryo | | | Uni-ZAP XR |
| | Embryo | Embryo | | | | |
| H0014 | Human Gall Bladder | Human Gall Bladder | Gall Bladder | | | Uni-ZAP XR |
| H0015 | Human Gall Bladder, | Human Gall Bladder | Gall Bladder | | | Uni-ZAP XR |
| | fraction II | | | | | |
| H0016 | Human Greater | Human Greater Omentum | peritoneum | | | Uni-ZAP XR |
| | Omentum | | | | | |
| H0017 | Human Greater | Human Greater Omentum | peritoneum | | | Uni-ZAP XR |
| | Omentum | | | | | |
| H0020 | Human Hippocampus | Human Hippocampus | Brain | | | Uni-ZAP XR |
| H0022 | Jurkat Cells | Jurkat T-Cell Line | | | | Lambda ZAP II |
| H0023 | Human Fetal Lung | | | | | Uni-ZAP XR |
| H0024 | Human Fetal Lung III | Human Fetal Lung | Lung | | | Uni-ZAP XR |
| H0025 | Human Adult Lymph | Human Adult Lymph | Lymph Node | | | Lambda ZAP II |
| | Node | Node | | | | |
| H0026 | Namalwa Cells | Namalwa B-Cell Line, | | | | Lambda ZAP II |
| | | EBV immortalized | | | | |
| H0030 | Human Placenta | | | | | Uni-ZAP XR |
| H0031 | Human Placenta | Human Placenta | Placenta | | | Uni-ZAP XR |
| H0032 | Human Prostate | Human Prostate | Prostate | | | Uni-ZAP XR |
| H0033 | Human Pituitary | Human Pituitary | | | | Uni-ZAP XR |
| H0036 | Human Adult Small | Human Adult Small | Small Int. | | | Uni-ZAP XR |
| | Intestine | Intestine | | | | |
| H0038 | Human Testes | Human Testes | Testis | | | Uni-ZAP XR |
| H0039 | Human Pancreas Tumor | Human Pancreas Tumor | Pancreas | | disease | Uni-ZAP XR |
| H0040 | Human Testes Tumor | Human Testes Tumor | Testis | | disease | Uni-ZAP XR |
| H0041 | Human Fetal Bone | Human Fetal Bone | Bone | | | Uni-ZAP XR |
| H0042 | Human Adult Pulmonary | Human Adult Pulmonary | Lung | | | Uni-ZAP XR |
| H0044 | Human Cornea | Human Cornea | eye | | | Uni-ZAP XR |
| H0045 | Human Esophagus, | Human Esophagus, cancer | Esophagus | | disease | Uni-ZAP XR |
| | Cancer | | | | | |
| H0046 | Human Endometrial | Human Endometrial | Uterus | | disease | Uni-ZAP XR |
| | Tumor | Tumor | | | | |
| H0047 | Human Fetal Liver | Human Fetal Liver | Liver | | | Uni-ZAP XR |
| H0048 | Human Pineal Gland | Human Pineal Gland | | | | Uni-ZAP XR |
| H0050 | Human Fetal Heart | Human Fetal Heart | Heart | | | Uni-ZAP XR |
| H0051 | Human Hippocampus | Human Hippocampus | Brain | | | Uni-ZAP XR |
| H0052 | Human Cerebellum | Human Cerebellum | Brain | | | Uni-ZAP XR |
| H0056 | Human Umbilical Vein, | Human Umbilical Vein | Umbilical vein | | | Uni-ZAP XR |
| | Endo. remake | Endothelial Cells | | | | |
| H0057 | Human Fetal Spleen | | | | | Uni-ZAP XR |
| H0058 | Human Thymus Tumor | Human Thymus Tumor | Thymus | | disease | Lambda ZAP II |
| H0059 | Human Uterine Cancer | Human Uterine Cancer | Uterus | | disease | Lambda ZAP II |
| H0060 | Human Macrophage | Human Macrophage | Blood | Cell Line | | pBluescript |
| H0061 | Human Macrophage | Human Macrophage | Blood | Cell Line | | pBluescript |
| H0063 | Human Thymus | Human Thymus | Thymus | | | Uni-ZAP XR |
| H0065 | Human Esophagus, | Human Esophagus, normal | Esophagus | | | Uni-ZAP XR |
| | Normal | | | | | |
| H0068 | Human Skin Tumor | Human Skin Tumor | Skin | | disease | Uni-ZAP XR |
| H0069 | Human Activated T- | Activated T-Cells | Blood | Cell Line | | Uni-ZAP XR |
| | Cells | | | | | |
| H0070 | Human Pancreas | Human Pancreas | Pancreas | | | Uni-ZAP XR |
| H0071 | Human Infant Adrenal | Human Infant Adrenal | Adrenal gland | | | Uni-ZAP XR |
| | Gland | Gland | | | | |
| H0075 | Human Activated T- | Activated T-Cells | Blood | Cell Line | | Uni-ZAP XR |
| | Cells (II) | | | | | |
| H0076 | Human Membrane | Human Membrane Bound | Blood | Cell Line | | Uni-ZAP XR |
| | Bound Polysomes | Polysomes | | | | |
| H0078 | Human Lung Cancer | Human Lung Cancer | Lung | | disease | Lambda ZAP II |
| H0081 | Human Fetal Epithelium | Human Fetal Skin | Skin | | | Uni-ZAP XR |
| | (Skin) | | | | | |
| H0083 | HUMAN JURKAT | Jurkat Cells | | | | Uni-ZAP XR |
| | MEMBRANE BOUND | | | | | |
| | POLYSOMES | | | | | |
| H0085 | Human Colon | Human Colon | | | | Lambda ZAP II |
| H0086 | Human epithelioid | Epithelioid Sarcoma, | Sk Muscle | | disease | Uni-ZAP XR |
| | sarcoma | muscle | | | | |
| H0087 | Human Thymus | Human Thymus | | | | pBluescript |
| H0090 | Human T-Cell | T-Cell Lymphoma | T-Cell | | disease | Uni-ZAP XR |
| | Lymphoma | | | | | |
| H0097 | Human Adult Heart, | Human Adult Heart | Heart | | | pBluescript |
| | subtracted | | | | | |
| H0098 | Human Adult Liver, | Human Adult Liver | Liver | | | Uni-ZAP XR |
| | subtracted | | | | | |
| H0099 | Human Lung Cancer, | Human Lung Cancer | Lung | | | pBluescript |
| | subtracted | | | | | |
| H0100 | Human Whole Six Week | Human Whole Six Week | Embryo | | | Uni-ZAP XR |
| | Old Embryo | Old Embryo | | | | |
| H0102 | Human Whole 6 Week | Human Whole Six Week | Embryo | | | pBluescript |
| | Old Embryo (II), subt | Old Embryo | | | | |
| H0103 | Human Fetal Brain, | Human Fetal Brain | Brain | | | Uni-ZAP XR |
| | subtracted | | | | | |
| H0107 | Human Infant Adrenal | Human Infant Adrenal | Adrenal gland | | | pBluescript |
| | Gland, subtracted | Gland | | | | |
| H0108 | Human Adult Lymph | Human Adult Lymph | Lymph Node | | | Uni-ZAP XR |
| | Node, subtracted | Node | | | | |
| H0109 | Human Macrophage, | Macrophage | Blood | Cell Line | | pBluescript |
| | subtracted | | | | | |
| H0110 | Human Old Ovary, | Human Old Ovary | Ovary | | | pBluescript |
| | subtracted | | | | | |
| H0111 | Human Placenta, | Human Placenta | Placenta | | | pBluescript |
| | subtracted | | | | | |
| H0116 | Human Thymus Tumor, | Human Thymus Tumor | Thymus | | | pBluescript |
| | subtracted | | | | | |
| H0118 | Human Adult Kidney | Human Adult Kidney | Kidney | | | Uni-ZAP XR |
| H0120 | Human Adult Spleen, | Human Adult Spleen | Spleen | | | Uni-ZAP XR |
| | subtracted | | | | | |
| H0121 | Human Cornea, | Human Cornea | eye | | | Uni-ZAP XR |
| | subtracted | | | | | |
| H0122 | Human Adult Skeletal | Human Skeletal Muscle | Sk Muscle | | | Uni-ZAP XR |
| | Muscle | | | | | |
| H0123 | Human Fetal Dura Mater | Human Fetal Dura Mater | Brain | | | Uni-ZAP XR |
| H0124 | Human | Human | Sk Muscle | | disease | Uni-ZAP XR |
| | Rhabdomyosarcoma | Rhabdomyosarcoma | | | | |
| H0125 | Cem cells cyclohexamide | Cyclohexamide Treated | Blood | Cell Line | | Uni-ZAP XR |
| | treated | Cem, Jurkat, Raji, and | | | | |
| | | Supt | | | | |
| H0128 | Jurkat cells, thiouridine | Jurkat Cells | | | | Uni-ZAP XR |
| | activated | | | | | |
| H0130 | LNCAP untreated | LNCAP Cell Line | Prostate | Cell Line | | Uni-ZAP XR |
| H0131 | LNCAP + o.3 nM R1881 | LNCAP Cell Line | Prostate | Cell Line | | Uni-ZAP XR |
| H0132 | LNCAP + 30 nM R1881 | LNCAP Cell Line | Prostate | Cell Line | | Uni-ZAP XR |
| H0134 | Raji Cells, | Cyclohexamide Treated | Blood | Cell Line | | Uni-ZAP XR |
| | cyclohexamide treated | Cem, Jurkat, Raji, and | | | | |
| | | Supt | | | | |
| H0135 | Human Synovial | Human Synovial Sarcoma | Synovium | | | Uni-ZAP XR |
| | Sarcoma | | | | | |
| H0136 | Supt Cells, | Cyclohexamide Treated | Blood | Cell Line | | Uni-ZAP XR |
| | cyclohexamide treated | Cem, Jurkat, Raji, and | | | | |
| | | Supt | | | | |
| H0139 | Activated T-Cells, 4 hrs. | Activated T-Cells | Blood | Cell Line | | Uni-ZAP XR |
| H0140 | Activated T-Cells, 8 hrs. | Activated T-Cells | Blood | Cell Line | | Uni-ZAP XR |
| H0141 | Activated T-Cells, 12 hrs. | Activated T-Cells | Blood | Cell Line | | Uni-ZAP XR |
| H0144 | Nine Week Old Early | 9 Wk Old Early Stage | Embryo | | | Uni-ZAP XR |
| | Stage Human | Human | | | | |
| H0147 | Human Adult Liver | Human Adult Liver | Liver | | | Uni-ZAP XR |
| H0149 | 7 Week Old Early Stage | Human Whole 7 Week | Embryo | | | Uni-ZAP XR |
| | Human, subtracted | Old Embryo | | | | |
| H0150 | Human Epididymus | Epididymis | Testis | | | Uni-ZAP XR |
| H0151 | Early Stage Human Liver | Human Fetal Liver | Liver | | | Uni-ZAP XR |
| H0154 | Human Fibrosarcoma | Human Skin Fibrosarcoma | Skin | | disease | Uni-ZAP XR |
| H0156 | Human Adrenal Gland | Human Adrenal Gland | Adrenal Gland | | disease | Uni-ZAP XR |
| | Tumor | Tumor | | | | |
| H0158 | Activated T-Cells, 4 hrs., | Activated T-Cells | Blood | Cell Line | | Uni-ZAP XR |
| | ligation 2 | | | | | |
| H0159 | Activated T-Cells, 8 hrs., | Activated T-Cells | Blood | Cell Line | | Uni-ZAP XR |
| | ligation 2 | | | | | |
| H0161 | Activated T-Cells, 24 hrs., | Activated T-Cells | Blood | Cell Line | | Uni-ZAP XR |
| | ligation 2 | | | | | |
| H0163 | Human Synovium | Human Synovium | Synovium | | | Uni-ZAP XR |
| H0165 | Human Prostate Cancer, | Human Prostate Cancer, | Prostate | | disease | Uni-ZAP XR |
| | Stage B2 | stage B2 | | | | |
| H0166 | Human Prostate Cancer, | Human Prostate Cancer, | Prostate | | disease | Uni-ZAP XR |
| | Stage B2 fraction | stage B2 | | | | |
| H0167 | Activated T-Cells, 24 hrs. | Activated T-Cells | Blood | Cell Line | | Uni-ZAP XR |
| H0169 | Human Prostate Cancer, | Human Prostate Cancer, | Prostate | | disease | Uni-ZAP XR |
| | Stage C fraction | stage C | | | | |
| H0170 | 12 Week Old Early Stage | Twelve Week Old Early | Embryo | | | Uni-ZAP XR |
| | Human | Stage Human | | | | |
| H0171 | 12 Week Old Early Stage | Twelve Week Old Early | Embryo | | | Uni-ZAP XR |
| | Human, II | Stage Human | | | | |
| H0172 | Human Fetal Brain, | Human Fetal Brain | Brain | | | Lambda ZAP II |
| | random primed | | | | | |
| H0176 | CAMA1Ee Cell Line | CAMA1Ee Cell Line | Breast | Cell Line | | Uni-ZAP XR |
| H0177 | CAMA1Ee Cell Line | CAMA1Ee Cell Line | Breast | Cell Line | | Uni-ZAP XR |
| H0178 | Human Fetal Brain | Human Fetal Brain | Brain | | | Uni-ZAP XR |
| H0179 | Human Neutrophil | Human Neutrophil | Blood | Cell Line | | Uni-ZAP XR |
| H0180 | Human Primary Breast | Human Primary Breast | Breast | | disease | Uni-ZAP XR |
| | Cancer | Cancer | | | | |
| H0181 | Human Primary Breast | Human Primary Breast | Breast | | disease | Uni-ZAP XR |
| | Cancer | Cancer | | | | |
| H0182 | Human Primary Breast | Human Primary Breast | Breast | | disease | Uni-ZAP XR |
| | Cancer | Cancer | | | | |
| H0183 | Human Colon Cancer | Human Colon Cancer | Colon | | disease | Uni-ZAP XR |
| H0184 | Human Colon Cancer, | Human Colon Cancer, | Liver | | disease | Lambda ZAP II |
| | metasticized to live | metasticized to liver | | | | |
| H0187 | Resting T-Cell | T-Cells | Blood | Cell Line | | Lambda ZAP II |
| H0188 | Human Normal Breast | Human Normal Breast | Breast | | | Uni-ZAP XR |
| H0189 | Human Resting | Human | Blood | Cell Line | | Uni-ZAP XR |
| | Macrophage | Macrophage/Monocytes | | | | |
| H0190 | Human Activated | Human | Blood | Cell Line | | Uni-ZAP XR |
| | Macrophage (LPS) | Macrophage/Monocytes | | | | |
| H0192 | Cem Cells, | Cyclohexamide Treated | Blood | Cell Line | | Uni-ZAP XR |
| | cyclohexamide treated, | Cem, Jurkat, Raji, and | | | | |
| | subtra | Supt | | | | |
| H0194 | Human Cerebellum, | Human Cerebellum | Brain | | | pBluescript |
| | subtracted | | | | | |
| H0196 | Human Cardiomyopathy, | Human Cardiomyopathy | Heart | | | Uni-ZAP XR |
| | subtracted | | | | | |
| H0197 | Human Fetal Liver, | Human Fetal Liver | Liver | | | Uni-ZAP XR |
| | subtracted | | | | | |
| H0199 | Human Fetal Liver, | Human Fetal Liver | Liver | | | Uni-ZAP XR |
| | subtracted, neg clone | | | | | |
| H0200 | Human Greater | Human Greater Omentum | peritoneum | | | Uni-ZAP XR |
| | Omentum, fract II | | | | | |
| | remake, | | | | | |
| H0201 | Human Hippocampus, | Human Hippocampus | Brain | | | pBluescript |
| | subtracted | | | | | |
| H0202 | Jurkat Cells, | Cyclohexamide Treated | Blood | Cell Line | | Uni-ZAP XR |
| | cyclohexamide treated, | Cem, Jurkat, Raji, and | | | | |
| | subtraction | Supt | | | | |
| H0204 | Human Colon Cancer, | Human Colon Cancer | Colon | | | pBluescript |
| | subtracted | | | | | |
| H0205 | Human Colon Cancer, | Human Colon Cancer | Colon | | | pBluescript |
| | differential | | | | | |
| H0207 | LNCAP, differential | LNCAP Cell Line | Prostate | Cell Line | | pBluescript |
| | expression | | | | | |
| H0208 | Early Stage Human | Human Fetal Lung | Lung | | | pBluescript |
| | Lung, subtracted | | | | | |
| H0209 | Human Cerebellum, | Human Cerebellum | Brain | | | Uni-ZAP XR |
| | differentially expressed | | | | | |
| H0211 | Human | Human Prostate | Prostate | | | pBluescript |
| | Prostate, differential | | | | | |
| | expression | | | | | |
| H0212 | Human Prostate, | Human Prostate | Prostate | | | pBluescript |
| | subtracted | | | | | |
| H0213 | Human Pituitary, | Human Pituitary | | | | Uni-ZAP XR |
| | subtracted | | | | | |
| H0214 | Raji cells, cyclohexamide | Cyclohexamide Treated | Blood | Cell Line | | pBluescript |
| | treated, subtracted | Cem, Jurkat, Raji, and | | | | |
| | | Supt | | | | |
| H0215 | Raji cells, cyclohexamide | Cyclohexamide Treated | Blood | Cell Line | | pBluescript |
| | treated, differentially | Cem, Jurkat, Raji, and | | | | |
| | expressed | Supt | | | | |
| H0216 | Supt cells, | Cyclohexamide Treated | Blood | Cell Line | | pBluescript |
| | cyclohexamide treated, | Cem, Jurkat, Raji, and | | | | |
| | subtracted | Supt | | | | |
| H0217 | Supt cells, | Cyclohexamide Treated | Blood | Cell Line | | pBluescript |
| | cyclohexamide treated, | Cem, Jurkat, Raji, and | | | | |
| | differentially expressed | Supt | | | | |
| H0218 | Activated T-Cells, 0 hrs, | Activated T-Cells | Blood | Cell Line | | Uni-ZAP XR |
| | subtracted | | | | | |
| H0219 | Activated T-Cells, 0 hrs, | Activated T-Cells | Blood | Cell Line | | Uni-ZAP XR |
| | differentially expressed | | | | | |
| H0220 | Activated T-Cells, 4 hrs, | Activated T-Cells | Blood | Cell Line | | Uni-ZAP XR |
| | subtracted | | | | | |
| H0222 | Activated T-Cells, 8 hrs, | Activated T-Cells | Blood | Cell Line | | Uni-ZAP XR |
| | subtracted | | | | | |
| H0223 | Activated T-Cells, 8 hrs, | Activated T-Cells | Blood | Cell Line | | Uni-ZAP XR |
| | differentially expressed | | | | | |
| H0224 | Activated T-Cells, 12 hrs, | Activated T-Cells | Blood | Cell Line | | Uni-ZAP XR |
| | subtracted | | | | | |
| H0225 | Activated T-Cells, 12 hrs, | Activated T-Cells | Blood | Cell Line | | Uni-ZAP XR |
| | differentially expressed | | | | | |
| H0229 | Early Stage Human | Early Stage Human Brain | Brain | | | Lambda ZAP II |
| | Brain, random primed | | | | | |
| H0230 | Human Cardiomyopathy, | Human Cardiomyopathy | Heart | | disease | Uni-ZAP XR |
| | diff exp | | | | | |
| H0231 | Human Colon, | Human Colon | | | | pBluescript |
| | subtraction | | | | | |
| H0232 | Human Colon, | Human Colon | | | | pBluescript |
| | differential expression | | | | | |
| H0234 | human colon cancer, | Human Colon Cancer, | Liver | | | pBluescript |
| | metastatic to liver, | metasticized to liver | | | | |
| | differentially expressed | | | | | |
| H0235 | Human colon cancer, | Human Colon Cancer, | Liver | | | pBluescript |
| | metaticized to liver, | metasticized to liver | | | | |
| | subtraction | | | | | |
| H0239 | Human Kidney Tumor | Human Kidney Tumor | Kidney | | disease | Uni-ZAP XR |
| H0240 | C7MCF7 cell line, | C7MCF7 Cell Line, | Breast | Cell Line | | Uni-ZAP XR |
| | estrogen treated, | estrogen treated | | | | |
| | Differential | | | | | |
| H0241 | C7MCF7 cell line, | C7MCF7 Cell Line, | Breast | Cell Line | | Uni-ZAP XR |
| | estrogen treated, | estrogen treated | | | | |
| | subtraction | | | | | |
| H0242 | Human Fetal Heart, | Human Fetal Heart | Heart | | | pBluescript |
| | Differential (Fetal- | | | | | |
| | Specific) | | | | | |
| H0244 | Human 8 Week Whole | Human 8 Week Old | Embryo | | | Uni-ZAP XR |
| | Embryo, subtracted | Embryo | | | | |
| H0246 | Human Fetal Liver- | Human Fetal Liver | Liver | | | Uni-ZAP XR |
| | Enzyme subtraction | | | | | |
| H0247 | Human Membrane | Human Membrane Bound | Blood | Cell Line | | Uni-ZAP XR |
| | Bound Polysomes- | Polysomes | | | | |
| | Enzyme Subtraction | | | | | |
| H0249 | HE7, subtracted by | Human Whole 7 Week | Embryo | | | Uni-ZAP XR |
| | hybridization with E7 | Old Embryo | | | | |
| | cDNA | | | | | |
| H0250 | Human Activated | Human Monocytes | | | | Uni-ZAP XR |
| | Monocytes | | | | | |
| H0251 | Human Chondrosarcoma | Human Chondrosarcoma | Cartilage | | disease | Uni-ZAP XR |
| H0252 | Human Osteosarcoma | Human Osteosarcoma | Bone | | disease | Uni-ZAP XR |
| H0253 | Human adult testis, large | Human Adult Testis | Testis | | | Uni-ZAP XR |
| | inserts | | | | | |
| H0254 | Breast Lymph node | Breast Lymph Node | Lymph Node | | | Uni-ZAP XR |
| | cDNA library | | | | | |
| H0255 | breast lymph node | Breast Lymph Node | Lymph Node | | | Lambda ZAP II |
| | CDNA library | | | | | |
| H0256 | HL-60, unstimulated | Human HL-60 Cells, | Blood | Cell Line | | Uni-ZAP XR |
| | | unstimulated | | | | |
| H0257 | HL-60, PMA 4H | HL-60 Cells, PMA | Blood | Cell Line | | Uni-ZAP XR |
| | | stimulated 4H | | | | |
| H0261 | H. cerebellum, Enzyme | Human Cerebellum | Brain | | | Uni-ZAP XR |
| | subtracted | | | | | |
| H0263 | human colon cancer | Human Colon Cancer | Colon | | disease | Lambda ZAP II |
| H0264 | human tonsils | Human Tonsil | Tonsil | | | Uni-ZAP XR |
| H0265 | Activated T-Cell | T-Cells | Blood | Cell Line | | Uni-ZAP XR |
| | (12 hs)/Thiouridine | | | | | |
| | labelledEco | | | | | |
| H0266 | Human Microvascular | HMEC | Vein | Cell Line | | Lambda ZAP II |
| | Endothelial Cells, fract. A | | | | | |
| H0267 | Human Microvascular | HMEC | Vein | Cell Line | | Lambda ZAP II |
| | Endothelial Cells, fract. B | | | | | |
| H0268 | Human Umbilical Vein | HUVE Cells | Umbilical vein | Cell Line | | Lambda ZAP II |
| | Endothelial Cells, fract. A | | | | | |
| H0269 | Human Umbilical Vein | HUVE Cells | Umbilical vein | Cell Line | | Lambda ZAP II |
| | Endothelial Cells, fract. B | | | | | |
| H0270 | HPAS (human pancreas, | Human Pancreas | Pancreas | | | Uni-ZAP XR |
| | subtracted) | | | | | |
| H0271 | Human Neutrophil, | Human Neutrophil - | Blood | Cell Line | | Uni-ZAP XR |
| | Activated | Activated | | | | |
| H0272 | HUMAN TONSILS, | Human Tonsil | Tonsil | | | Uni-ZAP XR |
| | FRACTION 2 | | | | | |
| H0274 | Human Adult Spleen, | Human Adult Spleen | Spleen | | | Uni-ZAP XR |
| | fractionII | | | | | |
| H0275 | Human Infant Adrenal | Human Infant Adrenal | Adrenal gland | | | pBluescript |
| | Gland, Subtracted | Gland | | | | |
| H0280 | K562 + PMA (36 hrs) | K562 Cell line | cell line | Cell Line | | ZAP Express |
| H0281 | Lymph node, abnorm. | Lymph Node, abnormal | Lymph Node | Cell Line | | ZAP Express |
| | cell line (ATCC #7225) | cell line | | | | |
| H0282 | HBGB''s differential | Human Primary Breast | Breast | | | Uni-ZAP XR |
| | consolidation | Cancer | | | | |
| H0284 | Human OB MG63 | Human Osteoblastoma | Bone | Cell Line | | Uni-ZAP XR |
| | control fraction I | MG63 cell line | | | | |
| H0286 | Human OB MG63 | Human Osteoblastoma | Bone | Cell Line | | Uni-ZAP XR |
| | treated (10 nM E2) | MG63 cell line | | | | |
| | fraction I | | | | | |
| H0288 | Human OB HOS control | Human Osteoblastoma | Bone | Cell Line | | Uni-ZAP XR |
| | fraction I | HOS cell line | | | | |
| H0290 | Human OB HOS treated | Human Osteoblastoma | Bone | Cell Line | | Uni-ZAP XR |
| | (1 nM E2) fraction I | HOS cell line | | | | |
| H0292 | Human OB HOS treated | Human Osteoblastoma | Bone | Cell Line | | Uni-ZAP XR |
| | (10 nM E2) fraction I | HOS cell line | | | | |
| H0293 | WI 38 cells | | | | | Uni-ZAP XR |
| H0294 | Amniotic Cells - TNF | Amniotic Cells - TNF | Placenta | Cell Line | | Uni-ZAP XR |
| | induced | induced | | | | |
| H0295 | Amniotic Cells - Primary | Amniotic Cells - Primary | Placenta | Cell Line | | Uni-ZAP XR |
| | Culture | Culture | | | | |
| H0300 | CD34 positive cells | CD34 Positive Cells | Cord Blood | | | ZAP Express |
| | (Cord Blood) | | | | | |
| H0305 | CD34 positive cells | CD34 Positive Cells | Cord Blood | | | ZAP Express |
| | (Cord Blood) | | | | | |
| H0306 | CD34 depleted Buffy | CD34 Depleted Buffy | Cord Blood | | | ZAP Express |
| | Coat (Cord Blood) | Coat (Cord Blood) | | | | |
| H0309 | Human Chronic | Synovium, Chronic | Synovium | | disease | Uni-ZAP XR |
| | Synovitis | Synovitis/Osteoarthritis | | | | |
| H0310 | human caudate nucleus | Brain | Brain | | | Uni-ZAP XR |
| H0316 | HUMAN STOMACH | Human Stomach | Stomach | | | Uni-ZAP XR |
| H0318 | HUMAN B CELL | Human B Cell Lymphoma | Lymph Node | | disease | Uni-ZAP XR |
| | LYMPHOMA | | | | | |
| H0320 | Human frontal cortex | Human Frontal Cortex | Brain | | | Uni-ZAP XR |
| H0321 | HUMAN | Schwanoma | Nerve | | disease | Uni-ZAP XR |
| | SCHWANOMA | | | | | |
| H0327 | human corpus colosum | Human Corpus Callosum | Brain | | | Uni-ZAP XR |
| H0328 | human ovarian cancer | Ovarian Cancer | Ovary | | disease | Uni-ZAP XR |
| H0329 | Dermatofibrosarcoma | Dermatofibrosarcoma | Skin | | disease | Uni-ZAP XR |
| | Protuberance | Protuberans | | | | |
| H0331 | Hepatocellular Tumor | Hepatocellular Tumor | Liver | | disease | Lambda ZAP II |
| H0333 | Hemangiopericytoma | Hemangiopericytoma | Blood vessel | | disease | Lambda ZAP II |
| H0334 | Kidney cancer | Kidney Cancer | Kidney | | disease | Uni-ZAP XR |
| H0339 | Duodenum | Duodenum | | | | Uni-ZAP XR |
| H0341 | Bone Marrow Cell Line | Bone Marrow Cell Line | Bone Marrow | Cell Line | | Uni-ZAP XR |
| | (RS4; 11) | RS4; 11 | | | | |
| H0342 | Lingual Gyrus | Lingual Gyrus | Brain | | | Uni-Zap XR |
| H0343 | stomach cancer (human) | Stomach Cancer - 5383A | | | disease | Uni-ZAP XR |
| | | (human) | | | | |
| H0344 | Adipose tissue (human) | Adipose - 6825A (human) | | | | Uni-ZAP XR |
| H0345 | SKIN | Skin - 4000868H | Skin | | | Uni-ZAP XR |
| H0346 | Brain-medulloblastoma | Brain (Medulloblastoma)- | Brain | | disease | Uni-ZAP XR |
| | | 9405C006R | | | | |
| H0349 | human adult liver cDNA | Human Adult Liver | Liver | | | pCMVSport 1 |
| | library | | | | | |
| H0350 | Human Fetal Liver, | Human Fetal Liver, mixed | Liver | | | Uni-ZAP XR |
| | mixed 10 & 14 week | 10& 14 Week | | | | |
| H0351 | Glioblastoma | Glioblastoma | Brain | | disease | Uni-ZAP XR |
| H0352 | wilm''s tumor | Wilm''s Tumor | | | disease | Uni-ZAP XR |
| H0354 | Human Leukocytes | Human Leukocytes | Blood | Cell Line | | pCMVSport 1 |
| H0355 | Human Liver | Human Liver, normal | | | | pCMVSport 1 |
| | | Adult | | | | |
| H0356 | Human Kidney | Human Kidney | Kidney | | | pCMVSport 1 |
| H0357 | H. Normalized Fetal | Human Fetal Liver | Liver | | | Uni-ZAP XR |
| | Liver, II | | | | | |
| H0359 | KMH2 cell line | KMH2 | | | | ZAP Express |
| H0360 | Hemangiopericytoma | Hemangiopericytoma | | | disease | |
| H0361 | Human rejected kidney | Human Rejected Kidney | | | disease | pBluescript |
| H0362 | HeLa cell line | HELA CELL LINE | | | | pSport1 |
| H0366 | L428 cell line | L428 | | | | ZAP Express |
| H0369 | H. Atrophic | Atrophic Endometrium | | | | Uni-ZAP XR |
| | Endometrium | and myometrium | | | | |
| H0370 | H. Lymph node breast | Lymph node with Met. | | | disease | Uni-ZAP XR |
| | Cancer | Breast Cancer | | | | |
| H0372 | Human Testes | Human Testes | Testis | | | pCMVSport 1 |
| H0373 | Human Heart | Human Adult Heart | Heart | | | pCMVSport 1 |
| H0374 | Human Brain | Human Brain | | | | pCMVSport 1 |
| H0375 | Human Lung | Human Lung | | | | pCMVSport 1 |
| H0376 | Human Spleen | Human Adult Spleen | Spleen | | | pCMVSport 1 |
| H0379 | Human Tongue, frac 1 | Human Tongue | | | | pSport1 |
| H0380 | Human Tongue, frac 2 | Human Tongue | | | | pSport1 |
| H0381 | Bone Cancer | Bone Cancer | | | disease | Uni-ZAP XR |
| H0383 | Human Prostate BPH, re- | Human Prostate BPH | | | | Uni-ZAP XR |
| | excision | | | | | |
| H0384 | Brain, Kozak | Human Brain | | | | pCMVSport 1 |
| H0386 | Leukocyte and Lung; 4 | Human Leukocytes | Blood | Cell Line | | pCMVSport 1 |
| | screens | | | | | |
| H0388 | Human Rejected Kidney, | Human Rejected Kidney | | | disease | pBluescript |
| | 704 re-excision | | | | | |
| H0390 | Human Amygdala | Human Amygdala | | | disease | pBluescript |
| | Depression, re-excision | Depression | | | | |
| H0391 | H. Meniingima, M6 | Human Meningima | brain | | | pSport1 |
| H0392 | H. Meningima, M1 | Human Meningima | brain | | | pSport1 |
| H0393 | Fetal Liver, subtraction II | Human Fetal Liver | Liver | | | pBluescript |
| H0394 | A-14 cell line | Redd-Sternberg cell | | | | ZAP Express |
| H0395 | A1-CELL LINE | Redd-Sternberg cell | | | | ZAP Express |
| H0396 | L1 Cell line | Redd-Sternberg cell | | | | ZAP Express |
| H0399 | Human Kidney Cortex, | Human Kidney Cortex | | | | Lambda ZAP II |
| | re-rescue | | | | | |
| H0400 | Human Striatum | Human Brain, Striatum | Brain | | | Lambda ZAP II |
| | Depression, re-rescue | Depression | | | | |
| H0402 | CD34 depleted Buffy | CD34 Depleted Buffy | Cord Blood | | | ZAP Express |
| | Coat (Cord Blood), re- | Coat (Cord Blood) | | | | |
| | excision | | | | | |
| H0403 | H. Umbilical Vein | HUVE Cells | Umbilical vein | Cell Line | | Uni-ZAP XR |
| | Endothelial Cells, IL4 | | | | | |
| | induced | | | | | |
| H0404 | H. Umbilical Vein | HUVE Cells | Umbilical vein | Cell Line | | Uni-ZAP XR |
| | endothelial cells, | | | | | |
| | uninduced | | | | | |
| H0405 | Human Pituitary, | Human Pituitary | | | | pBluescript |
| | subtracted VI | | | | | |
| H0406 | H Amygdala Depression, | Human Amygdala | | | | Uni-ZAP XR |
| | subtracted | Depression | | | | |
| H0408 | Human kidney Cortex, | Human Kidney Cortex | | | | pBluescript |
| | subtracted | | | | | |
| H0409 | H. Striatum Depression, | Human Brain, Striatum | Brain | | | pBluescript |
| | subtracted | Depression | | | | |
| H0410 | H. Male bladder, adult | H Male Bladder, Adult | Bladder | | | pSport1 |
| H0411 | H Female Bladder, Adult | Human Female Adult | Bladder | | | pSport1 |
| | | Bladder | | | | |
| H0412 | Human umbilical vein | HUVE Cells | Umbilical vein | Cell Line | | pSport1 |
| | endothelial cells, IL-4 | | | | | |
| | induced | | | | | |
| H0413 | Human Umbilical Vein | HUVE Cells | Umbilical vein | Cell Line | | pSport1 |
| | Endothelial Cells, | | | | | |
| | uninduced | | | | | |
| H0414 | Ovarian Tumor I, | Ovarian Tumor, OV5232 | Ovary | | disease | pSport1 |
| | OV5232 | | | | | |
| H0415 | H. Ovarian Tumor, II, | Ovarian Tumor, OV5232 | Ovary | | disease | pCMVSport 2.0 |
| | OV5232 | | | | | |
| H0416 | Human Neutrophils, | Human Neutrophil - | Blood | Cell Line | | pBluescript |
| | Activated, re-excision | Activated | | | | |
| H0417 | Human Pituitary, | Human Pituitary | | | | pBluescript |
| | subtracted VIII | | | | | |
| H0418 | Human Pituitary, | Human Pituitary | | | | pBluescript |
| | subtracted VII | | | | | |
| H0419 | Bone Cancer, re-excision | Bone Cancer | | | | Uni-ZAP XR |
| H0421 | Human Bone Marrow, | Bone Marrow | | | | pBluescript |
| | re-excision | | | | | |
| H0422 | T-Cell PHA 16 hrs | T-Cells | Blood | Cell Line | | pSport1 |
| H0423 | T-Cell PHA 24 hrs | T-Cells | Blood | Cell Line | | pSport1 |
| H0424 | Human Pituitary, subt IX | Human Pituitary | | | | pBluescript |
| H0427 | Human Adipose | Human Adipose, left | | | | pSport1 |
| | | hiplipoma | | | | |
| H0428 | Human Ovary | Human Ovary Tumor | Ovary | | | pSport1 |
| H0429 | K562 + PMA (36 hrs), re- | K562 Cell line | cell line | Cell Line | | ZAP Express |
| | excision | | | | | |
| H0431 | H. Kidney Medulla, re- | Kidney medulla | Kidney | | | pBluescript |
| | excision | | | | | |
| H0433 | Human Umbilical Vein | HUVE Cells | Umbilical vein | Cell Line | | pBluescript |
| | Endothelial cells, frac B, | | | | | |
| | re-excision | | | | | |
| H0434 | Human Brain, striatum, | Human Brain, Striatum | | | | pBluescript |
| | re-excision | | | | | |
| H0435 | Ovarian Tumor 10-3-95 | Ovarian Tumor, | Ovary | | | pCMVSport 2.0 |
| | | OV350721 | | | | |
| H0436 | Resting T-Cell Library, II | T-Cells | Blood | Cell Line | | pSport1 |
| H0437 | H Umbilical Vein | HUVE Cells | Umbilical vein | Cell Line | | Lambda ZAP II |
| | Endothelial Cells, frac A, | | | | | |
| | re-excision | | | | | |
| H0438 | H. Whole Brain #2, re- | Human Whole Brain #2 | | | | ZAP Express |
| | excision | | | | | |
| H0439 | Human Eosinophils | Eosinophils | | | | pBluescript |
| H0441 | H. Kidney Cortex, | Kidney cortex | Kidney | | | pBluescript |
| | subtracted | | | | | |
| H0443 | H. Adipose, subtracted | Human Adipose, left | | | | pSport1 |
| | | hiplipoma | | | | |
| H0444 | Spleen metastic | Spleen, Metastic | Spleen | | disease | pSport1 |
| | melanoma | malignant melanoma | | | | |
| H0445 | Spleen, Chronic | Human Spleen, CLL | Spleen | | disease | pSport1 |
| | lymphocytic leukemia | | | | | |
| H0449 | CD34+ cell, I | CD34 positive cells | | | | pSport1 |
| H0455 | H. Striatum Depression, | Human Brain, Striatum | Brain | | | pBluescript |
| | subt | Depression | | | | |
| H0457 | Human Eosinophils | Human Eosinophils | | | | pSport1 |
| H0458 | CD34+ cell, I, frac II | CD34 positive cells | | | | pSport1 |
| H0459 | CD34+cells, II, | CD34 positive cells | | | | pCMVSport 2.0 |
| | FRACTION 2 | | | | | |
| H0461 | H. Kidney Medulla, | Kidney medulla | Kidney | | | pBluescript |
| | subtracted | | | | | |
| H0462 | H. Amygdala | | Brain | | | pBluescript |
| | Depression, subtracted | | | | | |
| H0477 | Human Tonsil, Lib 3 | Human Tonsil | Tonsil | | | pSport1 |
| H0478 | Salivary Gland, Lib 2 | Human Salivary Gland | Salivary gland | | | pSport1 |
| H0479 | Salivary Gland, Lib 3 | Human Salivary Gland | Salivary gland | | | pSport1 |
| H0483 | Breast Cancer cell line, | Breast Cancer Cell line, | | | | pSport1 |
| | MDA 36 | MDA 36 | | | | |
| H0484 | Breast Cancer Cell line, | Breast Cancer Cell line, | | | | pSport1 |
| | angiogenic | Angiogenic, 36T3 | | | | |
| H0485 | Hodgkin''s Lymphoma I | Hodgkin''s Lymphoma I | | | disease | pCMVSport 2.0 |
| H0486 | Hodgkin''s Lymphoma II | Hodgkin''s Lymphoma II | | | disease | pCMVSport 2.0 |
| H0487 | Human Tonsils, lib I | Human Tonsils | | | | pCMVSport 2.0 |
| H0488 | Human Tonsils, Lib 2 | Human Tonsils | | | | pCMVSport 2.0 |
| H0489 | Crohn''s Disease | Ileum | Intestine | | disease | pSport1 |
| H0490 | HI-60, untreated, | Human HL-60 Cells, | Blood | Cell Line | | Uni-ZAP XR |
| | subtracted | unstimulated | | | | |
| H0491 | HL-60, PMA 4H, | HL-60 Cells, PMA | Blood | Cell Line | | Uni-ZAP XR |
| | subtracted | stimulated 4H | | | | |
| H0492 | HL-60, RA 4h, | HL-60 Cells, RA | Blood | Cell Line | | Uni-ZAP XR |
| | Subtracted | stimulated for 4H | | | | |
| H0494 | Keratinocyte | Keratinocyte | | | | pCMVSport 2.0 |
| H0497 | HEL cell line | HEL cell line | | HEL | | pSport1 |
| | | | | 92.1.7 | | |
| H0505 | Human Astrocyte | Human Astrocyte | | | | pSport1 |
| H0506 | Ulcerative Colitis | Colon | Colon | | | pSport1 |
| H0509 | Liver, Hepatoma | Human Liver, Hepatoma, | Liver | | disease | pCMVSport 3.0 |
| | | patient 8 | | | | |
| H0510 | Human Liver, normal | Human Liver, normal, | Liver | | | pCMVSport 3.0 |
| | | Patient # 8 | | | | |
| H0512 | Keratinocyte, lib 3 | Keratinocyte | | | | pCMVSport 2.0 |
| H0518 | pBMC stimulated w/ | pBMC stimulated with | | | | pCMVSport 3.0 |
| | poly I/C | poly I/C | | | | |
| H0519 | NTERA2, control | NTERA2, | | | | pCMVSport 3.0 |
| | | Teratocarcinoma cell line | | | | |
| H0520 | NTERA2 + retinoic acid, | NTERA2, | | | | pSport1 |
| | 14 days | Teratocarcinoma cell line | | | | |
| H0521 | Primary Dendritic Cells, | Primary Dendritic cells | | | | pCMVSport 3.0 |
| | lib 1 | | | | | |
| H0522 | Primary Dendritic | Primary Dendritic cells | | | | pCMVSport 3.0 |
| | cells, frac 2 | | | | | |
| H0525 | PCR, pBMC I/C treated | pBMC stimulated with | | | | PCRII |
| | | poly I/C | | | | |
| H0528 | Poly[I]/Poly[C] Normal | Poly[I]/Poly[C] Normal | | | | pCMVSport 3.0 |
| | Lung Fibroblasts | Lung Fibroblasts | | | | |
| H0529 | Myoloid Progenitor Cell | TF-1 Cell Line; Myoloid | | | | pCMVSport 3.0 |
| | Line | progenitor cell line | | | | |
| H0530 | Human Dermal | Human Dermal | | | | pSport1 |
| | Endothelial | Endothelial Cells; | | | | |
| | Cells, untreated | untreated | | | | |
| H0538 | Merkel Cells | Merkel cells | Lymph node | | | pSport1 |
| H0539 | Pancreas Islet Cell | Pancreas Islet Cell | Pancreas | | disease | pSport1 |
| | Tumor | Tumour | | | | |
| H0540 | Skin, burned | Skin, leg burned | Skin | | | pSport1 |
| H0542 | T Cell helper I | Helper T cell | | | | pCMVSport 3.0 |
| H0543 | T cell helper II | Helper T cell | | | | pCMVSport 3.0 |
| H0544 | Human endometrial | Human endometrial | | | | pCMVSport 3.0 |
| | stromal cells | stromal cells | | | | |
| H0545 | Human endometrial | Human endometrial | | | | pCMVSport 3.0 |
| | stromal cells-treated with | stromal cells-treated with | | | | |
| | progesterone | proge | | | | |
| H0546 | Human endometrial | Human endometrial | | | | pCMVSport 3.0 |
| | stromal cells-treated with | stromal cells-treated with | | | | |
| | estradiol | estra | | | | |
| H0547 | NTERA2 | NTERA2, | | | | pSport1 |
| | teratocarcinoma cell | Teratocarcinoma cell line | | | | |
| | line + retinoic acid (14 | | | | | |
| | days) | | | | | |
| H0549 | H. Epididiymus, caput & | Human Epididiymus, | | | | Uni-ZAP XR |
| | corpus | caput and corpus | | | | |
| H0550 | H. Epididiymus, cauda | Human Epididiymus, | | | | Uni-ZAP XR |
| | | cauda | | | | |
| H0551 | Human Thymus Stromal | Human Thymus Stromal | | | | pCMVSport 3.0 |
| | Cells | Cells | | | | |
| H0553 | Human Placenta | Human Placenta | | | | pCMVSport 3.0 |
| H0555 | Rejected Kidney, lib 4 | Human Rejected Kidney | Kidney | | disease | pCMVSport 3.0 |
| H0556 | Activated T- | T-Cells | Blood | Cell Line | | Uni-ZAP XR |
| | cell(12 h)/Thiouridine-re- | | | | | |
| | excision | | | | | |
| H0559 | HL-60, PMA 4H, re- | HL-60 Cells, PMA | Blood | Cell Line | | Uni-ZAP XR |
| | excision | stimulated 4H | | | | |
| H0560 | KMH2 | KMH2 | | | | pCMVSport 3.0 |
| H0561 | L428 | L428 | | | | pCMVSport 3.0 |
| H0562 | Human Fetal Brain, | Human Fetal Brain | | | | pCMVSport 2.0 |
| | normalized c5-11-26 | | | | | |
| H0563 | Human Fetal Brain, | Human Fetal Brain | | | | pCMVSport 2.0 |
| | normalized 50021F | | | | | |
| H0564 | Human Fetal Brain, | Human Fetal Brain | | | | pCMVSport 2.0 |
| | normalized C5001F | | | | | |
| H0566 | Human Fetal | Human Fetal Brain | | | | pCMVSport 2.0 |
| | Brain, normalized c50F | | | | | |
| H0567 | Human Fetal Brain, | Human Fetal Brain | | | | pCMVSport 2.0 |
| | normalized A5002F | | | | | |
| H0569 | Human Fetal Brain, | Human Fetal Brain | | | | pCMVSport 2.0 |
| | normalized CO | | | | | |
| H0570 | Human Fetal Brain, | Human Fetal Brain | | | | pCMVSport 2.0 |
| | normalized C500H | | | | | |
| H0571 | Human Fetal Brain, | Human Fetal Brain | | | | pCMVSport 2.0 |
| | normalized C500HE | | | | | |
| H0572 | Human Fetal Brain, | Human Fetal Brain | | | | pCMVSport 2.0 |
| | normalized AC5002 | | | | | |
| H0574 | Hepatocellular Tumor; | Hepatocellular Tumor | Liver | | disease | Lambda ZAP II |
| | re-excision | | | | | |
| H0575 | Human Adult | Human Adult Pulmonary | Lung | | | Uni-ZAP XR |
| | Pulmonary; re-excision | | | | | |
| H0576 | Resting T-Cell; re- | T-Cells | Blood | Cell Line | | Lambda ZAP II |
| | excision | | | | | |
| H0580 | Dendritic cells, pooled | Pooled dendritic cells | | | | pCMVSport 3.0 |
| H0581 | Human Bone Marrow, | Human Bone Marrow | Bone Marrow | | | pCMVSport 3.0 |
| | treated | | | | | |
| H0583 | B Cell lymphoma | B Cell Lymphoma | B Cell | | disease | pCMVSport 3.0 |
| H0584 | Activated T-cells, 24 hrs, | Activated T-Cells | Blood | Cell Line | | Uni-ZAP XR |
| | re-excision | | | | | |
| H0585 | Activated T-Cells, 12 hrs, | Activated T-Cells | Blood | Cell Line | | Uni-ZAP XR |
| | re-excision | | | | | |
| H0586 | Healing groin wound, 6.5 | healing groin wound, 6.5 | groin | | disease | pCMVSport 3.0 |
| | hours post incision | hours post incision - 2/ | | | | |
| H0587 | Healing groin wound; 7.5 | Groin-Feb. 19, 1997 | groin | | disease | pCMVSport 3.0 |
| | hours post incision | | | | | |
| H0589 | CD34 positive cells (cord | CD34 Positive Cells | Cord Blood | | | ZAP Express |
| | blood), re-ex | | | | | |
| H0590 | Human adult small | Human Adult Small | Small Int. | | | Uni-ZAP XR |
| | intestine, re-excision | Intestine | | | | |
| H0591 | Human T-cell | T-Cell Lymphoma | T-Cell | | disease | Uni-ZAP XR |
| | lymphoma; re-excision | | | | | |
| H0592 | Healing groin wound - | HGS wound healing | | | disease | pCMVSport 3.0 |
| | zero hr post-incision | project; abdomen | | | | |
| | (control) | | | | | |
| H0593 | Olfactory | Olfactory epithelium from | | | | pCMVSport 3.0 |
| | epithelium; nasalcavity | roof of left nasal cacit | | | | |
| H0594 | Human Lung Cancer; re- | Human Lung Cancer | Lung | | disease | Lambda ZAP II |
| | excision | | | | | |
| H0595 | Stomach cancer | Stomach Cancer - 5383A | | | disease | Uni-ZAP XR |
| | (human); re-excision | (human) | | | | |
| H0596 | Human Colon Cancer; re- | Human Colon Cancer | Colon | | | Lambda ZAP II |
| | excision | | | | | |
| H0597 | Human Colon; re- | Human Colon | | | | Lambda ZAP II |
| | excision | | | | | |
| H0598 | Human Stomach; re- | Human Stomach | Stomach | | | Uni-ZAP XR |
| | excision | | | | | |
| H0599 | Human Adult Heart; re- | Human Adult Heart | Heart | | | Uni-ZAP XR |
| | excision | | | | | |
| H0600 | Healing Abdomen | Abdomen | | | disease | pCMVSport 3.0 |
| | wound; 70&90 min post | | | | | |
| | incision | | | | | |
| H0601 | Healing Abdomen | Abdomen | | | disease | pCMVSport 3.0 |
| | Wound; 15 days post | | | | | |
| | incision | | | | | |
| H0602 | Healing Abdomen | Abdomen | | | disease | pCMVSport 3.0 |
| | Wound; 21&29 days post | | | | | |
| | incision | | | | | |
| H0604 | Human Pituitary, re- | Human Pituitary | | | | pBluescript |
| | excision | | | | | |
| H0606 | Human Primary Breast | Human Primary Breast | Breast | | disease | Uni-ZAP XR |
| | Cancer; re-excision | Cancer | | | | |
| H0607 | H. Leukocytes, | H. Leukocytes | | | | pCMVSport 1 |
| | normalized cot 50A3 | | | | | |
| H0609 | H. Leukocytes, | H. Leukocytes | | | | pCMVSport 1 |
| | normalized cot >500A | | | | | |
| H0611 | H. Leukocytes, | H. Leukocytes | | | | pCMVSport 1 |
| | normalized cot 500 B | | | | | |
| H0613 | H. Leukocytes, | H. Leukocytes | | | | pCMVSport 1 |
| | normalized cot 5B | | | | | |
| H0614 | H. Leukocytes, | H. Leukocytes | | | | pCMVSport 1 |
| | normalized cot 500 A | | | | | |
| H0615 | Human Ovarian Cancer | Ovarian Cancer | Ovary | | disease | Uni-ZAP XR |
| | Reexcision | | | | | |
| H0616 | Human Testes, | Human Testes | Testis | | | Uni-ZAP XR |
| | Reexcision | | | | | |
| H0617 | Human Primary Breast | Human Primary Breast | Breast | | disease | Uni-ZAP XR |
| | Cancer Reexcision | Cancer | | | | |
| H0618 | Human Adult Testes, | Human Adult Testis | Testis | | | Uni-ZAP XR |
| | Large Inserts, Reexcision | | | | | |
| H0619 | Fetal Heart | Human Fetal Heart | Heart | | | Uni-ZAP XR |
| H0620 | Human Fetal Kidney; | Human Fetal Kidney | Kidney | | | Uni-ZAP XR |
| | Reexcision | | | | | |
| H0622 | Human Pancreas Tumor; | Human Pancreas Tumor | Pancreas | | disease | Uni-ZAP XR |
| | Reexcision | | | | | |
| H0623 | Human Umbilical Vein; | Human Umbilical Vein | Umbilical vein | | | Uni-ZAP XR |
| | Reexcision | Endothelial Cells | | | | |
| H0624 | 12 Week Early Stage | Twelve Week Old Early | Embryo | | | Uni-ZAP XR |
| | Human II; Reexcision | Stage Human | | | | |
| H0625 | Ku 812F Basophils Line | Ku 812F Basophils | | | | pSport1 |
| H0626 | Saos2 Cells; Untreated | Saos2 Cell Line; Untreated | | | | pSport1 |
| H0627 | Saos2 Cells; Vitamin D3 | Saos2 Cell Line; Vitamin | | | | pSport1 |
| | Treated | D3 Treated | | | | |
| H0628 | Human Pre- | Human Pre-Differentiated | | | | Uni-ZAP XR |
| | Differentiated | Adipocytes | | | | |
| | Adipocytes | | | | | |
| H0629 | Human Leukocyte, | Human Normalized | | | | pCMVSport 1 |
| | control #2 | leukocyte | | | | |
| H0631 | Saos2, Dexamethosome | Saos2 Cell Line; | | | | pSport1 |
| | Treated | Dexamethosome Treated | | | | |
| H0632 | Hepatocellular Tumor; re- | Hepatocellular Tumor | Liver | | | Lambda ZAP II |
| | excision | | | | | |
| H0633 | Lung Carcinoma A549 | TNFalpha activated A549- | | | disease | pSport1 |
| | TNFalpha activated | Lung Carcinoma | | | | |
| H0634 | Human Testes Tumor, | Human Testes Tumor | Testis | | disease | Uni-ZAP XR |
| | re-excision | | | | | |
| H0635 | Human Activated T- | Activated T-Cells | Blood | Cell Line | | Uni-ZAP XR |
| | Cells, re-excision | | | | | |
| H0637 | Dendritic Cells From | Dentritic cells from CD34 | | | | pSport1 |
| | CD34 Cells | cells | | | | |
| H0638 | CD40 activated | CD40 activated monocyte | | | | pSport1 |
| | monocyte dendridic cells | dendridic cells | | | | |
| H0640 | Ficolled Human Stromal | Ficolled Human Stromal | | | | Other |
| | Cells, Untreated | Cells, Untreated | | | | |
| H0641 | LPS activated derived | LPS activated monocyte | | | | pSport1 |
| | dendritic cells | derived dendritic cells | | | | |
| H0642 | Hep G2 Cells, lambda | Hep G2 Cells | | | | Other |
| | library | | | | | |
| H0643 | Hep G2 Cells, PCR | Hep G2 Cells | | | | Other |
| | library | | | | | |
| H0644 | Human Placenta (re- | Human Placenta | Placenta | | | Uni-ZAP XR |
| | excision) | | | | | |
| H0645 | Fetal Heart, re-excision | Human Fetal Heart | Heart | | | Uni-ZAP XR |
| H0646 | Lung, Cancer (4005313 | Metastatic squamous cell | | | | pSport1 |
| | A3): Invasive Poorly | lung carcinoma, poorly di | | | | |
| | Differentiated Lung | | | | | |
| | Adenocarcinoma, | | | | | |
| H0647 | Lung, Cancer (4005163 | Invasive poorly | | | disease | pSport1 |
| | B7): Invasive, Poorly | differentiated lung | | | | |
| | Diff. Adenocarcinoma, | adenocarcinoma | | | | |
| | Metastatic | | | | | |
| H0648 | Ovary, Cancer: (4004562 | Papillary Cstic neoplasm | | | disease | pSport1 |
| | B6) Papillary Serous | of low malignant potentia | | | | |
| | Cystic Neoplasm, Low | | | | | |
| | Malignant Pot | | | | | |
| H0649 | Lung, Normal: (4005313 | Normal Lung | | | | pSport1 |
| | B1) | | | | | |
| H0650 | B-Cells | B-Cells | | | | pCMVSport 3.0 |
| H0651 | Ovary, Normal: | Normal Ovary | | | | pSport1 |
| | (9805C040R) | | | | | |
| H0652 | Lung, Normal: (4005313 | Normal Lung | | | | pSport1 |
| | B1) | | | | | |
| H0653 | Stromal Cells | Stromal Cells | | | | pSport1 |
| H0654 | Lung, Cancer: (4005313 | Metastatic Squamous cell | | | | Other |
| | A3) Invasive Poorly- | lung Carcinoma poorly dif | | | | |
| | differentiated Metastatic | | | | | |
| | lung adenoc | | | | | |
| H0656 | B-cells (unstimulated) | B-cells (unstimulated) | | | | pSport1 |
| H0657 | B-cells (stimulated) | B-cells (stimulated) | | | | pSport1 |
| H0658 | Ovary, Cancer | 9809C332-Poorly | Ovary & | | disease | pSport1 |
| | (9809C332): Poorly | differentiate | Fallopian | | | |
| | differentiated | | Tubes | | | |
| | adenocarcinoma | | | | | |
| H0659 | Ovary, Cancer | Grade II Papillary | Ovary | | disease | pSport1 |
| | (15395A1F): Grade II | Carcinoma, Ovary | | | | |
| | Papillary Carcinoma | | | | | |
| H0660 | Ovary, Cancer: | Poorly differentiated | | | disease | pSport1 |
| | (15799A1F) Poorly | carcinoma, ovary | | | | |
| | differentiated carcinoma | | | | | |
| H0661 | Breast, Cancer: (4004943 | Breast cancer | | | disease | pSport1 |
| | A5) | | | | | |
| H0662 | Breast, Normal: | Normal Breast - | Breast | | | pSport1 |
| | (4005522B2) | #4005522(B2) | | | | |
| H0663 | Breast, Cancer: (4005522 | Breast Cancer - | Breast | | disease | pSport1 |
| | A2) | #4005522(A2) | | | | |
| H0664 | Breast, Cancer: | Breast Cancer | Breast | | disease | pSport1 |
| | (9806C012R) | | | | | |
| H0665 | Stromal cells 3.88 | Stromal cells 3.88 | | | | pSport1 |
| H0666 | Ovary, Cancer: (4004332 | Ovarian Cancer, Sample | | | disease | pSport1 |
| | A2) | #4004332A2 | | | | |
| H0667 | Stromal cells(HBM3.18) | Stromal cell(HBM 3.18) | | | | pSport1 |
| H0668 | stromal cell clone 2.5 | stromal cell clone 2.5 | | | | pSport1 |
| H0669 | Breast, Cancer: | Breast Cancer | Breast | | | pSport1 |
| | (4005385 A2) | (4005385A2) | | | | |
| H0670 | Ovary, Cancer(4004650 | Ovarian Cancer - | | | | pSport1 |
| | A3): Well- | 4004650A3 | | | | |
| | Differentiated | | | | | |
| | Micropapillary Serous | | | | | |
| | Carcinoma | | | | | |
| H0671 | Breast, Cancer: | Breast Cancer-Sample # | | | | pSport1 |
| | (9802C02OE) | 9802C02OE | | | | |
| H0672 | Ovary, Cancer: (4004576 | Ovarian | Ovary | | | pSport1 |
| | A8) | Cancer(4004576A8) | | | | |
| H0673 | Human Prostate Cancer, | Human Prostate Cancer, | Prostate | | | Uni-ZAP XR |
| | StageB2; re-excision | stage B2 | | | | |
| H0674 | Human Prostate Cancer, | Human Prostate Cancer, | Prostate | | | Uni-ZAP XR |
| | Stage C; re-excission | stage C | | | | |
| H0675 | Colon, Cancer: | Colon Cancer 9808C064R | | | | pCMVSport 3.0 |
| | (9808C064R) | | | | | |
| H0676 | Colon, Cancer: | Colon Cancer 9808C064R | | | | pCMVSport 3.0 |
| | (9808C064R)-total RNA | | | | | |
| H0677 | TNFR degenerate oligo | B-Cells | | | | PCRII |
| H0678 | screened clones from | Placenta | Placenta | | | Other |
| | placental library | | | | | |
| H0682 | Serous Papillary | serous papillary | | | | pCMVSport 3.0 |
| | Adenocarcinoma | adenocarcinoma | | | | |
| | | (9606G304SPA3B) | | | | |
| H0683 | Ovarian Serous Papillary | Serous papillary | | | | pCMVSport 3.0 |
| | Adenocarcinoma | adenocarcinoma, stage 3C | | | | |
| | | (9804G01 | | | | |
| H0684 | Serous Papillary | Ovarian Cancer-9810G606 | Ovaries | | | pCMVSport 3.0 |
| | Adenocarcinoma | | | | | |
| H0685 | Adenocarcinoma of | Adenocarcinoma of | | | | pCMVSport 3.0 |
| | Ovary, Human Cell Line, | Ovary, Human Cell Line, | | | | |
| | # OVCAR-3 | # OVCAR- | | | | |
| H0686 | Adenocarcinoma of | Adenocarcinoma of | | | | pCMVSport 3.0 |
| | Ovary, Human Cell Line | Ovary, Human Cell Line, | | | | |
| | | # SW-626 | | | | |
| H0687 | Human normal | Human normal | Ovary | | | pCMVSport 3.0 |
| | ovary(#9610G215) | ovary(#9610G215) | | | | |
| H0688 | Human Ovarian | Human Ovarian | | | | pCMVSport 3.0 |
| | Cancer(#9807G017) | cancer(#9807G017), mRN | | | | |
| | | A from Maura Ru | | | | |
| H0689 | Ovarian Cancer | Ovarian Cancer, | | | | pCMVSport 3.0 |
| | | #9806G019 | | | | |
| H0690 | Ovarian Cancer, # | Ovarian Cancer, | | | | pCMVSport 3.0 |
| | 9702G001 | #9702G001 | | | | |
| H0691 | Normal Ovary, | normal ovary, #9710G208 | | | | pCMVSport 3.0 |
| | #9710G208 | | | | | |
| H0693 | Normal Prostate | Normal Prostate Tissue # | | | | pCMVSport 3.0 |
| | #ODQ3958EN | ODQ3958EN | | | | |
| H0694 | Prostate gland | Prostate gland, | prostate gland | | | pCMVSport 3.0 |
| | adenocarcinoma | adenocarcinoma, mod/diff, | | | | |
| | | gleason | | | | |
| H0695 | mononucleocytes from | mononucleocytes from | | | | pCMVSport 3.0 |
| | patient | patient at Shady Grove | | | | |
| | | Hospit | | | | |
| N0003 | Human Fetal Brain | Human Fetal Brain | | | | |
| N0006 | Human Fetal Brain | Human Fetal Brain | | | | |
| N0007 | Human Hippocampus | Human Hippocampus | | | | |
| N0009 | Human Hippocampus, | Human Hippocampus | | | | |
| | prescreened | | | | | |
| S0001 | Brain frontal cortex | Brain frontal cortex | Brain | | | Lambda ZAP II |
| S0002 | Monocyte activated | Monocyte-activated | blood | Cell Line | | Uni-ZAP XR |
| S0003 | Human Osteoclastoma | Osteoclastoma | bone | | disease | Uni-ZAP XR |
| S0004 | Prostate | Prostate BPH | Prostate | | | Lambda ZAP II |
| S0005 | Heart | Heart-left ventricle | Heart | | | pCDNA |
| S0006 | Neuroblastoma | Human Neural Blastoma | | | disease | pCDNA |
| S0007 | Early Stage Human Brain | Human Fetal Brain | | | | Uni-ZAP XR |
| S0010 | Human Amygdala | Amygdala | | | | Uni-ZAP XR |
| S0011 | STROMAL - | Osteoclastoma | bone | | disease | Uni-ZAP XR |
| | OSTEOCLASTOMA | | | | | |
| S0013 | Prostate | Prostate | prostate | | | Uni-ZAP XR |
| S0014 | Kidney Cortex | Kidney cortex | Kidney | | | Uni-ZAP XR |
| S0015 | Kidney medulla | Kidney medulla | Kidney | | | Uni-ZAP XR |
| S0016 | Kidney Pyramids | Kidney pyramids | Kidney | | | Uni-ZAP XR |
| S0021 | Whole brain | Whole brain | Brain | | | ZAP Express |
| S0022 | Human Osteoclastoma | Osteoclasma Stromal | | | | Uni-ZAP XR |
| | Stromal Cells - | Cells | | | | |
| | unamplified | | | | | |
| S0024 | Human Kidney Medulla - | Human Kidney Medulla | | | | |
| | unamplified | | | | | |
| S0026 | Stromal cell TF274 | stromal cell | Bone marrow | Cell Line | | Uni-ZAP XR |
| S0027 | Smooth muscle, serum | Smooth muscle | Pulmanary artery | Cell Line | | Uni-ZAP XR |
| | treated | | | | | |
| S0028 | Smooth muscle, control | Smooth muscle | Pulmanary artery | Cell Line | | Uni-ZAP XR |
| S0029 | brain stem | Brain stem | brain | | | Uni-ZAP XR |
| S0030 | Brain pons | Brain Pons | Brain | | | Uni-ZAP XR |
| S0031 | Spinal cord | Spinal cord | spinal cord | | | Uni-ZAP XR |
| S0032 | Smooth muscle-ILb | Smooth muscle | Pulmanary artery | Cell Line | | Uni-ZAP XR |
| | induced | | | | | |
| S0035 | Brain medulla oblongata | Brain medulla oblongata | Brain | | | Uni-ZAP XR |
| S0036 | Human Substantia Nigra | Human Substantia Nigra | | | | Uni-ZAP XR |
| S0037 | Smooth muscle, IL1b | Smooth muscle | Pulmanary artery | Cell Line | | Uni-ZAP XR |
| | induced | | | | | |
| S0038 | Human Whole Brain #2 - | Human Whole Brain #2 | | | | ZAP Express |
| | Oligo dT >1.5 Kb | | | | | |
| S0039 | Hypothalamus | Hypothalamus | Brain | | | Uni-ZAP XR |
| S0040 | Adipocytes | Human Adipocytes from | | | | Uni-ZAP XR |
| | | Osteoclastoma | | | | |
| S0042 | Testes | Human Testes | | | | ZAP Express |
| S0044 | Prostate BPH | prostate BPH | Prostate | | disease | Uni-ZAP XR |
| S0045 | Endothelial cells-control | Endothelial cell | endothelial cell- | Cell Line | | Uni-ZAP XR |
| | | | lung | | | |
| S0046 | Endothelial-induced | Endothelial cell | endothelial cell- | Cell Line | | Uni-ZAP XR |
| | | | lung | | | |
| S0048 | Human Hypothalamus, | Human Hypothalamus, | | | disease | Uni-ZAP XR |
| | Alzheimer''s | Alzheimer''s | | | | |
| S0049 | Human Brain, Striatum | Human Brain, Striatum | | | | Uni-ZAP XR |
| S0050 | Human Frontal Cortex, | Human Frontal Cortex, | | | disease | Uni-ZAP XR |
| | Schizophrenia | Schizophrenia | | | | |
| S0051 | Human | Human Hypothalamus, | | | disease | Uni-ZAP XR |
| | Hypothalmus, Schizophrenia | Schizophrenia | | | | |
| S0052 | neutrophils control | human neutrophils | blood | Cell Line | | Uni-ZAP XR |
| S0053 | Neutrophils IL-1 and | human neutrophil induced | blood | Cell Line | | Uni-ZAP XR |
| | LPS induced | | | | | |
| S0106 | STRIATUM | | BRAIN | | disease | Uni-ZAP XR |
| | DEPRESSION | | | | | |
| S0110 | Brain Amygdala | | Brain | | disease | Uni-ZAP XR |
| | Depression | | | | | |
| S0112 | Hypothalamus | | Brain | | | Uni-ZAP XR |
| S0114 | Anergic T-cell | Anergic T-cell | | Cell Line | | Uni-ZAP XR |
| S0116 | Bone marrow | Bone marrow | Bone marrow | | | Uni-ZAP XR |
| S0122 | Osteoclastoma- | Osteoclastoma | bone | | disease | pBluescript |
| | normalized A | | | | | |
| S0124 | Smooth muscle-edited A | Smooth muscle | Pulmanary artery | Cell Line | | Uni-ZAP XR |
| S0126 | Osteoblasts | Osteoblasts | Knee | Cell Line | | Uni-ZAP XR |
| S0132 | Epithelial-TNFa and INF | Airway Epithelial | | | | Uni-ZAP XR |
| | induced | | | | | |
| S0134 | Apoptotic T-cell | apoptotic cells | | Cell Line | | Uni-ZAP XR |
| S0136 | PERM TF274 | stromal cell | Bone marrow | Cell Line | | Lambda ZAP II |
| S0140 | eosinophil-IL5 induced | eosinophil | lung | Cell Line | | Uni-ZAP XR |
| S0142 | Macrophage-oxLDL | macrophage-oxidized LDL | blood | Cell Line | | Uni-ZAP XR |
| | | treated | | | | |
| S0144 | Macrophage (GM-CSF | Macrophage (GM-CSF | | | | Uni-ZAP XR |
| | treated) | treated) | | | | |
| S0146 | prostate-edited | prostate BPH | Prostate | | | Uni-ZAP XR |
| S0148 | Normal Prostate | Prostate | prostate | | | Uni-ZAP XR |
| S0150 | LNCAP prostate cell line | LNCAP Cell Line | Prostate | Cell Line | | Uni-ZAP XR |
| S0152 | PC3 Prostate cell line | PC3 prostate cell line | | | | Uni-ZAP XR |
| S0168 | Prostate/LNCAP, | PC3 prostate cell line | | | | pBluescript |
| | subtraction I | | | | | |
| S0176 | Prostate, normal, | Prostate | prostate | | | Uni-ZAP XR |
| | subtraction I | | | | | |
| S0180 | Bone Marrow Stroma, | Bone Marrow Stroma, | | | disease | Uni-ZAP XR |
| | TNF&LPS ind | TNF & LPS induced | | | | |
| S0182 | Human B Cell 8866 | Human B-Cell 8866 | | | | Uni-ZAP XR |
| S0188 | Prostate, BPH, Lib 2 | Human Prostate BPH | | | disease | pSport1 |
| S0190 | Prostate BPH, Lib 2, | Human Prostate BPH | | | | pSport1 |
| | subtracted | | | | | |
| S0192 | Synovial Fibroblasts | Synovial Fibroblasts | | | | pSport1 |
| | (control) | | | | | |
| S0194 | Synovial hypoxia | Synovial Fibroblasts | | | | pSport1 |
| S0196 | Synovial IL-1/TNF | Synovial Fibroblasts | | | | pSport1 |
| | stimulated | | | | | |
| S0206 | Smooth Muscle- HASTE | Smooth muscle | Pulmanary artery | Cell Line | | pBluescript |
| | normalized | | | | | |
| S0208 | Messangial cell, frac 1 | Messangial cell | | | | pSport1 |
| S0210 | Messangial cell, frac 2 | Messangial cell | | | | pSport1 |
| S0212 | Bone Marrow Stromal | Bone Marrow Stromal | | | | pSport1 |
| | Cell, untreated | Cell, untreated | | | | |
| S0214 | Human Osteoclastoma, | Osteoclastoma | bone | | disease | Uni-ZAP XR |
| | re-excision | | | | | |
| S0216 | Neutrophils IL-1 and | human neutrophil induced | blood | Cell Line | | Uni-ZAP XR |
| | LPS induced | | | | | |
| S0218 | Apoptotic T-cell, re- | apoptotic cells | | Cell Line | | Uni-ZAP XR |
| | excision | | | | | |
| S0220 | H. hypothalamus, frac | Hypothalamus | Brain | | | ZAP Express |
| | A; re-excision | | | | | |
| S0222 | H. Frontal | H. Brain, Frontal Cortex, | Brain | | disease | Uni-ZAP XR |
| | cortex, epileptic; re- | Epileptic | | | | |
| | excision | | | | | |
| S0242 | Synovial Fibroblasts | Synovial Fibroblasts | | | | pSport1 |
| | (Il1/TNF), subt | | | | | |
| S0250 | Human Osteoblasts II | Human Osteoblasts | Femur | | disease | pCMVSport 2.0 |
| S0260 | Spinal Cord, re-excision | Spinal cord | spinal cord | | | Uni-ZAP XR |
| S0276 | Synovial hypoxia-RSF | Synovial fobroblasts | Synovial tissue | | | pSport1 |
| | subtracted | (rheumatoid) | | | | |
| S0278 | H Macrophage (GM-CSF | Macrophage (GM-CSF | | | | Uni-ZAP XR |
| | treated), re-excision | treated) | | | | |
| S0280 | Human Adipose Tissue, | Human Adipose Tissue | | | | Uni-ZAP XR |
| | re-excision | | | | | |
| S0282 | Brain Frontal Cortex, re- | Brain frontal cortex | Brain | | | Lambda ZAP II |
| | excision | | | | | |
| S0292 | Osteoarthritis (OA-4) | Human Osteoarthritic | Bone | | disease | pSport1 |
| | | Cartilage | | | | |
| S0294 | Larynx tumor | Larynx tumor | Larynx, vocal | | disease | pSport1 |
| | | | cord | | | |
| S0298 | Bone marrow | Bone marrow | Bone marrow | | | pSport1 |
| | stroma, treated | stroma, treatedSB | | | | |
| S0300 | Frontal lobe, dementia; re- | Frontal Lobe | Brain | | | Uni-ZAP XR |
| | excision | dementia/Alzheimer''s | | | | |
| S0306 | Larynx normal #10 261-273 | Larynx normal | | | | pSport1 |
| S0308 | Spleen/normal | Spleen normal | | | | pSport1 |
| S0310 | Normal trachea | Normal trachea | | | | pSport1 |
| S0312 | Human | Human osteoarthritic | | | disease | pSport1 |
| | osteoarthritic; fraction II | cartilage | | | | |
| S0314 | Human | Human osteoarthritic | | | disease | pSport1 |
| | osteoarthritis; fraction I | cartilage | | | | |
| S0316 | Human Normal | Human Normal Cartilage | | | | pSport1 |
| | Cartilage, Fraction I | | | | | |
| S0318 | Human Normal Cartilage | Human Normal Cartilage | | | | pSport1 |
| | Fraction II | | | | | |
| S0328 | Palate carcinoma | Palate carcinoma | Uvula | | disease | pSport1 |
| S0330 | Palate normal | Palate normal | Uvula | | | pSport1 |
| S0332 | Pharynx carcinoma | Pharynx carcinoma | Hypopharynx | | | pSport1 |
| S0334 | Human Normal Cartilage | Human Normal Cartilage | | | | pSport1 |
| | Fraction III | | | | | |
| S0336 | Human Normal Cartilage | Human Normal Cartilage | | | | pSport1 |
| | Fraction IV | | | | | |
| S0338 | Human Osteoarthritic | Human osteoarthritic | | | disease | pSport1 |
| | Cartilage Fraction III | cartilage | | | | |
| S0340 | Human Osteoarthritic | Human osteoarthritic | | | disease | pSport1 |
| | Cartilage Fraction IV | cartilage | | | | |
| S0342 | Adipocytes; re-excision | Human Adipocytes from | | | | Uni-ZAP XR |
| | | Osteoclastoma | | | | |
| S0344 | Macrophage-oxLDL; re- | macrophage-oxidized LDL | blood | Cell Line | | Uni-ZAP XR |
| | excision | treated | | | | |
| S0346 | Human Amygdala; re- | Amygdala | | | | Uni-ZAP XR |
| | excision | | | | | |
| S0348 | Cheek Carcinoma | Cheek Carcinoma | | | disease | pSport1 |
| S0350 | Pharynx Carcinoma | Pharynx carcinoma | Hypopharynx | | disease | pSport1 |
| S0352 | Larynx Carcinoma | Larynx carcinoma | | | disease | pSport1 |
| S0354 | Colon Normal II | Colon Normal | Colon | | | pSport1 |
| S0356 | Colon Carcinoma | Colon Carcinoma | Colon | | disease | pSport1 |
| S0358 | Colon Normal III | Colon Normal | Colon | | | pSport1 |
| S0360 | Colon Tumor II | Colon Tumor | Colon | | disease | pSport1 |
| S0362 | Human Gastrocnemius | Gastrocnemius muscle | | | | pSport1 |
| S0364 | Human Quadriceps | Quadriceps muscle | | | | pSport1 |
| S0366 | Human Soleus | Soleus Muscle | | | | pSport1 |
| S0368 | Human Pancreatic | Islets of Langerhans | | | | pSport1 |
| | Langerhans | | | | | |
| S0370 | Larynx carcinoma II | Larynx carcinoma | | | disease | pSport1 |
| S0372 | Larynx carcinoma III | Larynx carcinoma | | | disease | pSport1 |
| S0374 | Normal colon | Normal colon | | | | pSport1 |
| S0376 | Colon Tumor | Colon Tumor | | | disease | pSport1 |
| S0378 | Pancreas normal PCA4 | Pancreas Normal PCA4 | | | | pSport1 |
| | No | No | | | | |
| S0380 | Pancreas Tumor PCA4 | Pancreas Tumor PCA4 Tu | | | disease | pSport1 |
| | Tu | | | | | |
| S0382 | Larynx carcinoma IV | Larynx carcinoma | | | disease | pSport1 |
| S0384 | Tongue carcinoma | Tongue carcinoma | | | disease | pSport1 |
| S0386 | Human Whole Brain, re- | Whole brain | Brain | | | ZAP Express |
| | excision | | | | | |
| S0388 | Human | Human Hypothalamus, | | | disease | Uni-ZAP XR |
| | Hypothalamus, schizophrenia, | Schizophrenia | | | | |
| | re-excision | | | | | |
| S0390 | Smooth muscle, control; | Smooth muscle | Pulmanary artery | Cell Line | | Uni-ZAP XR |
| | re-excision | | | | | |
| S0392 | Salivary Gland | Salivary gland; normal | | | | pSport1 |
| S0394 | Stomach; normal | Stomach; normal | | | | pSport1 |
| S0398 | Testis; normal | Testis; normal | | | | pSport1 |
| S0400 | Brain; normal | Brain; normal | | | | pSport1 |
| S0402 | Adrenal Gland, normal | Adrenal gland; normal | | | | pSport1 |
| S0404 | Rectum normal | Rectum, normal | | | | pSport1 |
| S0406 | Rectum tumour | Rectum tumour | | | | pSport1 |
| S0408 | Colon, normal | Colon, normal | | | | pSport1 |
| S0410 | Colon, tumour | Colon, tumour | | | | pSport1 |
| S0412 | Temporal cortex- | Temporal cortex, | | | disease | Other |
| | Alzheizmer; subtracted | alzheimer | | | | |
| S0414 | Hippocampus, Alzheimer | HippocampusAlzheimer | | | | Other |
| | Subtracted | Subtracted | | | | |
| S0418 | CHME Cell Line; treated | CHME Cell Line; treated | | | | pCMVSport 3.0 |
| | 5 hrs | | | | | |
| S0420 | CHME Cell | CHME Cell line, | | | | pSport1 |
| | Line, untreated | untreatetd | | | | |
| S0422 | Mo7e Cell Line GM-CSF | Mo7e Cell Line GM-CSF | | | | pCMVSport 3.0 |
| | treated (1 ng/ml) | treated (1 ng/ml) | | | | |
| S0424 | TF-1 Cell Line GM-CSF | TF-1 Cell Line GM-CSF | | | | pSport1 |
| | Treated | Treated | | | | |
| S0426 | Monocyte activated; re- | Monocyte-activated | blood | Cell Line | | Uni-ZAP XR |
| | excision | | | | | |
| S0428 | Neutrophils control; re- | human neutrophils | blood | Cell Line | | Uni-ZAP XR |
| | excision | | | | | |
| S0430 | Aryepiglottis Normal | Aryepiglottis Normal | | | | pSport1 |
| S0432 | Sinus piniformis Tumour | Sinus piniformis Tumour | | | | pSport1 |
| S0434 | Stomach Normal | Stomach Normal | | | disease | pSport1 |
| S0436 | Stomach Tumour | Stomach Tumour | | | disease | pSport1 |
| S0438 | Liver Normal Met5No | Liver Normal Met5No | | | | pSport1 |
| S0440 | Liver Tumour Met 5 Tu | Liver Tumour | | | | pSport1 |
| S0442 | Colon Normal | Colon Normal | | | | pSport1 |
| S0444 | Colon Tumor | Colon Tumour | | | disease | pSport1 |
| S0446 | Tongue Tumour | Tongue Tumour | | | | pSport1 |
| S0448 | Larynx Normal | Larynx Normal | | | | pSport1 |
| S0450 | Larynx Tumour | Larynx Tumour | | | | pSport1 |
| S0452 | Thymus | Thymus | | | | pSport1 |
| S0454 | Placenta | Placenta | Placenta | | | pSport1 |
| S0456 | Tongue Normal | Tongue Normal | | | | pSport1 |
| S0458 | Thyroid Normal (SDCA2 | Thyroid normal | | | | pSport1 |
| | No) | | | | | |
| S0460 | Thyroid Tumour | Thyroid Tumour | | | | pSport1 |
| S0462 | Thyroid Thyroiditis | Thyroid Thyroiditis | | | | pSport1 |
| S0464 | Larynx Normal | Larynx Normal | | | | pSport1 |
| S0466 | Larynx Tumor | Larynx Tumor | | | disease | pSport1 |
| S0468 | Ea.hy.926 cell line | Ea.hy.926 cell line | | | | pSport1 |
| S0470 | Adenocarcinoma | PYFD | | | disease | pSport1 |
| S0472 | Lung Mesothelium | PYBT | | | | pSport1 |
| S0474 | Human blood platelets | Platelets | Blood platelets | | | Other |
| S0665 | Human Amygdala; re- | Amygdala | | | | Uni-ZAP XR |
| | excission | | | | | |
| S3012 | Smooth Muscle Serum | Smooth muscle | Pulmanary artery | Cell Line | | pBluescript |
| | Treated, Norm | | | | | |
| S3014 | Smooth muscle, serum | Smooth muscle | Pulmanary artery | Cell Line | | pBluescript |
| | induced, re-exc | | | | | |
| S6014 | H. hypothalamus, frac A | Hypothalamus | Brain | | | ZAP Express |
| S6016 | H. Frontal Cortex, | H. Brain, Frontal Cortex, | Brain | | disease | Uni-ZAP XR |
| | Epileptic | Epileptic | | | | |
| S6022 | H. Adipose Tissue | Human Adipose Tissue | | | | Uni-ZAP XR |
| S6024 | Alzheimers, spongy | Alzheimer''s/Spongy | Brain | | disease | Uni-ZAP XR |
| | change | change | | | | |
| S6026 | Frontal Lobe, Dementia | Frontal Lobe | Brain | | | Uni-ZAP XR |
| | | dementia/Alzheimer''s | | | | |
| S6028 | Human Manic | Human Manic depression | Brain | | disease | Uni-ZAP XR |
| | Depression Tissue | tissue | | | | |
| T0002 | Activated T-cells | Activated T-Cell, PBL | Blood | Cell Line | | pBluescript SK− |
| | | fraction | | | | |
| T0003 | Human Fetal Lung | Human Fetal Lung | | | | pBluescript SK− |
| T0004 | Human White Fat | Human White Fat | | | | pBluescript SK− |
| T0006 | Human Pineal Gland | Human Pinneal Gland | | | | pBluescript SK− |
| T0007 | Colon Epithelium | Colon Epithelium | | | | pBluescriptISK− |
| T0008 | Colorectal Tumor | Colorectal Tumor | | | disease | pBluescript SK− |
| T0010 | Human Infant Brain | Human Infant Brain | | | | Other |
| T0023 | Human Pancreatic | Human Pancreatic | | | disease | pBluescript SK− |
| | Carcinoma | Carcinoma | | | | |
| T0039 | HSA 172 Cells | Human HSA172 cell line | | | | pBluescript SK− |
| T0040 | HSC172 cells | SA172 Cells | | | | pBluescript SK− |
| T0041 | Jurkat T-cell G1 phase | Jurkat T-cell | | | | pBluescript SK− |
| T0042 | Jurkat T-Cell, S phase | Jurkat T-Cell Line | | | | pBluescript SK− |
| T0048 | Human Aortic | Human Aortic | | | | pBluescript SK− |
| | Endothelium | Endothilium | | | | |
| T0049 | Aorta endothelial cells + TNF-a | Aorta endothelial cells | | | | pBluescript SK− |
| T0060 | Human White Adipose | Human White Fat | | | | pBluescript SK− |
| T0067 | Human Thyroid | Human Thyroid | | | | pBluescript SK− |
| T0068 | Normal Ovary, | Normal Ovary, | | | | pBluescript SK− |
| | Premenopausal | Premenopausal | | | | |
| T0069 | Human Uterus, normal | Human Uterus, normal | | | | pBluescript SK− |
| T0071 | Human Bone Marrow | Human Bone Marrow | | | | pBluescript SK− |
| T0079 | Human Kidney, normal | Human Kidney, normal | | | | pBluescript SK− |
| | Adult | Adult | | | | |
| T0082 | Human Adult Retina | Human Adult Retina | | | | pBluescript SK− |
| T0086 | Human Pancreatic | Human Pancreatic | | | disease | pBluescript SK− |
| | Carcinoma - Screened | Carcinoma | | | | |
| T0087 | Alzheimer''s, exon | | | | disease | pAMP |
| | trap, 712P | | | | | |
| T0103 | Human colon carcinoma | | | | | pBluescript SK− |
| | (HCC) cell line | | | | | |
| T0104 | HCC cell line metastisis | | | | | pBluescript SK− |
| | to liver | | | | | |
| T0109 | Human (HCC) cell line | | | | | pBluescript SK− |
| | liver (mouse) metastasis, | | | | | |
| | remake | | | | | |
| T0110 | Human colon carcinoma | | | | | pBluescript SK− |
| | (HCC) cell line, remake | | | | | |
| T0112 | Human (Caco-2) cell | | | | | pBluescript SK− |
| | line, adenocarcinoma, | | | | | |
| | colon | | | | | |
| T0114 | Human (Caco-2) cell | | | | | pBluescript SK− |
| | line, adenocarcinoma, | | | | | |
| | colon, remake | | | | | |
| T0115 | Human Colon Carcinoma | | | | | pBluescript SK− |
| | (HCC) cell line | | | | | |
| L0002 | Atrium cDNA library | | | | | |
| | Human heart | | | | | |
| L0005 | Clontech human aorta | | | | | |
| | polyA+ mRNA (#6572) | | | | | |
| L0015 | Human | | | | | |
| L0021 | Human adult (K. Okubo) | | | | | |
| L0022 | Human adult lung 3″ | | | | | |
| | directed MboI cDNA | | | | | |
| L0024 | Human brain ARSanders | | | | | |
| L0040 | Human colon mucosa | | | | | |
| L0041 | Human epidermal | | | | | |
| | keratinocyte | | | | | |
| L0045 | Human keratinocyte | | | | | |
| | differential display | | | | | |
| | (B. Lin) | | | | | |
| L0053 | Human pancreatic tumor | | | | | |
| L0055 | Human promyelocyte | | | | | |
| L0065 | Liver HepG2 cell line. | | | | | |
| L0096 | Subtracted human retina | | | | | |
| L0097 | Subtracted human retinal | | | | | |
| | pigment epithelium | | | | | |
| | (RPE) | | | | | |
| L0103 | DKFZphamy1 | amygdala | | | | |
| L0105 | Human aorta polyA+ | aorta | | | | |
| | (TFujiwara) | | | | | |
| L0142 | Human placenta cDNA | placenta | | | | |
| | (TFujiwara) | | | | | |
| L0143 | Human placenta polyA+ | placenta | | | | |
| | (TFujiwara) | | | | | |
| L0151 | Human testis (C. De | testis | | | | |
| | Smet) | | | | | |
| L0157 | Human fetal brain | | brain | | | |
| | (TFujiwara) | | | | | |
| L0163 | Human heart cDNA | | heart | | | |
| | (YNakamura) | | | | | |
| L0182 | Human HeLa (Y. Wang) | | | HeLa | | |
| L0187 | Human fibrosarcoma cell | fibrosarcoma | | HT1080 | | |
| | line HT1080 | | | | | |
| L0194 | Human pancreatic cancer | pancreatic cancer | | Patu 8988t | | |
| | cell line Patu 8988t | | | | | |
| L0295 | Human liver EST | | liver | | | |
| | (Y. L. Yu) | | | | | |
| L0309 | Human E8CASS | breast adenocarcinoma | | E8CASS; | | |
| | | | | variant | | |
| | | | | of MCF7 | | |
| L0351 | Infant brain, Bento | | | | | BA, M13-derived |
| | Soares | | | | | |
| L0352 | Normalized infant brain, | | | | | BA, M13-derived |
| | Bento Soares | | | | | |
| L0355 | P, Human foetal Brain | | | | | Bluescript |
| | Whole tissue | | | | | |
| L0356 | S, Human foetal | | | | | Bluescript |
| | Adrenals tissue | | | | | |
| L0361 | Stratagene ovary | | ovary | | | Bluescript SK |
| | (#937217) | | | | | |
| L0362 | Stratagene ovarian | | | | | Bluescript SK− |
| | cancer (#937219) | | | | | |
| L0363 | NCI_CGAP_GC2 | germ cell tumor | | | | Bluescript SK− |
| L0364 | NCI_CGAP_GC5 | germ cell tumor | | | | Bluescript SK− |
| L0365 | NCI_CGAP_Phe1 | pheochromocytoma | | | | Bluescript SK− |
| L0366 | Stratagene schizo brain | schizophrenic brain S-11 | | | | Bluescript SK− |
| | S11 | frontal lobe | | | | |
| L0367 | NCI_CGAP_Sch1 | Schwannoma tumor | | | | Bluescript SK− |
| L0368 | NCI_CGAP_SS1 | synovial sarcoma | | | | Bluescript SK− |
| L0369 | NCI_CGAP_AA1 | adrenal adenoma | adrenal gland | | | Bluescript SK− |
| L0370 | Johnston frontal cortex | pooled frontal lobe | brain | | | Bluescript SK− |
| L0371 | NCI_CGAP_Br3 | breast tumor | breast | | | Bluescript SK− |
| L0372 | NCI_CGAP_Co12 | colon tumor | colon | | | Bluescript SK− |
| L0373 | NCI_CGAP_Co11 | tumor | colon | | | Bluescript SK− |
| L0374 | NCI_CGAP_Co2 | tumor | colon | | | Bluescript SK− |
| L0375 | NCI_CGAP_Kid6 | kidney tumor | kidney | | | Bluescript SK− |
| L0376 | NCI_CGAP_Lar1 | larynx | larynx | | | Bluescript SK− |
| L0378 | NCI_CGAP_Lu1 | lung tumor | lung | | | Bluescript SK− |
| L0379 | NCI_CGAP_Lym3 | lymphoma | lymph node | | | Bluescript SK− |
| L0381 | NCI_CGAP_HN4 | squamous cell carcinoma | pharynx | | | Bluescript SK− |
| L0382 | NCI_CGAP_Pr25 | epithelium (cell line) | prostate | | | Bluescript SK− |
| L0383 | NCI_CGAP_Pr24 | invasive tumor (cell line) | prostate | | | Bluescript SK− |
| L0384 | NCI_CGAP_Pr23 | prostate tumor | prostate | | | Bluescript SK− |
| L0385 | NCI_CGAP_Gas1 | gastric tumor | stomach | | | Bluescript SK− |
| L0386 | NCI_CGAP_HN3 | squamous cell carcinoma | tongue | | | Bluescript SK− |
| | | from base of tongue | | | | |
| L0387 | NCI_CGAP_GCB0 | germinal center B-cells | tonsil | | | Bluescript SK− |
| L0388 | NCI_CGAP_HN6 | normal gingiva (cell line | | | | Bluescript SK− |
| | | from immortalized kerati | | | | |
| L0389 | NCI_CGAP_HN5 | normal gingiva (cell line | | | | Bluescript SK− |
| | | from primary keratinocyt | | | | |
| L0394 | H, Human adult Brain | | | | | gt11 |
| | Cortex tissue | | | | | |
| L0404 | b4HB3MA | | | | | Lafmid A |
| | Cot109 + 103 + 85-Bio | | | | | |
| L0411 | 1-NIB | | | | | Lafmid BA |
| L0415 | b4HB3MA Cot8-HAP-Ft | | | | | Lafmid BA |
| L0418 | b4HB3MA-Cot109 + 10- | | | | | Lafmid BA |
| | Bio | | | | | |
| L0428 | Cot1374Ft-4HB3MA | | | | | Lafmid BA |
| L0435 | Infant brain, LLNL array | | | | | lafmid BA |
| | of Dr. M. Soares 1NIB | | | | | |
| L0438 | normalized infant brain | total brain | brain | | | lafmid BA |
| | cDNA | | | | | |
| L0439 | Soares infant brain 1NIB | | whole brain | | | Lafmid BA |
| L0446 | N4HB3MK | | | | | Lafmid BK |
| L0455 | Human retina cDNA | retina | eye | | | lambda gt10 |
| | randomly primed | | | | | |
| | sublibrary | | | | | |
| L0456 | Human retina cDNA | retina | eye | | | lambda gt10 |
| | Tsp5091-cleaved | | | | | |
| | sublibrary | | | | | |
| L0457 | multi-tissue normalized | multi-tissue | pooled | | | lambda gt10 |
| | short-fragment | | | | | |
| L0459 | Adult heart, Clontech | | | | | Lambda gt11 |
| L0460 | Adult heart, Lambda | | | | | Lambda gt11 |
| | gt11 | | | | | |
| L0462 | WATM1 | | | | | lambda gt11 |
| L0463 | fetal brain cDNA | brain | brain | | | lambda gt11 |
| L0465 | TEST1, Human adult | | | | | lambda nm1149 |
| | Testis tissue | | | | | |
| L0471 | Human fetal heart, | | | | | Lambda ZAP |
| | Lambda ZAP Express | | | | | Express |
| L0475 | KG1-a Lambda Zap | | | KG1-a | | Lambda Zap |
| | Express cDNA library | | | | | Express |
| | | | | | | (Stratagene) |
| L0476 | Fetal brain, Stratagene | | | | | Lambda ZAP II |
| L0480 | Stratagene cat#937212 | | | | | Lambda ZAP, |
| | (1992) | | | | | pBluescript SK(−) |
| L0481 | CD34+DIRECTIONAL | | | | | Lambda ZAPII |
| L0483 | Human pancreatic islet | | | | | Lambda ZAPII |
| L0485 | STRATAGENE Human | skeletal muscle | leg muscle | | | Lambda ZAPII |
| | skeletal muscle cDNA | | | | | |
| | library, cat. #936215. | | | | | |
| L0492 | Human Genomic | | | | | pAMP |
| L0493 | NCI_CGAP_Ov26 | papillary serous carcinoma | ovary | | | pAMP1 |
| L0497 | NCI_CGAP_HSC4 | CD34+, CD38− from | bone marrow | | | pAMP1 |
| | | normal bone marrow | | | | |
| | | donor | | | | |
| L0498 | NCI_CGAP_HSC3 | CD34+, T negative, | bone marrow | | | pAMP1 |
| | | patient with chronic | | | | |
| | | myelogenou | | | | |
| L0499 | NCI_CGAP_HSC2 | stem cell 34+/38+ | bone marrow | | | pAMP1 |
| L0500 | NCI_CGAP_Brn20 | oligodendroglioma | brain | | | pAMP1 |
| L0502 | NCI_CGAP_Br15 | adenocarcinoma | breast | | | pAMP1 |
| L0503 | NCI_CGAP_Br17 | adenocarcinoma | breast | | | pAMP1 |
| L0504 | NCI_CGAP_Br13 | breast carcinoma in situ | breast | | | pAMP1 |
| L0505 | NCI_CGAP_Br12 | invasive carcinoma | breast | | | pAMP1 |
| L0506 | NCI_CGAP_Br16 | lobullar carcinoma in situ | breast | | | pAMP1 |
| L0507 | NCI_CGAP_Br14 | normal epithelium | breast | | | pAMP1 |
| L0508 | NCI_CGAP_Lu25 | bronchioalveolar | lung | | | pAMP1 |
| | | carcinoma | | | | |
| L0509 | NCI_CGAP_Lu26 | invasive adenocarcinoma | lung | | | pAMP1 |
| L0512 | NCI_CGAP_Ov36 | borderline ovarian | ovary | | | pAMP1 |
| | | carcinoma | | | | |
| L0513 | NCI_CGAP_Ov37 | early stage papillary | ovary | | | pAMP1 |
| | | serous carcinoma | | | | |
| L0514 | NCI_CGAP_Ov31 | papillary serous carcinoma | ovary | | | pAMP1 |
| L0515 | NCI_CGAP_Ov32 | papillary serous carcinoma | ovary | | | pAMP1 |
| L0517 | NCI_CGAP_Pr1 | | | | | pAMP10 |
| L0518 | NCI_CGAP_Pr2 | | | | | pAMP10 |
| L0519 | NCI_CGAP_Pr3 | | | | | pAMP10 |
| L0520 | NCI_CGAP_Alv1 | alveolar | | | | pAMP10 |
| | | rhabdomyosarcoma | | | | |
| L0521 | NCI_CGAP_Ew1 | Ewing''s sarcoma | | | | pAMP10 |
| L0522 | NCI_CGAP_Kid1 | kidney | | | | pAMP10 |
| L0523 | NCI_CGAP_Lip2 | liposarcoma | | | | pAMP10 |
| L0524 | NCI_CGAP_Li1 | liver | | | | pAMP10 |
| L0525 | NCI_CGAP_Li2 | liver | | | | pAMP10 |
| L0526 | NCI_CGAP_Pr12 | metastatic prostate bone | | | | pAMP10 |
| | | lesion | | | | |
| L0527 | NCI_CGAP_Ov2 | ovary | | | | pAMP10 |
| L0528 | NCI_CGAP_Pr5 | prostate | | | | pAMP10 |
| L0529 | NCI_CGAP_Pr6 | prostate | | | | pAMP10 |
| L0530 | NCI_CGAP_Pr8 | prostate | | | | pAMP10 |
| L0532 | NCI_CGAP_Thy1 | thyroid | | | | pAMP10 |
| L0533 | NCI_CGAP_HSC1 | stem cells | bone marrow | | | pAMP10 |
| L0534 | Chromosome 7 Fetal | brain | brain | | | pAMP10 |
| | Brain cDNA Library | | | | | |
| L0539 | Chromosome 7 Placental | | placenta | | | pAMP10 |
| | cDNA Library | | | | | |
| L0540 | NCI_CGAP_Pr10 | invasive prostate tumor | prostate | | | pAMP10 |
| L0542 | NCI_CGAP_Pr11 | normal prostatic epithelial | prostate | | | pAMP10 |
| | | cells | | | | |
| L0543 | NCI_CGAP_Pr9 | normal prostatic epithelial | prostate | | | pAMP10 |
| | | cells | | | | |
| L0544 | NCI_CGAP_Pr4 | prostatic intraepithelial | prostate | | | pAMP10 |
| | | neoplasia - high grade | | | | |
| L0545 | NCI_CGAP_Pr4.1 | prostatic intraepithelial | prostate | | | pAMP10 |
| | | neoplasia - high grade | | | | |
| L0546 | NCI_CGAP_Pr18 | stroma | prostate | | | pAMP10 |
| L0547 | NCI_CGAP_Pr16 | tumor | prostate | | | pAMP10 |
| L0549 | NCI_CGAP_HN10 | carcinoma in situ from | | | | pAMP10 |
| | | retromolar trigone | | | | |
| L0550 | NCI_CGAP_HN9 | normal squamous | | | | pAMP10 |
| | | epithelium from | | | | |
| | | retromolar trigone | | | | |
| L0551 | NCI_CGAP_HN7 | normal squamous | | | | pAMP10 |
| | | epithelium, floor of mouth | | | | |
| L0553 | NCI_CGAP_Co22 | colonic adenocarcinoma | colon | | | pAMP10 |
| L0554 | NCI_CGAP_Li8 | | liver | | | pAMP10 |
| L0558 | NCI_CGAP_Ov40 | endometrioid ovarian | ovary | | | pAMP10 |
| | | metastasis | | | | |
| L0559 | NCI_CGAP_Ov39 | papillary serous ovarian | ovary | | | pAMP10 |
| | | metastasis | | | | |
| L0560 | NCI_CGAP_HN12 | moderate to poorly | tongue | | | pAMP10 |
| | | differentiated invasive | | | | |
| | | carcino | | | | |
| L0561 | NCI_CGAP_HN11 | normal squamous | tongue | | | pAMP10 |
| | | epithelium | | | | |
| L0562 | Chromosome 7 HeLa | | | HeLa cell | | pAMP10 |
| | cDNA Library | | | line; | | |
| | | | | ATCC | | |
| L0564 | Jia bone marrow stroma | bone marrow stroma | | | | pBluescript |
| L0565 | Normal Human | Bone | Hip | | | pBluescript |
| | Trabecular Bone Cells | | | | | |
| L0581 | Stratagene liver | | liver | | | pBluescript SK |
| | (#937224) | | | | | |
| L0584 | Stratagene cDNA library | | | | | pBluescript SK(+) |
| | Human heart, | | | | | |
| | cat#936208 | | | | | |
| L0586 | HTCDL1 | | | | | pBluescript SK(−) |
| L0587 | Stratagene colon HT29 | | | | | pBluescript SK− |
| | (#937221) | | | | | |
| L0588 | Stratagene endothelial | | | | | pBluescript SK− |
| | cell 937223 | | | | | |
| L0589 | Stratagene fetal retina | | | | | pBluescript SK− |
| | 937202 | | | | | |
| L0590 | Stratagene fibroblast | | | | | pBluescript SK− |
| | (#937212) | | | | | |
| L0591 | Stratagene HeLa cell s3 | | | | | pBluescript SK− |
| | 937216 | | | | | |
| L0592 | Stratagene hNT neuron | | | | | pBluescript SK− |
| | (#937233) | | | | | |
| L0593 | Stratagene | | | | | pBluescript SK− |
| | neuroepithelium | | | | | |
| | (#937231) | | | | | |
| L0594 | Stratagene | | | | | pBluescript SK− |
| | neuroepithelium | | | | | |
| | NT2RAMI 937234 | | | | | |
| L0595 | Stratagene NT2 neuronal | neuroepithelial cells | brain | | | pBluescript SK− |
| | precursor 937230 | | | | | |
| L0596 | Stratagene colon | | colon | | | pBluescript SK− |
| | (#937204) | | | | | |
| L0597 | Stratagene corneal | | cornea | | | pBluescript SK− |
| | stroma (#937222) | | | | | |
| L0598 | Morton Fetal Cochlea | cochlea | ear | | | pBluescript SK− |
| L0599 | Stratagene lung | | lung | | | pBluescript SK− |
| | (#937210) | | | | | |
| L0600 | Weizmann Olfactory | olfactory epithelium | nose | | | pBluescript SK− |
| | Epithelium | | | | | |
| L0601 | Stratagene pancreas | | pancreas | | | pBluescript SK− |
| | (#937208) | | | | | |
| L0602 | Pancreatic Islet | pancreatic islet | pancreas | | | pBluescript SK− |
| L0603 | Stratagene placenta | | placenta | | | pBluescript SK− |
| | (#937225) | | | | | |
| L0604 | Stratagene muscle | muscle | skeletal muscle | | | pBluescript SK− |
| | 937209 | | | | | |
| L0605 | Stratagene fetal spleen | fetal spleen | spleen | | | pBluescript SK− |
| | (#937205) | | | | | |
| L0606 | NCI_CGAP_Lym5 | follicular lymphoma | lymph node | | | pBluescript SK− |
| L0607 | NCI_CGAP_Lym6 | mantle cell lymphoma | lymph node | | | pBluescript SK− |
| L0608 | Stratagene lung | lung carcinoma | lung | NCI-H69 | | pBluescript SK− |
| | carcinoma 937218 | | | | | |
| L0609 | Schiller astrocytoma | astrocytoma | brain | | | pBluescript SK− |
| | | | | | | (Stratagene) |
| L0610 | Schiller glioblastoma | glioblastoma multiforme | brain | | | pBluescript SK− |
| | multiforme | | | | | (Stratagene) |
| L0611 | Schiller meningioma | meningioma | brain | | | pBluescript SK− |
| | | | | | | (Stratagene) |
| L0612 | Schiller | oligodendroglioma | brain | | | pBluescript SK− |
| | oligodendroglioma | | | | | (Stratagene) |
| L0615 | 22 week old human fetal | | | | | pBluescriptII SK(−) |
| | liver cDNA library | | | | | |
| L0619 | Chromosome 9 exon II | | | | | pBluescriptIIKS+ |
| L0622 | HM1 | | | | | pcDNAII |
| | | | | | | (Invitrogen) |
| L0623 | HM3 | pectoral muscle (after | | | | pcDNAII |
| | | mastectomy) | | | | (Invitrogen) |
| L0625 | NCI_CGAP_AR1 | bulk alveolar tumor | | | | pCMV-SPORT2 |
| L0626 | NCI_CGAP_GC1 | bulk germ cell seminoma | | | | pCMV-SPORT2 |
| L0627 | NCI_CGAP_Co1 | bulk tumor | colon | | | pCMV-SPORT2 |
| L0628 | NCI_CGAP_Ov1 | ovary bulk tumor | ovary | | | pCMV-SPORT2 |
| L0629 | NCI_CGAP_Mel3 | metastatic melanoma to | bowel (skin | | | pCMV-SPORT4 |
| | | bowel | primary) | | | |
| L0630 | NCI_CGAP_CNS1 | substantia nigra | brain | | | pCMV-SPORT4 |
| L0631 | NCI_CGAP_Br7 | | breast | | | pCMV-SPORT4 |
| L0634 | NCI_CGAP_Ov8 | serous adenocarcinoma | ovary | | | pCMV-SPORT4 |
| L0635 | NCI_CGAP_PNS1 | dorsal root ganglion | peripheral | | | pCMV-SPORT4 |
| | | | nervous | | | |
| | | | system | | | |
| L0636 | NCI_CGAP_Pit1 | four pooled pituitary | brain | | | pCMV-SPORT6 |
| | | adenomas | | | | |
| L0637 | NCI_CGAP_Brn53 | three pooled meningiomas | brain | | | pCMV-SPORT6 |
| L0638 | NCI_CGAP_Brn35 | tumor, 5 pooled (see | brain | | | pCMV-SPORT6 |
| | | description) | | | | |
| L0639 | NCI_CGAP_Brn52 | tumor, 5 pooled (see | brain | | | pCMV-SPORT6 |
| | | description) | | | | |
| L0640 | NCI_CGAP_Br18 | four pooled high-grade | breast | | | pCMV-SPORT6 |
| | | tumors, including two | | | | |
| | | prima | | | | |
| L0641 | NCI_CGAP_Co17 | juvenile granulosa tumor | colon | | | pCMV-SPORT6 |
| L0642 | NCI_CGAP_Co18 | moderately differentiated | colon | | | pCMV-SPORT6 |
| | | adenocarcinoma | | | | |
| L0643 | NCI_CGAP_Co19 | moderately differentiated | colon | | | pCMV-SPORT6 |
| | | adenocarcinoma | | | | |
| L0644 | NCI_CGAP_Co20 | moderately differentiated | colon | | | pCMV-SPORT6 |
| | | adenocarcinoma | | | | |
| L0645 | NCI_CGAP_Co21 | moderately differentiated | colon | | | pCMV-SPORT6 |
| | | adenocarcinoma | | | | |
| L0646 | NCI_CGAP_Co14 | moderately-differentiated | colon | | | pCMV-SPORT6 |
| | | adenocarcinoma | | | | |
| L0647 | NCI_CGAP_Sar4 | five pooled sarcomas, | connective tissue | | | pCMV-SPORT6 |
| | | including myxoid | | | | |
| | | liposarcoma | | | | |
| L0648 | NCI_CGAP_Eso2 | squamous cell carcinoma | esophagus | | | pCMV-SPORT6 |
| L0649 | NCI_CGAP_GU1 | 2 pooled high-grade | genitourinary | | | pCMV-SPORT6 |
| | | transitional cell tumors | tract | | | |
| L0650 | NCI_CGAP_Kid13 | 2 pooled Wilms'' tumors, | kidney | | | pCMV-SPORT6 |
| | | one primary and one | | | | |
| | | metast | | | | |
| L0651 | NCI_CGAP_Kid8 | renal cell tumor | kidney | | | pCMV-SPORT6 |
| L0652 | NCI_CGAP_Lu27 | four pooled poorly- | lung | | | pCMV-SPORT6 |
| | | differentiated | | | | |
| | | adenocarcinomas | | | | |
| L0653 | NCI_CGAP_Lu28 | two pooled squamous cell | lung | | | pCMV-SPORT6 |
| | | carcinomas | | | | |
| L0654 | NCI_CGAP_Lu31 | | lung, cell line | | | pCMV-SPORT6 |
| L0655 | NCI_CGAP_Lym12 | lymphoma, follicular | lymph node | | | pCMV-SPORT6 |
| | | mixed small and large cell | | | | |
| L0656 | NCI_CGAP_Ov38 | normal epithelium | ovary | | | pCMV-SPORT6 |
| L0657 | NCI_CGAP_Ov23 | tumor, 5 pooled (see | ovary | | | pCMV-SPORT6 |
| | | description) | | | | |
| L0658 | NCI_CGAP_Ov35 | tumor, 5 pooled (see | ovary | | | pCMV-SPORT6 |
| | | description) | | | | |
| L0659 | NCI_CGAP_Pan1 | adenocarcinoma | pancreas | | | pCMV-SPORT6 |
| L0661 | NCI_CGAP_Mel15 | malignant melanoma, | skin | | | pCMV-SPORT6 |
| | | metastatic to lymph node | | | | |
| L0662 | NCI_CGAP_Gas4 | poorly differentiated | stomach | | | pCMV-SPORT6 |
| | | adenocarcinoma with | | | | |
| | | signet r | | | | |
| L0663 | NCI_CGAP_Ut2 | moderately-differentiated | uterus | | | pCMV-SPORT6 |
| | | endometrial adenocarcino | | | | |
| L0664 | NCI_CGAP_Ut3 | poorly-differentiated | uterus | | | pCMV-SPORT6 |
| | | endometrial | | | | |
| | | adenocarcinoma, | | | | |
| L0665 | NCI_CGAP_Ut4 | serous papillary | uterus | | | pCMV-SPORT6 |
| | | carcinoma, high grade, 2 | | | | |
| | | pooled t | | | | |
| L0666 | NCI_CGAP_Ut1 | well-differentiated | uterus | | | pCMV-SPORT6 |
| | | endometrial | | | | |
| | | adenocarcinoma, 7 | | | | |
| L0667 | NCI_CGAP_CML1 | myeloid cells, 18 pooled | whole blood | | | pCMV-SPORT6 |
| | | CML cases, BCR/ABL | | | | |
| | | rearra | | | | |
| L0686 | Stanley Frontal SN pool 2 | frontal lobe (see | brain | | | pCR2.1-TOPO |
| | | description) | | | | (Invitrogen) |
| L0690 | Testis, Subtracted | | | | | pCRII |
| L0697 | Testis 1 | | | | | PGEM 5zf(+) |
| L0698 | Testis 2 | | | | | PGEM 5zf(+) |
| L0708 | NIH_MGC_17 | rhabdomyosarcoma | muscle | | | pOTB7 |
| L0709 | NIH_MGC_21 | choriocarcinoma | placenta | | | pOTB7 |
| L0710 | NIH_MGC_7 | small cell carcinoma | lung | MGC3 | | pOTB7 |
| L0717 | Gessler Wilms tumor | | | | | pSPORT1 |
| L0731 | Soares_pregnant_uterus_NbHPU | | uterus | | | pT7T3-Pac |
| L0738 | Human colorectal cancer | | | | | pT7T3D |
| L0740 | Soares melanocyte | melanocyte | | | | pT7T3D |
| | 2NbHM | | | | | (Pharmacia) |
| | | | | | | with a modified |
| | | | | | | polylinker |
| L0741 | Soares adult brain | | brain | | | pT7T3D |
| | N2b4HB55Y | | | | | (Pharmacia) |
| | | | | | | with a modified |
| | | | | | | polylinker |
| L0742 | Soares adult brain | | brain | | | pT7T3D |
| | N2b5HB55Y | | | | | (Pharmacia) |
| | | | | | | with a modified |
| | | | | | | polylinker |
| L0743 | Soares breast 2NbHBst | | breast | | | pT7T3D |
| | | | | | | (Pharmacia) |
| | | | | | | with a modified |
| | | | | | | polylinker |
| L0744 | Soares breast 3NbHBst | | breast | | | pT7T3D |
| | | | | | | (Pharmacia) |
| | | | | | | with a modified |
| | | | | | | polylinker |
| L0745 | Soares retina N2b4HR | retina | eye | | | pT7T3D |
| | | | | | | (Pharmacia) |
| | | | | | | with a modified |
| | | | | | | polylinker |
| L0746 | Soares retina N2b5HR | retina | eye | | | pT7T3D |
| | | | | | | (Pharmacia) |
| | | | | | | with a modified |
| | | | | | | polylinker |
| L0747 | Soares_fetal_heart_NbH | | heart | | | pT7T3D |
| | H19W | | | | | (Pharmacia) |
| | | | | | | with a modified |
| | | | | | | polylinker |
| L0748 | Soares fetal liver spleen | | Liver and Spleen | | | pT7T3D |
| | 1NFLS | | | | | (Pharmacia) |
| | | | | | | with a modified |
| | | | | | | polylinker |
| L0749 | Soares_fetal_liver_spleen_1NFLS_S1 | | Liver and Spleen | | | pT7T3D |
| | | | | | | (Pharmacia) |
| | | | | | | with a modified |
| | | | | | | polylinker |
| L0750 | Soares_fetal_lung_NbHL | | lung | | | pT7T3D |
| | 19W | | | | | (Pharmacia) |
| | | | | | | with a modified |
| | | | | | | polylinker |
| L0751 | Soares ovary tumor | ovarian tumor | ovary | | | pT7T3D |
| | NbHOT | | | | | (Pharmacia) |
| | | | | | | with a modified |
| | | | | | | polylinker |
| L0752 | Soares_parathyroid_tumor_NbHPA | parathyroid tumor | parathyroid gland | | | pT7T3D |
| | | | | | | (Pharmacia) |
| | | | | | | with a modified |
| | | | | | | polylinker |
| L0753 | Soares_pineal_gland_N3 | | pineal gland | | | pT7T3D |
| | HPG | | | | | (Pharmacia) |
| | | | | | | with a modified |
| | | | | | | polylinker |
| L0754 | Soares placenta Nb2HP | | placenta | | | pT7T3D |
| | | | | | | (Pharmacia) |
| | | | | | | with a modified |
| | | | | | | polylinker |
| L0755 | Soares_placenta_8to9weeks_2NbHP8to9 W | | placenta | | | pT7T3D |
| | | | | | | (Pharmacia) |
| | | | | | | with a modified |
| | | | | | | polylinker |
| L0756 | Soares_multiple_sclerosis_2NbHMSP | multiple sclerosis lesions | | | | pT7T3D |
| | | | | | | (Pharmacia) |
| | | | | | | with a modified |
| | | | | | | polylinker V_TYPE |
| L0757 | Soares_senescent_fibroblasts_NbHSF | senescent fibroblast | | | | pT7T3D |
| | | | | | | (Pharmacia) |
| | | | | | | with a modified |
| | | | | | | polylinker V_TYPE |
| L0758 | Soares_testis_NHT | | | | | pT7T3D-Pac |
| | | | | | | (Pharmacia) with a |
| | | | | | | modified polylinker |
| L0759 | Soares_total_fetus_Nb2HF8_9 w | | | | | pT7T3D-Pac |
| | | | | | | (Pharmacia) with a |
| | | | | | | modified polylinker |
| L0760 | Barstead aorta HPLRB3 | aorta | | | | pT7T3D-Pac |
| | | | | | | (Pharmacia) with a |
| | | | | | | modified polylinker |
| L0761 | NCI_CGAP_CLL1 | B-cell, chronic lymphotic | | | | pT7T3D-Pac |
| | | leukemia | | | | (Pharmacia) with a |
| | | | | | | modified polylinker |
| L0762 | NCI_CGAP_Br1.1 | breast | | | | pT7T3D-Pac |
| | | | | | | (Pharmacia) with a |
| | | | | | | modified polylinker |
| L0763 | NCI_CGAP_Br2 | breast | | | | pT7T3D-Pac |
| | | | | | | (Pharmacia) with a |
| | | | | | | modified polylinker |
| L0764 | NCI_CGAP_Co3 | colon | | | | pT7T3D-Pac |
| | | | | | | (Pharmacia) with a |
| | | | | | | modified polylinker |
| L0765 | NCI_CGAP_Co4 | colon | | | | pT7T3D-Pac |
| | | | | | | (Pharmacia) with a |
| | | | | | | modified polylinker |
| L0766 | NCI_CGAP_GCB1 | germinal center B cell | | | | pT7T3D-Pac |
| | | | | | | (Pharmacia) with a |
| | | | | | | modified polylinker |
| L0767 | NCI_CGAP_GC3 | pooled germ cell tumors | | | | pT7T3D-Pac |
| | | | | | | (Pharmacia) with a |
| | | | | | | modified polylinker |
| L0768 | NCI_CGAP_GC4 | pooled germ cell tumors | | | | pT7T3D-Pac |
| | | | | | | (Pharmacia) with a |
| | | | | | | modified polylinker |
| L0769 | NCI_CGAP_Brn25 | anaplastic | brain | | | pT7T3D-Pac |
| | | oligodendroglioma | | | | (Pharmacia) with a |
| | | | | | | modified polylinker |
| L0770 | NCI_CGAP_Brn23 | glioblastoma (pooled) | brain | | | pT7T3D-Pac |
| | | | | | | (Pharmacia) with a |
| | | | | | | modified polylinker |
| L0771 | NCI_CGAP_Co8 | adenocarcinoma | colon | | | pT7T3D-Pac |
| | | | | | | (Pharmacia) with a |
| | | | | | | modified polylinker |
| L0772 | NCI_CGAP_Co10 | colon tumor RER+ | colon | | | pT7T3D-Pac |
| | | | | | | (Pharmacia) with a |
| | | | | | | modified polylinker |
| L0773 | NCI_CGAP_Co9 | colon tumor RER+ | colon | | | pT7T3D-Pac |
| | | | | | | (Pharmacia) with a |
| | | | | | | modified polylinker |
| L0774 | NCI_CGAP_Kid3 | | kidney | | | pT7T3D-Pac |
| | | | | | | (Pharmacia) with a |
| | | | | | | modified polylinker |
| L0775 | NCI_CGAP_Kid5 | 2 pooled tumors (clear cell | kidney | | | pT7T3D-Pac |
| | | type) | | | | (Pharmacia) with a |
| | | | | | | modified polylinker |
| L0776 | NCI_CGAP_Lu5 | carcinoid | lung | | | pT7T3D-Pac |
| | | | | | | (Pharmacia) with a |
| | | | | | | modified polylinker |
| L0777 | Soares_NhHMPu_S1 | Pooled human melanocyte, | mixed | | | pT7T3D-Pac |
| | | fetal heart, and pregnant | (see below) | | | (Pharmacia) with a |
| | | | | | | modified polylinker |
| L0778 | Barstead pancreas | | pancreas | | | pT7T3D-Pac |
| | HPLRB1 | | | | | (Pharmacia) with a |
| | | | | | | modified polylinker |
| L0779 | Soares_NFL_T_GBC_S1 | | pooled | | | pT7T3D-Pac |
| | | | | | | (Pharmacia) with a |
| | | | | | | modified polylinker |
| L0780 | Soares_NSF_F8_9 W_OT_PA_P_S1 | | pooled | | | pT7T3D-Pac |
| | | | | | | (Pharmacia) with a |
| | | | | | | modified polylinker |
| L0782 | NCI_CGAP_Pr21 | normal prostate | prostate | | | pT7T3D-Pac |
| | | | | | | (Pharmacia) with a |
| | | | | | | modified polylinker |
| L0783 | NCI_CGAP_Pr22 | normal prostate | prostate | | | pT7T3D-Pac |
| | | | | | | (Pharmacia) with a |
| | | | | | | modified polylinker |
| L0784 | NCI_CGAP_Lei2 | leiomyosarcoma | soft tissue | | | pT7T3D-Pac |
| | | | | | | (Pharmacia) with a |
| | | | | | | modified polylinker |
| L0785 | Barstead spleen HPLRB2 | | spleen | | | pT7T3D-Pac |
| | | | | | | (Pharmacia) with a |
| | | | | | | modified polylinker |
| L0786 | Soares_NbHFB | | whole brain | | | pT7T3D-Pac |
| | | | | | | (Pharmacia) with a |
| | | | | | | modified polylinker |
| L0787 | NCI_CGAP_Sub1 | | | | | pT7T3D-Pac |
| | | | | | | (Pharmacia) with a |
| | | | | | | modified polylinker |
| L0788 | NCI_CGAP_Sub2 | | | | | pT7T3D-Pac |
| | | | | | | (Pharmacia) with a |
| | | | | | | modified polylinker |
| L0789 | NCI_CGAP_Sub3 | | | | | pT7T3D-Pac |
| | | | | | | (Pharmacia) with a |
| | | | | | | modified polylinker |
| L0790 | NCI_CGAP_Sub4 | | | | | pT7T3D-Pac |
| | | | | | | (Pharmacia) with a |
| | | | | | | modified polylinker |
| L0791 | NCI_CGAP_Sub5 | | | | | pT7T3D-Pac |
| | | | | | | (Pharmacia) with a |
| | | | | | | modified polylinker |
| L0792 | NCI_CGAP_Sub6 | | | | | pT7T3D-Pac |
| | | | | | | (Pharmacia) with a |
| | | | | | | modified polylinker |
| L0793 | NCI_CGAP_Sub7 | | | | | pT7T3D-Pac |
| | | | | | | (Pharmacia) with a |
| | | | | | | modified polylinker |
| L0794 | NCI_CGAP_GC6 | pooled germ cell tumors | | | | pT7T3D-Pac |
| | | | | | | (Pharmacia) with a |
| | | | | | | modified polylinker |
| L0796 | NCI_CGAP_Brn50 | medulloblastoma | brain | | | pT7T3D-Pac |
| | | | | | | (Pharmacia) with a |
| | | | | | | modified polylinker |
| L0800 | NCI_CGAP_Co16 | colon tumor, RER+ | colon | | | pT7T3D-Pac |
| | | | | | | (Pharmacia) with a |
| | | | | | | modified polylinker |
| L0803 | NCI_CGAP_Kid11 | | kidney | | | pT7T3D-Pac |
| | | | | | | (Pharmacia) with a |
| | | | | | | modified polylinker |
| L0804 | NCI_CGAP_Kid12 | 2 pooled tumors (clear cell | kidney | | | pT7T3D-Pac |
| | | type) | | | | (Pharmacia) with a |
| | | | | | | modified polylinker |
| L0805 | NCI_CGAP_Lu24 | carcinoid | lung | | | pT7T3D-Pac |
| | | | | | | (Pharmacia) with a |
| | | | | | | modified polylinker |
| L0806 | NCI_CGAP_Lu19 | squamous cell carcinoma, | lung | | | pT7T3D-Pac |
| | | poorly differentiated (4 | | | | (Pharmacia) with a |
| | | | | | | modified polylinker |
| L0807 | NCI_CGAP_Ov18 | fibrotheoma | ovary | | | pT7T3D-Pac |
| | | | | | | (Pharmacia) with a |
| | | | | | | modified polylinker |
| L0808 | Barstead prostate BPH | | prostate | | | pT7T3D-Pac |
| | HPLRB41 | | | | | (Pharmacia) with a |
| | | | | | | modified polylinker |
| L0809 | NCI_CGAP_Pr28 | | prostate | | | pT7T3D-Pac |
| | | | | | | (Pharmacia) with a |
| | | | | | | modified polylinker |
| L0879 | BT0254 | | breast | | | puc18 |
| L0946 | BT0333 | | breast | | | puc18 |
| L1057 | BT0559 | | breast | | | puc18 |
| L1441 | CT0249 | | colon | | | puc18 |
| L1446 | CT0254 | | colon | | | puc18 |
| L1499 | CT0322 | | colon | | | puc18 |
| L1788 | HT0229 | | head_neck | | | puc18 |
| L1819 | HT0268 | | head_neck | | | puc18 |
| L1877 | HT0340 | | head_neck | | | puc18 |
| L1878 | HT0342 | | head_neck | | | puc18 |
| L2138 | ST0186 | | stomach | | | puc18 |
| L2174 | ST0240 | | stomach | | | puc18 |
| L2251 | Human fetal lung | Fetal lung | | | | |
| L2252 | Human placenta | placenta | | | | |
| L2255 | GLC | corresponding non | | | | pBluescript sk(−) |
| | | cancerous liver tissue | | | | |
| L2257 | NIH_MGC_65 | adenocarcinoma | colon | | | pCMV-SPORT6 |
| L2258 | NIH_MGC_67 | retinoblastoma | eye | | | pCMV-SPORT6 |
| L2259 | NIH_MGC_68 | large cell carcinoma | lung | | | pCMV-SPORT6 |
| L2260 | NIH_MGC_69 | large cell carcinoma, | lung | | | pCMV-SPORT6 |
| | | undifferentiated | | | | |
| L2261 | NIH_MGC_70 | epithelioid carcinoma | pancreas | | | pCMV-SPORT6 |
| L2262 | NIH_MGC_72 | melanotic melanoma | skin | | | pCMV-SPORT6 |
| L2263 | NIH_MGC_66 | adenocarcinoma | ovary | | | pCMV-SPORT6 |
| L2264 | NIH_MGC_71 | leiomyosarcoma | uterus | | | pCMV-SPORT6 |
| L2265 | NIH_MGC_39 | adenocarcinoma | pancreas | | | pOTB7 |
| L2270 | Lupski_dorsal_root_ganglion | dorsal root ganglia | | | | pCMV-SPORT6 |
| | | | | | | (Life |
| | | | | | | Technologies) |
| L2289 | BT0757 | | breast | | | puc18 |
| L2333 | CT0417 | | colon | | | puc18 |
| L2338 | CT0432 | | colon | | | puc18 |
| L2346 | CT0483 | | colon | | | puc18 |
| L2357 | UT0021 | | uterus_tumor | | | puc18 |
| L2367 | UT0039 | | uterus_tumor | | | puc18 |
| L2377 | NN0054 | | nervous_normal | | | puc18 |
| L2380 | NN0068 | | nervous_normal | | | puc18 |
| L2400 | NN0116 | | nervous_normal | | | puc18 |
| L2412 | NN0136 | | nervous_normal | | | puc18 |
| L2413 | NN0141 | | nervous_normal | | | puc18 |
| L2439 | NN1022 | | nervous_normal | | | puc18 |
| L2440 | NN1023 | | nervous_normal | | | puc18 |
| L2491 | HT0559 | | head_neck | | | puc18 |
| L2495 | HT0594 | | head_neck | | | puc18 |
| L2497 | HT0618 | | head_neck | | | puc18 |
| L2504 | HT0636 | | head_neck | | | puc18 |
| L2518 | HT0697 | | head_neck | | | puc18 |
| L2519 | HT0698 | | head_neck | | | puc18 |
| L2522 | HT0704 | | head_neck | | | puc18 |
| L2539 | HT0727 | | head_neck | | | puc18 |
| L2540 | HT0728 | | head_neck | | | puc18 |
| L2543 | HT0734 | | head_neck | | | puc18 |
| L2550 | HT0743 | | head_neck | | | puc18 |
| L2570 | HT0771 | | head_neck | | | puc18 |
| L2598 | HT0809 | | head_neck | | | puc18 |
| L2634 | HT0872 | | head_neck | | | puc18 |
| L2637 | HT0877 | | head_neck | | | puc18 |
| L2640 | HT0881 | | head_neck | | | puc18 |
| L2647 | HT0894 | | head_neck | | | puc18 |
| L2650 | HT0934 | | head_neck | | | puc18 |
| L2651 | NIH_MGC_20 | melanotic melanoma | skin | | | pOTB7 |
| L2653 | NIH_MGC_58 | hypernephroma | kidney | | | pDNR-LIB |
| | | | | | | (Clontech) |
| L2654 | NIH_MGC_9 | adenocarcinoma cell line | ovary | | | pOTB7 |
| L2655 | NIH_MGC_55 | from acute myelogenous | bone marrow | | | pDNR-LIB |
| | | leukemia | | | | (Clontech) |
| L2657 | NIH_MGC_54 | from chronic myelogenous | bone marrow | | | pDNR-LIB |
| | | leukemia | | | | (Clontech) |
| L2667 | NT0013 | | nervous_tumor | | | puc18 |
| L2669 | NT0022 | | nervous_tumor | | | puc18 |
| L2670 | NT0023 | | nervous_tumor | | | puc18 |
| L2671 | NT0024 | | nervous_tumor | | | puc18 |
| L2677 | NT0039 | | nervous_tumor | | | puc18 |
| L2686 | NT0058 | | nervous_tumor | | | puc18 |
| L2702 | NT0098 | | nervous_tumor | | | puc18 |
| L2708 | NT0104 | | nervous_tumor | | | puc18 |
| L2709 | NT0105 | | nervous_tumor | | | puc18 |
| L2716 | NT0117 | | nervous_tumor | | | puc18 |
| L2738 | GN0049 | | placenta_normal | | | puc18 |
| L2767 | FT0044 | | prostate_tumor | | | puc18 |
| L2791 | FT0077 | | prostate_tumor | | | puc18 |
| L2799 | FT0096 | | prostate_tumor | | | puc18 |
| L2804 | FT0103 | | prostate_tumor | | | puc18 |
| L2817 | FT0131 | | prostate_tumor | | | puc18 |
| L2831 | FT0162 | | prostate_tumor | | | puc18 |
| L2842 | UM0009 | | uterus | | | puc18 |
| L2852 | UM0077 | | uterus | | | puc18 |
| L2865 | AN0004 | | amnion_normal | | | puc18 |
| L2877 | AN0027 | | amnion_normal | | | puc18 |
| L2884 | AN0041 | | amnion_normal | | | puc18 |
| L2902 | BN0036 | | breast_normal | | | puc18 |
| L2904 | BN0042 | | breast_normal | | | puc18 |
| L2905 | BN0046 | | breast_normal | | | puc18 |
| L2906 | BN0047 | | breast_normal | | | puc18 |
| L2910 | BN0070 | | breast_normal | | | puc18 |
| L2915 | BN0098 | | breast_normal | | | puc18 |
| L2919 | BN0115 | | breast_normal | | | puc18 |
| L2962 | BN0221 | | breast_normal | | | puc18 |
| L2991 | BN0264 | | breast_normal | | | puc18 |
| L2999 | BN0273 | | breast_normal | | | puc18 |
| L3002 | BN0276 | | breast_normal | | | puc18 |
| L3019 | BN0303 | | breast_normal | | | puc18 |
| L3071 | EN0026 | | lung_normal | | | puc18 |
| L3089 | ET0018 | | lung_tumor | | | puc18 |
| L3104 | ET0041 | | lung_tumor | | | puc18 |
| L3111 | ET0058 | | lung_tumor | | | puc18 |
| L3117 | ET0068 | | lung_tumor | | | puc18 |
| L3118 | ET0070 | | lung_tumor | | | puc18 |
| L3119 | ET0072 | | lung_tumor | | | puc18 |
| L3127 | ET0084 | | lung_tumor | | | puc18 |
| L3140 | MT0031 | | marrow | | | puc18 |
| L3153 | MT0049 | | marrow | | | puc18 |
| L3199 | OT0019 | | ovary | | | puc18 |
| L3204 | OT0034 | | ovary | | | puc18 |
| L3207 | OT0063 | | ovary | | | puc18 |
| L3210 | OT0067 | | ovary | | | puc18 |
| L3215 | OT0083 | | ovary | | | puc18 |
| L3216 | OT0086 | | ovary | | | puc18 |
| L3226 | FN0019 | | prostate_normal | | | puc18 |
| L3262 | FN0073 | | prostate_normal | | | puc18 |
| L3281 | FN0107 | | prostate_normal | | | puc18 |
| L3311 | FN0180 | | prostate_normal | | | puc18 |
| L3316 | FN0188 | | prostate_normal | | | puc18 |
| L3327 | SN0024 | | stomach_normal | | | puc18 |
| L3330 | SN0041 | | stomach_normal | | | puc18 |
| L3352 | TN0027 | | testis_normal | | | puc18 |
| L3357 | TN0034 | | testis_normal | | | puc18 |
| L3372 | TN0068 | | testis_normal | | | puc18 |
| L3374 | TN0070 | | testis_normal | | | puc18 |
| L3377 | TN0079 | | testis_normal | | | puc18 |
| L3387 | GKB | hepatocellular carcinoma | | | | pBluescript sk(−) |
| L3388 | GKC | hepatocellular carcinoma | | | | pBluescript sk(−) |
| L3391 | NIH_MGC_53 | carcinoma, cell line | bladder | | | pDNR-LIB |
| | | | | | | (Clontech) |
| L3402 | AN0086 | | amnion_normal | | | puc18 |
| L3403 | AN0087 | | amnion_normal | | | puc18 |
| L3421 | BT0634 | | breast | | | puc18 |
| L3432 | CT0461 | | colon | | | puc18 |
| L3435 | CT0465 | | colon | | | puc18 |
| L3450 | CT0508 | | colon | | | puc18 |
| L3459 | FT0175 | | prostate_tumor | | | puc18 |
| L3466 | GN0020 | | placenta_normal | | | puc18 |
| L3480 | GN0057 | | placenta_normal | | | puc18 |
| L3484 | GN0067 | | placenta_normal | | | puc18 |
| L3485 | GN0070 | | placenta_normal | | | puc18 |
| L3491 | GN0076 | | placenta_normal | | | puc18 |
| L3496 | HT0572 | | head_neck | | | puc18 |
| L3499 | HT0617 | | head_neck | | | puc18 |
| L3503 | HT0870 | | head_neck | | | puc18 |
| L3504 | HT0873 | | head_neck | | | puc18 |
| L3506 | HT0879 | | head_neck | | | puc18 |
| L3511 | HT0900 | | head_neck | | | puc18 |
| L3516 | HT0913 | | head_neck | | | puc18 |
| L3518 | HT0915 | | head_neck | | | puc18 |
| L3521 | HT0919 | | head_neck | | | puc18 |
| L3530 | HT0939 | | head_neck | | | puc18 |
| L3561 | TN0025 | | testis_normal | | | puc18 |
| L3562 | TN0030 | | testis_normal | | | puc18 |
| L3603 | UM0093 | | uterus | | | puc18 |
| L3618 | UT0050 | | uterus_tumor | | | puc18 |
| L3632 | UT0074 | | uterus_tumor | | | puc18 |
| L3642 | ADA | Adrenal gland | | | | pBluescript sk(−) |
| L3643 | ADB | Adrenal gland | | | | pBluescript sk(−) |
| L3644 | ADC | Adrenal gland | | | | pBluescript sk(−) |
| L3645 | Cu | adrenal cortico adenoma | | | | pBluescript sk(−) |
| | | for Cushing''s syndrome | | | | |
| L3646 | DCA | | | | | pTriplEx2 |
| L3649 | DCB | | | | | pTriplEx2 |
| L3653 | HTB | Hypothalamus | | | | pBluescript sk(−) |
| L3655 | HTC | Hypothalamus | | | | pBluescript sk(−) |
| L3657 | HTF | Hypothalamus | | | | pBluescript sk(−) |
| L3658 | cdA | pheochromocytoma | | | | pTriplEx2 |
| L3659 | CB | cord blood | | | | pBluescript |
| L3661 | NPA | pituitary | | | | pBluescript sk(−) |
| L3665 | NIH_MGC_75 | | kidney | | | pDNR-LIB |
| | | | | | | (Clontech) |
| L3667 | NIH_MGC_79 | | placenta | | | pDNR-LIB |
| | | | | | | (Clontech) |
| L3673 | AN0084 | | amnion_normal | | | puc18 |
| L3684 | BT0812 | | breast | | | puc18 |
| L3705 | CT0486 | | colon | | | puc18 |
| L3729 | GN0079 | | placenta_normal | | | puc18 |
| L3744 | HT0916 | | head_neck | | | puc18 |
| L3750 | HT0945 | | head_neck | | | puc18 |
| L3783 | TN0136 | | testis_normal | | | puc18 |
| L3807 | UT0077 | | uterus_tumor | | | puc18 |
| L3808 | UT0078 | | uterus_tumor | | | puc18 |
| L3811 | NPC | pituitary | | | | pBluescript sk(−) |
| L3812 | NPD | pituitary | | | | pBluescript sk(−) |
| L3813 | TP | pituitary tumor | | | | pTriplEx2 |
| L3814 | BM | Bone marrow | | | | pTriplEx2 |
| L3815 | MDS | Bone marrow | | | | pTriplEx2 |
| L3816 | HEMBA1 | whole embryo, mainly | | | | pME18SFL3 |
| | | head | | | | |
| L3817 | HEMBB1 | whole embryo, mainly | | | | pME18SFL3 |
| | | body | | | | |
| L3819 | NIH_MGC_76 | | liver | | | pDNR-LIB |
| | | | | | | (Clontech) |
| L3824 | NT2RM2 | | | NT2 | | pME18SFL3 |
| L3825 | NT2RM4 | | | NT2 | | pME18SFL3 |
| L3826 | NT2RP1 | | | NT2 | | pUC19FL3 |
| L3827 | NT2RP2 | | | NT2 | | pME18SFL3 |
| L3828 | NT2RP3 | | | NT2 | | pME18SFL3 |
| L3829 | NT2RP4 | | | NT2 | | pME18SFL3 |
| L3831 | OVARC1 | ovary, tumor tissue | | | | pME18SFL3 |
| L3832 | PLACE1 | placenta | | | | pME18SFL3 |
| L3834 | PLACE3 | placenta | | | | pME18SFL3 |
| L3837 | THYRO1 | thyroid gland | | | | pME18SFL3 |
| L3841 | NIH_MGC_18 | large cell carcinoma | lung | | | pOTB7 |
| L3871 | NIH_MGC_19 | neuroblastoma | brain | | | pOTB7 |
| L3872 | NCI_CGAP_Skn1 | | skin, normal, 4 | | | pCMV-SPORT6 |
| | | | pooled sa | | | |
| L3904 | NCI_CGAP_Brn64 | glioblastoma with EGFR | brain | | | pCMV-SPORT6 |
| | | amplification | | | | |
| L3905 | NCI_CGAP_Brn67 | anaplastic | brain | | | pCMV-SPORT6 |
| | | oligodendroglioma with | | | | |
| | | 1p/19q loss | | | | |
| L4497 | NCI_CGAP_Br22 | invasive ductal carcinoma, | breast | | | pCMV-SPORT6 |
| | | 3 pooled samples | | | | |
| L4501 | NCI_CGAP_Sub8 | | | | | pT7T3D-Pac |
| | | | | | | (Pharmacia) with a |
| | | | | | | modified polylinker |
| L4537 | NCI_CGAP_Thy7 | follicular adenoma (benign | thyroid | | | pAMP10 |
| | | lesion) | | | | |
| L4556 | NCI_CGAP_HN13 | squamous cell carcinoma | tongue | | | pCMV-SPORT6 |
| L4558 | NCI_CGAP_Pan3 | | pancreas | | | pCMV-SPORT6 |
| L4560 | NCI_CGAP_Ut7 | tumor | uterus | | | pCMV-SPORT6 |
| L4669 | NCI_CGAP_Ov41 | serous papillary tumor | ovary | | | pCMV-SPORT6 |
| L4747 | NCI_CGAP_Brn41 | oligodendroglioma | brain | | | pT7T3D-Pac |
| | | | | | | (Pharmacia) with a |
| | | | | | | modified polylinker |
| L5286 | NCI_CGAP_Thy10 | medullary carcinoma | thyroid | | | pAMP10 |
| L5564 | NCI_CGAP_HN20 | | normal head/neck | | | pAMP1 |
| | | | tissue | | | |
| L5565 | NCI_CGAP_Brn66 | glioblastoma with | brain | | | pCMV-SPORT6 |
| | | probably TP53 mutation | | | | |
| | | and witho | | | | |
| L5566 | NCI_CGAP_Brn70 | anaplastic | brain | | | pCMV- |
| | | oligodendroglioma | | | | SPORT6.ccdb |
| L5568 | NCI_CGAP_HN21 | nasopharyngeal carcinoma | head/neck | | | pAMP1 |
| L5569 | NCI_CGAP_HN17 | normal epithelium | nasopharynx | | | pAMP10 |
| L5574 | NCI_CGAP_HN19 | normal epithelium | nasopharynx | | | pAMP10 |
| L5575 | NCI_CGAP_Brn65 | glioblastoma without | brain | | | pCMV-SPORT6 |
| | | EGFR amplification | | | | |
| L5622 | NCI_CGAP_Skn3 | | skin | | | pCMV-SPORT6 |
| L5623 | NCI_CGAP_Skn4 | squamous cell carcinoma | skin | | | pCMV-SPORT6 |

[0168] Description of Table 5

[0169] Table 5 provides a key to the OMIM reference identification numbers disclosed in Table 1B.1, column 9. OMIM reference identification numbers (Column 1) were derived from Online Mendelian Inheritance in Man (Online Mendelian Inheritance in Man, OMIM. McKusick-Nathans Institite for Genetic Medicine, Johns Hopkins University (Baltimore, Md.) and National Center for Biotechnology Information, National Library of Medicine, (Bethesda, Md.) 2000. World Wide Web URL:http://www.ncbi.nlm.nih.gov/omim/). Column 2 provides diseases associated with the cytologic band disclosed in Table 1B.1, column 8, as determined using the Morbid Map database.

TABLE 5

| OMIM Reference | Description |
|---|---|
| 100690 | Myasthenic syndrome, slow-channel congenital, 601462 |
| 100710 | Myasthenic syndrome, slow-channel congenital, 601462 |
| 101000 | Meningioma, NF2-related, sporadic Schwannoma, sporadic |
| 101000 | Neurofibromatosis, type 2 |
| 101000 | Neurolemmomatosis |
| 101000 | Malignant mesothelioma, sporadic |
| 102578 | Leukemia, acute promyelocytic, PML/RARA type |
| 102770 | Myoadenylate deaminase deficiency |
| 103050 | Autism, succinylpurinemic |
| 103050 | Adenylosuccinase deficiency |
| 103850 | Aldolase A deficiency |
| 104770 | Amyloidosis, secondary, susceptibility to |
| 106100 | Angioedema, hereditary |
| 106150 | Hypertension, essential, susceptibility to |
| 106150 | Preeclampsia, susceptibility to |
| 106165 | Hypertension, essential, 145500 |
| 106180 | Myocardial infarction, susceptibility to |
| 107300 | Antithrombin III deficiency |
| 107670 | Apolipoprotein A-II deficiency |
| 107741 | Hyperlipoproteinemia, type III |
| 107777 | Diabetes insipidus, nephrogenic, autosomal recessive, 222000 |
| 108725 | Atherosclerosis, susceptibility to |
| 108985 | Atrophia areata |
| 109270 | Rental tubular acidosis, distal, 179800 |
| 109270 | Spherocytosis, hereditary |
| 109270 | [Acanthocytosis, one form] |
| 109270 | [Elliptocytosis, Malaysian-Melanesian type] |
| 109270 | Hemolytic anemia due to band 3 defect |
| 109560 | Leukemia/lymphoma, B-cell, 3 |
| 109690 | Asthma, nocturnal, susceptibility to |
| 109690 | Obesity, susceptibility to |
| 109700 | Hemodialysis-related amyloidosis |
| 110100 | Blepharophimosis, epicanthus inversus, and ptosis, type 1 |
| 110700 | Vivax malaria, susceptibility to |
| 113100 | Brachydactyly, type C |
| 113900 | Heart block, progressive familial, type I |
| 114835 | Monocyte carboxyesterase deficiency |
| 115665 | Cataract, congenital, Volkmann type |
| 116800 | Cataract, Marner type |
| 116806 | Colorectal cancer |
| 116860 | Cavernous angiomatous malformations |
| 117700 | [Hypoceruloplasminemia, hereditary] |
| 117700 | Hemosiderosis, systemic, due to aceruloplasminemia |
| 118485 | Polycystic ovary syndrome with hyperandrogenemia |
| 118800 | Choreoathetosis, familial paroxysmal |
| 120070 | Alport syndrome, autosomal recessive, 203780 |
| 120131 | Alport syndrome, autosomal recessive, 203780 |
| 120131 | Hematuria, familial benign |
| 120140 | Osteoarthrosis, precocious |
| 120140 | SED congenita |
| 120140 | SMED Strudwick type |
| 120140 | Stickler syndrome, type I |
| 120140 | Wagner syndrome, type II |
| 120140 | Achondrogenesis-hypochondrogenesis, type II |
| 120140 | Kniest dysplasia |
| 120150 | Osteogenesis imperfecta, 4 clinical forms, 166200, 166210, 259420, 166220 |
| 120150 | Osteoporosis, idiopathic, 166710 |
| 120150 | Ehlers-Danlos syndrome, type VIIA1, 130060 |
| 120215 | Ehlers-Danlos syndrome, type I, 130000 |
| 120215 | Ehlers-Danlos syndrome, type II, 130010 |
| 120260 | Epiphyseal dysplasia, multiple, type 2, 600204 |
| 120435 | Muir-Torre syndrome, 158320 |
| 120435 | Colorectal cancer, hereditary, nonpolyposis, type 1 Ovarian cancer |
| 120550 | C1q deficiency, type A |
| 120570 | C1q deficiency, type B |
| 120575 | C1q deficiency, type C |
| 120700 | C3 deficiency |
| 120950 | C8 deficiency, type I |
| 120960 | C8 deficiency, type II |
| 121050 | Contractural arachnodactyly, congenital |
| 121360 | Myeloid leukemia, acute, M4Eo subtype |
| 121800 | Corneal dystrophy, crystalline, Schnyder |
| 122720 | Nicotine addiction, protection from |
| 122720 | Coumarin resistance, 122700 |
| 123000 | Craniometaphyseal dysplasia |
| 123270 | [Creatine kinase, brain type, ectopic expression of] |
| 123620 | Cataract, cerulean, type 2, 601547 |
| 123660 | Cataract, Coppock-like |
| 123940 | White sponge nevus, 193900 |
| 124030 | Parkinsonism, susceptibility to |
| 124030 | Debrisoquine sensitivity |
| 124200 | Darier disease (keratosis follicularis) |
| 125370 | Dentatorubro-pallidoluysian atrophy |
| 125660 | Myopathy, desminopathic |
| 125660 | Cardiomyopathy |
| 126090 | Hyperphenylalaninemia due to pterin-4a-carbinolamine dehydratase |
| | deficiency, 264070 |
| 126337 | Myxoid liposarcoma |
| 126340 | Xeroderma pigmentosum, group D, 278730 |
| 126391 | DNA ligase I deficiency |
| 126600 | Drusen, radial, autosomal dominant |
| 129010 | Neuropathy, congenital hypomyelinating, 1 |
| 129900 | EEC syndrome-1 |
| 130410 | Glutaricaciduria, type IIB |
| 130500 | Elliptocytosis-1 |
| 131210 | Atherosclerosis, susceptibility to |
| 131244 | Hirschsprung disease-2, 600155 |
| 131400 | Eosinophilia, familial |
| 132700 | Cylindromatosis |
| 133171 | [Erythrocytosis, familial], 133100 |
| 133200 | Erythrokeratodermia variabilis |
| 133530 | Xeroderma pigmentosum, group G, 278780 |
| 133701 | Exostoses, multiple, type 2 |
| 133780 | Vitreoretinopathy, exudative, familial |
| 134790 | Hyperferritinemia-cataract syndrome, 600886 |
| 135300 | Fibromatosis, gingival |
| 135940 | Ichthyosis vulgaris, 146700 |
| 136132 | [Fish-odor syndrome], 602079 |
| 136350 | Pfeiffer syndrome, 101600 |
| 136435 | Ovarian dysgenesis, hypergonadotropic, with normal karyotype, |
| | 233300 |
| 136550 | Macular dystrophy, North Carolina type |
| 136836 | Fucosyltransferase-6 deficiency |
| 138030 | [Hyperproglucagonemia] |
| 138040 | Cortisol resistance |
| 138140 | Glucose transport defect, blood-brain barrier |
| 138160 | Diabetes mellitus, noninsulin-dependent |
| 138160 | Fanconi-Bickel syndrome, 227810 |
| 138300 | Hemolytic anemia due to glutathione reductase deficiency |
| 138570 | Non-insulin dependent diabetes mellitus, susceptibility to |
| 138700 | [Apolipoprotein H deficiency] |
| 138981 | Pulmonary alveolar proteinosis, 265120 |
| 139250 | Isolated growth hormone deficiency, Illig type with absent GH and |
| | Kowarski type with bioinactive GH |
| 139350 | Epidermolytic hyperkeratosis, 113800 |
| 139350 | Keratoderma, palmoplantar, nonepidermolytic |
| 140100 | [Anhaptoglobinemia] |
| 140100 | [Hypohaptogloginemia] |
| 141750 | Alpha-thalassemia/mental retardation syndrome, type 1 |
| 141800 | Methemoglobinemias, alpha- |
| 141800 | Thalassemias, alpha- |
| 141800 | Erythremias, alpha- |
| 141800 | Heinz body anemias, alpha- |
| 141850 | Thalassemia, alpha- |
| 141850 | Erythrocytosis |
| 141850 | Heinz body anemia |
| 141850 | Hemoglobin H disease |
| 141850 | Hypochromic microcytic anemia |
| 142335 | Hereditary persistence of fetal hemoglobin, heterocellular, Indian |
| | type |
| 142600 | Hemolytic anemia due to hexokinase deficiency |
| 142989 | Synpolydactyly, type II, 186000 |
| 143890 | Hypercholesterolemia, familial |
| 145001 | Hyperparathyroidism-jaw tumor syndrome |
| 145260 | Pseudohypoaldosteronism, type II |
| 145505 | Hypertension, essential |
| 145981 | Hypocalciuric hypercalcemia, type II |
| 146200 | Hypoparathyroidism, familial |
| 146760 | [IgG receptor I, phagocytic, familial deficiency of] |
| 146790 | Lupus nephritis, susceptibility to |
| 147141 | Leukemia, acute lymphoblastic |
| 147440 | Growth retardation with deafness and mental retardation |
| 147670 | Rabson-Mendenhall syndrome |
| 147670 | Diabetes mellitus, insulin-resistant, with acanthosis nigricans |
| 147670 | Leprechaunism |
| 147781 | Atopy, susceptibility to |
| 148040 | Epidermolysis bullosa simplex, Koebner, Dowling-Meara, and |
| | Weber-Cockayne types, 131900, 131760, 131800 |
| 148041 | Pachyonychia congenita, Jadassohn-Lewandowsky type, 167200 |
| 148043 | Meesmann corneal dystrophy, 122100 |
| 148065 | White sponge nevus, 193900 |
| 148070 | Liver disease, susceptibility to, from hepatotoxins or viruses |
| 148080 | Epidermolytic hyperkeratosis, 113800 |
| 148370 | Keratolytic winter erythema |
| 148900 | Klippel-Feil syndrome with laryngeal malformation |
| 150200 | [Placental lactogen deficiency] |
| 150210 | Lactoferrin-deficient neutrophils, 245480 |
| 150292 | Epidermolysis bullosa, Herlitz junctional type, 226700 |
| 151440 | Leukemia, T-cell acute lymphoblastoid |
| 151670 | Hepatic lipase deficiency |
| 152427 | Long QT syndrome-2 |
| 152445 | Vohwinkel syndrome, 124500 |
| 152445 | Erythrokeratoderma, progressive symmetric, 602036 |
| 152760 | Hypogonadotropic hypogonadism due to GNRH deficiency, |
| | 227200 |
| 152780 | Hypogonadism, hypergonadotropic |
| 152780 | Male pseudohermaphroditism due to defective LH |
| 152790 | Precocious puberty, male, 176410 |
| 152790 | Leydig cell hypoplasia |
| 153454 | Ehlers-Danlos syndrome, type VI, 225400 |
| 153455 | Cutis laxa, recessive, type I, 219100 |
| 154275 | Malignant hyperthermia susceptibility 2 |
| 154276 | Malignant hyperthermia susceptibility 3 |
| 154545 | Chronic infections, due to opsonin defect |
| 154550 | Carbohydrate-deficient glycoprotein syndrome, type Ib, 602579 |
| 155555 | [Red hair/fair skin] |
| 155555 | UV-induced skin damage, vulnerability to |
| 156232 | Mesomelic dysplasia, Kantaputra type |
| 156850 | Cataract, congenital, with microphthalmia |
| 157147 | Abetalipoproteinemia, 200100 |
| 157170 | Holoprosencephaly-2 |
| 157640 | PEO with mitochondrial DNA deletions, type 1 |
| 158590 | Spinal muscular atrophy-4 |
| 159000 | Muscular dystrophy, limb-girdle, type 1A |
| 159001 | Muscular dystrophy, limb-girdle, type 1B |
| 160760 | Cardiomyopathy, familial hypertrophic, 1, 192600 |
| 160760 | Central core disease, one form |
| 160781 | Cardiomyopathy, hypertrophic, mid-left ventricular chamber type |
| 160900 | Myotonic dystrophy |
| 162150 | Obestiy with impaired prohormone processing, 600955 |
| 162200 | Neurofibromatosis, type 1 |
| 162200 | Watson syndrome, 193520 |
| 162400 | Neuropathy, hereditary sensory and autonomic, type 1 |
| 163729 | Hypertension, pregnancy-induced |
| 163950 | Noonan syndrome-1 |
| 163950 | Cardiofaciocutaneous syndrome, 115150 |
| 164731 | Ovarian carcinoma, 167000 |
| 164770 | Myeloid malignancy, predisposition to |
| 164953 | Liposarcoma |
| 167410 | Rhabdomyosarcoma, alveolar, 268220 |
| 168360 | Paraneoplastic sensory neuropathy |
| 168450 | Hypoparathyroidism, autosomal dominant |
| 168450 | Hypoparathyroidism, autosomal recessive |
| 168468 | Metaphyseal chondrodysplasia, Murk Jansen type, 156400 |
| 168500 | Parietal foramina |
| 169600 | Hailey-Hailey disease |
| 170500 | Myotonia congenita, atypical acetazolamide-responsive |
| 170500 | Paramyotonia congenita, 168300 |
| 170500 | Hyperkalemic periodic paralysis |
| 171190 | Hypertension, essential, 145500 |
| 171650 | Lysosomal acid phosphatase deficiency |
| 171760 | Hypophosphatasia, adult, 146300 |
| 171760 | Hypophosphatasia, infantile, 241500 |
| 172400 | Hemolytic anemia due to glucosephosphate isomerase deficiency |
| 172400 | Hydrops fetalis, one form |
| 172430 | Enolase deficiency |
| 172471 | Glycogenosis, hepatic, autosomal |
| 172490 | Phosphorylase kinase deficiency of liver and muscle, 261750 |
| 173470 | Glanzmann thrombasthenia, type B |
| 173610 | Platelet alpha/delta storage pool deficiency |
| 173850 | Polio, susceptibility to |
| 173870 | Xeroderma pigmentosum |
| 173870 | Fanconi anemia |
| 173910 | Polycystic kidney disease, adult, type II |
| 174000 | Medullary cystic kidney disease, AD |
| 174900 | Polyposis, juvenile intestinal |
| 176100 | Porphyria cutanea tarda |
| 176100 | Porphyria, hepatoerythropoietic |
| 176450 | Sacral agenesis-1 |
| 176830 | Obesity, adrenal insufficiency, and red hair |
| 176830 | ACTH deficiency |
| 176930 | Dysprothrombinemia |
| 176930 | Hypoprothrombinemia |
| 176960 | Pituitary tumor, invasive |
| 177400 | Apnea, postanesthetic |
| 178300 | Ptosis, hereditary congenital, 1 |
| 178600 | Pulmonary hypertension, familial primary |
| 178640 | Pulmonary alveolar proteinosis, congenital, 265120 |
| 179095 | Male infertility |
| 179755 | Renal cell carcinoma, papillary, 1 |
| 180069 | Retinal dystrophy, autosomal recessive, childhood-onset |
| 180069 | Retinitis pigmentosa-20 |
| 180069 | Leber congenital amaurosis-2, 204100 |
| 180071 | Retinitis pigmentosa, autosomal recessive |
| 180100 | Retinitis pigmentosa-1 |
| 180105 | Retinitis pigmentosa-10 |
| 180380 | Night blindness, congenital stationery, rhodopsin-related |
| 180380 | Retinitis pigmentosa, autosomal recessive |
| 180380 | Retinitis pigmentosa-4, autosomal dominant |
| 180901 | Malignant hyperthermia susceptibility 1, 145600 |
| 180901 | Central core disease, 117000 |
| 181405 | Scapuloperoneal spinal muscular atrophy, New England type |
| 181430 | Scapuloperoneal syndrome, myopathic type |
| 181460 | Schistosoma mansoni, susceptibility/resistance to |
| 182138 | Anxiety-related personality traits |
| 182280 | Small-cell cancer of lung |
| 182290 | Smith-Magenis syndrome |
| 182380 | Glucose/galactose malabsorption |
| 182381 | Renal glucosuria, 253100 |
| 182600 | Spastic paraplegia-3A |
| 182601 | Spastic paraplegia-4 |
| 182860 | Pyropoikilocytosis |
| 182860 | Spherocytosis, recessive |
| 182860 | Elliptocytosis-2 |
| 182900 | Spherocytosis-2 |
| 185800 | Symphalangism, proximal |
| 186580 | Arthrocutaneouveal granulomatosis |
| 186880 | Leukemia/lymphoma, T-cell |
| 186921 | Leukemia, T-cell acute lymphoblastic |
| 187040 | Leukemia-1, T-cell acute lymphoblastic |
| 188070 | Bleeding disorder due to defective thromboxane A2 receptor |
| 188450 | Goiter, adolescent multinodular |
| 188450 | Goiter, nonendemic, simple |
| 188450 | Hypothyroidism, hereditary congenital |
| 188826 | Sorsby fundus dystrophy, 136900 |
| 189800 | Preeclampsia/eclampsia |
| 190040 | Meningioma, SIS-related |
| 190040 | Dermatofibrosarcoma protuberans |
| 190040 | Giant-cell fibroblastoma |
| 190195 | Ichthyosiform erythroderma, congenital, 242100 |
| 190195 | Ichthyosis, lamellar, autosomal recessive, 242300 |
| 190198 | Leukemia, T-cell acute lymphoblastic |
| 190300 | Tremor, familial essential, 1 |
| 190605 | Triphalangeal thumb-polysyndactyly syndrome |
| 191044 | Cardiomyopathy, familial hypertrophic |
| 191092 | Tuberous sclerosis-2 |
| 191315 | Insensitivity to pain, congenital, with anhidrosis, 256800 |
| 192090 | Ovarian carcinoma |
| 192090 | Breast cancer, lobular |
| 192090 | Endometrial carcinoma |
| 192090 | Gastric cancer, familial, 137215 |
| 192340 | Diabetes insipidus, neurohypophyseal, 125700 |
| 192974 | Neonatal alloimmune thrombocytopenia |
| 192974 | Glycoprotein Ia deficiency |
| 193300 | Renal cell carcinoma |
| 193300 | von Hippel-Lindau syndrome |
| 193500 | Rhabdomyosarcoma, alveolar, 268220 |
| 193500 | Waardenburg syndrome, type I |
| 193500 | Waardenburg syndrome, type III, 148820 |
| 193500 | Craniofacial-deafness-hand syndrome, 122880 |
| 201450 | Acyl-CoA dehydrogenase, medium chain, deficiency of |
| 201460 | Acyl-CoA dehydrogenase, long chain, deficiency of |
| 201475 | VLCAD deficiency |
| 201810 | 3-beta-hydroxysteroid dehydrogenase, type II, deficiency |
| 203300 | Hermansky-Pudlak syndrome |
| 203500 | Alkaptonuria |
| 205100 | Amyotrophic lateral sclerosis, juvenile |
| 205900 | Anemia, Diamond-Blackfan |
| 207750 | Hyperlipoproteinemia, type Ib |
| 208250 | Jacobs syndrome |
| 208400 | Aspartylglucosaminuria |
| 212138 | Carnitine-acylcarnitine translocase deficiency |
| 216550 | Cohen syndrome |
| 216900 | Achromatopsia |
| 217300 | Cornea plana congenita, recessive |
| 217800 | Macular corneal dystrophy |
| 218030 | Apparent mineralocorticoid excess, hypertension due to |
| 221770 | Polycystic lipomembranous osteodysplasia with sclerosing |
| | leukencephalopathy |
| 221820 | Gliosis, familial progressive subcortical |
| 222700 | Lysinuric protein intolerance |
| 222745 | DECR deficiency |
| 222800 | Hemolytic anemia due to bisphosphoglycerate mutase deficiency |
| 222900 | Sucrose intolerance |
| 225500 | Ellis-van Creveld syndrome |
| 227645 | Fanconi anemia, type C |
| 227646 | Fanconi anemia, type D |
| 227650 | Fanconi anemia, type A |
| 229700 | Fructose-bisphosphatase deficiency |
| 229800 | [Fructosuria] |
| 230000 | Fucosidosis |
| 230400 | Galactosemia |
| 230800 | Gaucher disease |
| 230800 | Gaucher disease with cardiovascular calcification |
| 231550 | Achalasia-addisonianism-alacrimia syndrome |
| 231670 | Glutaricaciduria, type I |
| 231675 | Glutaricaciduria, type IIC |
| 231680 | Glutaricaciduria, type IIA |
| 232300 | Glycogen storage disease II |
| 232700 | Glycogen storage disease VI |
| 232800 | Glycogen storage disease VII |
| 233700 | Chronic granulomatous disease due to deficiency of NCF-1 |
| 234200 | Neurodegeneration with brain iron accumulation |
| 236250 | Homocystinuria due to MTHFR deficiency |
| 236730 | Urofacial syndrome |
| 237300 | Carbamoylphosphate synthetase I deficiency |
| 239100 | Van Buchem disease |
| 240400 | Scurvy |
| 245200 | Krabbe disease |
| 245900 | Norum disease |
| 245900 | Fish-eye disease |
| 246450 | HMG-CoA lyase deficiency |
| 248510 | Mannosidosis, beta- |
| 248600 | Maple syrup urine disease, type Ia |
| 248610 | Maple syrup urine disease, type II |
| 249000 | Meckel syndrome |
| 250250 | Cartilage-hair hypoplasia |
| 250790 | Methemoglobinemia due to cytochrome b5 deficiency |
| 250850 | Hypermethioninemia, persistent, autosomal dominant, due to |
| | methionine adenosyltransferase I/III deficiency |
| 251170 | Mevalonicaciduria |
| 251600 | Microphthalmia, autosomal recessive |
| 252500 | Mucolipidosis II |
| 252500 | Mucolipidosis III |
| 252900 | Sanfilippo syndrome, type A |
| 253000 | Mucopolysaccharidosis IVA |
| 253250 | Mulibrey nanism |
| 255800 | Schwartz-Jampel syndrome |
| 256030 | Nemaline myopathy-2 |
| 256540 | Galactosialidosis |
| 256700 | Neuroblastoma |
| 256731 | Ceroid-lipofuscinosis, neuronal-5, variant late infantile |
| 257200 | Niemann-Pick disease, type A |
| 257200 | Niemann-Pick disease, type B |
| 258501 | 3-methylglutaconicaciduria, type III |
| 258900 | Oroticaciduria |
| 259900 | Hyperoxaluria, primary, type 1 |
| 262000 | Bjornstad syndrome |
| 266200 | Anemia, hemolytic, due to PK deficiency |
| 270100 | Situs inversus viscerum |
| 270200 | Sjogren-Larsson syndrome |
| 272750 | GM2-gangliosidosis, AB variant |
| 272800 | Tay-Sachs disease |
| 272800 | [Hex A pseudodeficiency] |
| 272800 | GM2-gangliosidosis, juvenile, adult |
| 273800 | Thrombocytopenia, neonatal alloimmune |
| 273800 | Glanzmann thrombasthenia, type A |
| 276600 | Tyrosinemia, type II |
| 276700 | Tyrosinemia, type I |
| 276710 | Tyrosinemia, type III |
| 276900 | Usher syndrome, type 1A |
| 276901 | Usher syndrome, type 2 |
| 276902 | Usher syndrome, type 3 |
| 277700 | Werner syndrome |
| 278700 | Xeroderma pigmentosum, group A |
| 278760 | Xeroderma pigmentosum, group F |
| 300000 | Opitz G syndrome, type I |
| 300008 | Nephrolithiasis, type I, 310468 |
| 300008 | Proteinuria, low molecular weight, with hypercalciuric |
| | nephrocalcinosis |
| 300008 | Dent disease, 300009 |
| 300008 | Hypophosphatemia, type III |
| 300011 | Menkes disease, 309400 |
| 300011 | Occipital horn syndrome, 304150 |
| 300011 | Cutis laxa, neonatal |
| 300031 | Mental retardation, X-linked, FRAXF type |
| 300044 | Wernicke-Korsakoff syndrome, susceptibility to |
| 300046 | Mental retardation, X-linked 23, nonspecific |
| 300047 | Mental retardation, X-linked 20 |
| 300048 | Intestinal pseudoobstruction, neuronal, X-linked |
| 300049 | Nodular heterotopia, bilateral periventricular |
| 300049 | BPNH/MR syndrome |
| 300055 | Mental retardation with psychosis, pyramidal signs, and |
| | macroorchidism |
| 300066 | Deafness, X-linked 6, sensorineural |
| 300071 | Night blindness, congenital stationary, type 2 |
| 300075 | Coffin-Lowry syndrome, 303600 |
| 300077 | Mental retardation, X-linked 29 |
| 300100 | Adrenoleukodystrophy |
| 300100 | Adrenomyeloneuropathy |
| 300104 | Mental retardation, X-linked nonspecific, 309541 |
| 300110 | Night blindness, congenital stationary, X-linked incomplete, |
| | 300071 |
| 300123 | Mental retardation with isolated growth hormone deficiency |
| 300126 | Dyskeratosis congenita-1, 305000 |
| 300127 | Mental retardation, X-linked, 60 |
| 300310 | Agammaglobulinemia, type 2, X-linked |
| 300600 | Ocular albinism, Forsius-Eriksson type |
| 301000 | Thrombocytopenia, X-linked, 313900 |
| 301000 | Wiskott-Aldrich syndrome |
| 301200 | Amelogenesis imperfecta |
| 301201 | Amelogenesis imperfecta-3, hypoplastic type |
| 301220 | Partington syndrome II |
| 301590 | Anophthalmos-1 |
| 301830 | Arthrogryposis, X-linked (spinal muscular atrophy, infantile, X- |
| | linked) |
| 301835 | Arts syndrome |
| 301845 | Bazex syndrome |
| 302060 | Noncompaction of left ventricular myocardium, isolated |
| 302060 | Barth syndrome |
| 302060 | Cardiomyopathy, X-linked dilated, 300069 |
| 302060 | Endocardial fibroelastosis-2 |
| 302350 | Nance-Horan syndrome |
| 302801 | Charcot-Marie-Tooth neuropathy, X-linked-2, recessive |
| 302960 | Chondrodysplasia punctata, X-linked dominant |
| 303700 | Colorblindness, blue monochromatic |
| 303800 | Colorblindness, deutan |
| 303900 | Colorblindness, protan |
| 304040 | Charcot-Marie-Tooth neuropathy, X-linked-1, dominant, 302800 |
| 304050 | Aicardi syndrome |
| 304110 | Craniofrontonasal dysplasia |
| 304800 | Diabetes insipidus, nephrogenic |
| 305100 | Anhidrotic ectodermal dysplasia |
| 305435 | Heterocellular hereditary persistence of fetal hemoglobin, Swiss |
| | type |
| 305450 | FG syndrome |
| 305900 | Favism |
| 305900 | G6PD deficiency |
| 305900 | Hemolytic anemia due to G6PD deficiency |
| 306000 | Glycogenosis, X-linked hepatic, type I |
| 306000 | Glycogenosis, X-linked hepatic, type II |
| 306100 | Gonadal dysgenesis, XY female type |
| 306700 | Hemophilia A |
| 306995 | [Homosexuality, male] |
| 307150 | Hypertrichosis, congenital generalized |
| 307800 | Hypophosphatemia, hereditary |
| 308310 | Incontinentia pigmenti, familial |
| 308800 | Keratosis follicularis spinulosa decalvans |
| 308840 | Spastic paraplegia, 312900 |
| 308840 | Hydrocephalus due to aqueductal stenosis, 307000 |
| 308840 | MASA syndrome, 303350 |
| 309200 | Manic-depressive illness, X-linked |
| 309470 | Mental retardation, X-linked, syndromic-3, with spastic diplegia |
| 309500 | Renpenning syndrome-1 |
| 309510 | Mental retardation, X-linked, syndromic-1, with dystonic |
| | movements, ataxia, and seizures |
| 309530 | Mental retardation, X-linked 1, non-dysmorphic |
| 309548 | Mental retardation, X-linked, FRAXE type |
| 309585 | Mental retardation, X-linked, syndromic-6, with gynecomastia and |
| | obesity |
| 309605 | Mental retardation, X-linked, syndromic-4, with congenital |
| | contractures and low fingertip arches |
| 309610 | Mental retardation, X-linked, syndromic-2, with dysmorphism and |
| | cerebral atrophy |
| 309620 | Mental retardation-skeletal dysplasia |
| 309850 | Brunner syndrome |
| 309900 | Mucopolysaccharidosis II |
| 310300 | Emery-Dreifuss muscular dystrophy |
| 310400 | Myotubular myopathy, X-linked |
| 310460 | Myopia-1 |
| 310460 | Bornholm eye disease |
| 310490 | Cowchock syndrome |
| 311050 | Optic atrophy, X-linked |
| 311200 | Oral-facial-digital syndrome 1 |
| 311300 | Otopalatodigital syndrome, type I |
| 311510 | Waisman parkinsonism-mental retardation syndrome |
| 311850 | Phosphoribosyl pyrophosphate synthetase-related gout |
| 312040 | N syndrome, 310465 |
| 312060 | Properdin deficiency, X-linked |
| 312170 | Pyruvate dehydrogenase deficiency |
| 312700 | Retinoschisis |
| 312760 | Turner syndrome |
| 313400 | Spondyloepiphyseal dysplasia tarda |
| 313700 | Perineal hypospadias |
| 313700 | Prostate cancer |
| 313700 | Spinal and bulbar muscular atrophy of Kennedy, 313200 |
| 313700 | Breast cancer, male, with Reifenstein syndrome |
| 313700 | Androgen insensitivity, several forms |
| 314250 | Dystonia-3, torsion, with parkinsonism, Filipino type |
| 314300 | Goeminne TKCR syndrome |
| 314400 | Cardiac valvular dysplasia-1 |
| 314580 | Wieacker-Wolff syndrome |
| 600040 | Colorectal cancer |
| 600079 | Colon cancer |
| 600101 | Deafness, autosomal dominant 2 |
| 600119 | Muscular dystrophy, Duchenne-like, type 2 |
| 600119 | Adhalinopathy, primary |
| 600138 | Retinitis pigmentosa-11 |
| 600140 | Rubenstein-Taybi syndrome, 180849 |
| 600163 | Long QT syndrome-3 |
| 600173 | SCID, autosomal recessive, T-negative/B-positive type |
| 600175 | Spinal muscular atrophy, congenital nonprogressive, of lower limbs |
| 600194 | Ichthyosis bullosa of Siemens, 146800 |
| 600223 | Spinocerebellar ataxia-4 |
| 600231 | Palmoplantar keratoderma, Bothnia type |
| 600234 | HMG-CoA synthease-2 deficiency |
| 600243 | Temperature-sensitive apoptosis |
| 600258 | Colorectal cancer, hereditary nonpolyposis, type 3 |
| 600266 | Resistance/susceptibility to TB, etc. |
| 600273 | Polycystic kidney disease, infantile severe, with tuberous sclerosis |
| 600276 | Cerebral arteriopathy with subcortical infarcts and |
| | leukoencephalopathy, 125310 |
| 600281 | Non-insulin-dependent diabetes mellitus, 125853 |
| 600281 | MODY, type 1, 125850 |
| 600309 | Atrioventricular canal defect-1 |
| 600310 | Pseudoachondroplasia, 177170 |
| 600310 | Epiphyseal dysplasia, multiple 1, 132400 |
| 600320 | Insulin-dependent diabetes mellitus-5 |
| 600332 | Rippling muscle disease-1 |
| 600359 | Bartter syndrome, type 2 |
| 600374 | Bardet-Biedl syndrome 4 |
| 600510 | Pigment dispersion syndrome |
| 600512 | Epilepsy, partial |
| 600525 | Trichodontoosseous syndrome, 190320 |
| 600536 | Myopathy, congenital |
| 600593 | Craniosynostosis, Adelaide type |
| 600617 | Lipoid adrenal hyperplasia, 201710 |
| 600623 | Prostate cancer, 176807 |
| 600631 | Enuresis, nocturnal, 1 |
| 600650 | Myopathy due to CPT II deficiency, 255110 |
| 600650 | CPT deficiency, hepatic, type II, 600649 |
| 600652 | Deafness, autosomal dominant 4 |
| 600698 | Salivary adenoma |
| 600698 | Uterine leiomyoma |
| 600698 | Lipoma |
| 600698 | Lipomatosis, mutiple, 151900 |
| 600722 | Ceroid lipofuscinosis, neuronal, variant juvenile type, with granular |
| | osmiophilic deposits |
| 600722 | Ceroid lipofuscinosis, neuronal-1, infantile, 256730 |
| 600725 | Holoprosencephaly-3, 142945 |
| 600757 | Orofacial cleft-3 |
| 600759 | Alzheimer disease-4 |
| 600792 | Deafness, autosomal recessive 5 |
| 600807 | Bronchial asthma |
| 600808 | Enuresis, nocturnal, 2 |
| 600811 | Xeroderma pigmentosum, group E, DDB-negative subtype, 278740 |
| 600850 | Schizophrenia disorder-4 |
| 600852 | Retinitis pigmentosa-17 |
| 600881 | Cataract, congenital, zonular, with sutural opacities |
| 600882 | Charcot-Marie-Tooth neuropathy-2B |
| 600897 | Cataract, zonular pulverulent-1, 116200 |
| 600918 | Cystinuria, type III |
| 600956 | Persistent Mullerian duct syndrome, type II, 261550 |
| 600957 | Persistent Mullerian duct syndrome, type I, 261550 |
| 600958 | Cardiomyopathy, familial hypertrophic, 4, 115197 |
| 600968 | Gitelman syndrome, 263800 |
| 600975 | Glaucoma 3, primary infantile, B |
| 600995 | Nephrotic syndrome, idiopathic, steroid-resistant |
| 600996 | Arrhythmogenic right ventricular dysplasia-2 |
| 601097 | Neuropathy, recurrent, with pressure palsies, 162500 |
| 601097 | Charcot-Marie-Tooth neuropathy-1A, 118220 |
| 601097 | Dejerine-Sottas disease, PMP22 related, 145900 |
| 601105 | Pycnodysostosis, 265800 |
| 601199 | Neonatal hyperparathyroidism, 239200 |
| 601199 | Hypocalcemia, autosomal dominant, 601198 |
| 601199 | Hypocalciuric hypercalcemia, type I, 145980 |
| 601238 | Cerebellar ataxia, Cayman type |
| 601277 | Ichthyosis, lamellar, type 2 |
| 601284 | Hereditary hemorrhagic telangiectasia-2, 600376 |
| 601295 | Bile acid malabsorption, primary |
| 601309 | Basal cell carcinoma, sporadic |
| 601309 | Basal cell nevus syndrome, 109400 |
| 601313 | Polycystic kidney disease, adult type I, 173900 |
| 601369 | Deafness, autosomal dominant 9 |
| 601386 | Deafness, autosomal recessive 12 |
| 601402 | Leukemia, myeloid, acute |
| 601412 | Deafness, autosomal dominant 7 |
| 601414 | Retinitis pigmentosa-18 |
| 601458 | Inflammatory bowel disease-2 |
| 601493 | Cardiomyopathy, dilated 1C |
| 601517 | Spinocerebellar ataxia-2, 183090 |
| 601518 | Prostate cancer, hereditary, 1, 176807 |
| 601596 | Charcot-Marie-Tooth neuropathy, demyelinating |
| 601604 | Mycobacterial and salmonella infections, susceptibility to |
| 601650 | Paraganglioma, familial nonchromaffin, 2 |
| 601652 | Glaucoma 1A, primary open angle, juvenile-onset, 137750 |
| 601669 | Hirschsprung disease, one form |
| 601676 | Acute insulin response |
| 601682 | Glaucoma 1C, primary open angle |
| 601691 | Retinitis pigmentosa-19, 601718 |
| 601691 | Stargardt disease-1, 248200 |
| 601691 | Cone-rod dystrophy 3 |
| 601691 | Fundus flavimaculatus with macular dystrophy, 248200 |
| 601692 | Reis-Bucklers corneal dystrophy |
| 601692 | Corneal dystrophy, Avellino type |
| 601692 | Corneal dystrophy, Groenouw type I, 121900 |
| 601692 | Corneal dystrophy, lattice type I, 122200 |
| 601718 | Retinitis pigmentosa-19 |
| 601744 | Systemic lupus erythematosus, susceptibility to, 1 |
| 601769 | Osteoporosis, involutional |
| 601769 | Rickets, vitamin D-resistant, 277440 |
| 601771 | Glaucoma 3A, primary infantile, 231300 |
| 601780 | Ceroid-lipofuscinosis, neuronal-6, variant late infantile |
| 601785 | Carbohydrate-deficient glycoprotein syndrome, type I, 212065 |
| 601843 | Hypothyroidism, congenital, 274400 |
| 601844 | Pseudohypoaldosteronism type II |
| 601846 | Muscular dystrophy with rimmed vacuoles |
| 601863 | Bare lymphocyte syndrome, complementation group C |
| 601928 | Monilethrix, 158000 |
| 601954 | Muscular dystrophy, limb-girdle, type 2G |
| 601975 | Ectodermal dysplasia/skin fragility syndrome |
| 602025 | Obesity/hyperinsulinism, susceptibility to |
| 602078 | Fibrosis of extraocular muscles, congenital, 2 |
| 602085 | Postaxial polydactyly, type A2 |
| 602086 | Arrhythmogenic right ventricular dysplasia-3 |
| 602088 | Nephronophthisis, infantile |
| 602089 | Hemangioma, capillary, hereditary |
| 602092 | Deafness, autosomal recessive 18 |
| 602094 | Lipodystrophy, familial partial |
| 602116 | Glioma |
| 602121 | Deafness, autosomal dominant nonsyndromic sensorineural, 1, |
| | 124900 |
| 602134 | Tremor, familial essential, 2 |
| 602136 | Refsum disease, infantile, 266510 |
| 602136 | Zellweger syndrome-1, 214100 |
| 602136 | Adrenoleukodystrophy, neonatal, 202370 |
| 602153 | Monilethrix, 158000 |
| 602216 | Peutz-Jeghers syndrome, 175200 |
| 602225 | Cone-rod retinal dystrophy-2, 120970 |
| 602225 | Leber congenital amaurosis, type III |
| 602279 | Oculopharyngeal muscular dystorphy, 164300 |
| 602279 | Oculopharyngeal muscular dystrophy, autosomal recessive, 257950 |
| 602363 | Ellis-van Creveld-like syndrome |
| 602403 | Alzheimer disease, susceptibility to |
| 602447 | Coronary artery disease, susceptibility to |
| 602460 | Deafness, autosomal dominant 15, 602459 |
| 602477 | Febrile convulsions, familial, 2 |
| 602491 | Hyperlipidemia, familial combined, 1 |
| 602522 | Bartter syndrome, infantile, with sensorineural deafness |
| 602568 | Homocystinuria-megaloblastic anemia, cb1 E type, 236270 |
| 602574 | Deafness, autosomal dominant 12, 601842 |
| 602574 | Deafness, autosomal dominant 8, 601543 |
| 602629 | Dystonia-6, torsion |
| 602666 | Deafness, autosomal recessive 3, 600316 |
| 602716 | Nephrosis-1, congenital, Finnish type, 256300 |
| 602772 | Retinitis pitmentosa-24 |
| 602782 | Faisalabad histiocytosis |
| 602783 | Spastic paraplegia-7 |

[0170] Mature Polypeptides

[0171] The present invention also encompasses mature forms of a polypeptide having the amino acid sequence of SEQ ID NO:Y and/or the amino acid sequence encoded by the cDNA in a deposited clone. Polynucleotides encoding the mature forms (such as, for example, the polynucleotide sequence in SEQ ID NO:X and/or the polynucleotide sequence contained in the cDNA of a deposited clone) are also encompassed by the invention. Moreover, fragments or variants of these polypeptides (such as, fragments as described herein, polypeptides at least 80%, 85%, 90%, 95%, 96%, 97%, 98%, 99%, or 100% identical to these polypeptides, or polypeptides encoded by a polynucleotide that hybridizes under stringent conditions to the complementary strand of the polynucleotide encoding these polypeptides) are also encompassed by the invention. In preferred embodiments, these fragments or variants retain one or more functional acitivities of the full-length or mature form of the polypeptide (e.g., biological activity (such as, for example, activity useful in detecting, preventing, diagnosing, prognosticating, treating, and/or ameliorating cancer and other hyperproliferative disorders), antigenicity (ability to bind, or compete with a polypeptide of the invention for binding, to an anti-polypeptide of the invention antibody), immunogenicity (ability to generate antibody which binds to a specific polypeptide of the invention), ability to form multimers with polypeptides of the invention, and ability to bind to a receptor or ligand for a polypeptide of the invention). Antibodies that bind the polypeptides of the invention, and polynucleotides encoding these polypeptides are also encompassed by the invention.

[0172] According to the signal hypothesis, proteins secreted by mammalian cells have a signal or secretary leader sequence which is cleaved from the mature protein once export of the growing protein chain across the rough endoplasmic reticulum has been initiated. Most mammalian cells and even insect cells cleave secreted proteins with the same specificity. However, in some cases, cleavage of a secreted protein is not entirely uniform, which results in two or more mature species of the protein. Further, it has long been known that cleavage specificity of a secreted protein is ultimately determined by the primary structure of the complete protein, that is, it is inherent in the amino acid sequence of the polypeptide.

[0173] Methods for predicting whether a protein has a signal sequence, as well as the cleavage point for that sequence, are available. For instance, the method of McGeoch, Virus Res. 3:271-286 (1985), uses the information from a short N-terminal charged region and a subsequent uncharged region of the complete (uncleaved) protein. The method of von Heinje, Nucleic Acids Res. 14:4683-4690 (1986) uses the information from the residues surrounding the cleavage site, typically residues −13 to +2, where +1 indicates the amino terminus of the secreted protein. The accuracy of predicting the cleavage points of known mammalian secretory proteins for each of these methods is in the range of 75-80%. (von Heinje, supra.) However, the two methods do not always produce the same predicted cleavage point(s) for a given protein.

[0174] In the present case, the deduced amino acid sequence of the secreted polypeptide was analyzed by a computer program called SignalP (Henrik Nielsen et al., Protein Engineering 10:1-6 (1997)), which predicts the cellular location of a protein based on the amino acid sequence. As part of this computational prediction of localization, the methods of McGeoch and von Heinje are incorporated. The analysis of the amino acid sequences of the secreted proteins described herein by this program provided the results shown in Table 1A.

[0175] In specific embodiments, polypeptides of the invention comprise, or alternatively consist of, the predicted mature form of the polypeptide as delineated in columns 14 and 15 of Table 1A. Moreover, fragments or variants of these polypeptides (such as, fragments as described herein, polypeptides at least 80%, 85%, 90%, 95%, 96%, 97%, 98%, 99%, or 100% identical to these polypeptides, or polypeptides encoded by a polynucleotide that hybridizes under stringent conditions to the complementary strand of the polynucleotide encoding these polypeptides) are also encompassed by the invention. In preferred embodiments, these fragments or variants retain one or more functional acitivities of the full-length or mature form of the polypeptide (e.g., biological activity (such as, for example, activity useful in detecting, preventing, diagnosing, prognosticating, treating, and/or ameliorating cancer and other hyperproliferative disorders), antigenicity (ability to bind, or compete with a polypeptide of the invention for binding, to an anti-polypeptide of the invention antibody), immunogenicity (ability to generate antibody which binds to a specific polypeptide of the invention), ability to form multimers with polypeptides of the invention, and ability to bind to a receptor or ligand for a polypeptide of the invention). Antibodies that bind the polypeptides of the invention, and polynucleotides encoding these polypeptides are also encompassed by the invention.

[0176] Polynucleotides encoding proteins comprising, or consisting of, the predicted mature form of polypeptides of the invention (e.g., polynucleotides having the sequence of SEQ ID NO: X (Table 1A, column 4), the sequence delineated in columns 7 and 8 of Table 1A, and a sequence encoding the mature polypeptide delineated in columns 14 and 15 of Table 1A (e.g., the sequence of SEQ ID NO:X encoding the mature polypeptide delineated in columns 14 and 15 of Table 1)) are also encompassed by the invention, as are fragments or variants of these polynucleotides (such as, fragments as described herein, polynucleotides at least 80%, 85%, 90%, 95%, 96%, 97%, 98%, 99%, or 100% identical to these polyncueotides, and nucleic acids which hybridizes under stringent conditions to the complementary strand of the polynucleotide).

[0177] As one of ordinary skill would appreciate, however, cleavage sites sometimes vary from organism to organism and cannot be predicted with absolute certainty. Accordingly, the present invention provides secreted polypeptides having a sequence shown in SEQ ID NO:Y which have an N-terminus beginning within 15 residues of the predicted cleavage point (i.e., having 1, 2, 3, 4, 5, 6, 7, 8, 9, 10, 11, 12, 13, 14, or 15 more or less contiguous residues of SEQ ID NO:Y at the N-terminus when compared to the predicted mature form of the polypeptide (e.g., the mature polypeptide delineated in columns 14 and 15 of Table 1). Similarly, it is also recognized that in some cases, cleavage of the signal sequence from a secreted protein is not entirely uniform, resulting in more than one secreted species. These polypeptides, and the polynucleotides encoding such polypeptides, are contemplated by the present invention.

[0178] Moreover, the signal sequence identified by the above analysis may not necessarily predict the naturally occurring signal sequence. For example, the naturally occurring signal sequence may be further upstream from the predicted signal sequence. However, it is likely that the predicted signal sequence will be capable of directing the secreted protein to the ER. Nonetheless, the present invention provides the mature protein produced by expression of the polynucleotide sequence of SEQ ID NO:X and/or the polynucleotide sequence contained in the cDNA of a deposited clone, in a mammalian cell (e.g., COS cells, as desribed below). These polypeptides, and the polynucleotides encoding such polypeptides, are contemplated by the present invention.

[0179] Polynucleotide and Polypeptide Variants

[0180] The present invention is also directed to variants of the polynucleotide sequence disclosed in SEQ ID NO:X or the complementary strand thereto, nucleotide sequences encoding the polypeptide of SEQ ID NO:Y, the nucleotide sequence of SEQ ID NO:X that encodes the polypeptide sequence as defined in columns 13 and 14 of Table 1A, nucleotide sequences encoding the polypeptide sequence as defined in columns 13 and 14 of Table 1A, the nucleotide sequence of SEQ ID NO:X encoding the polypeptide sequence as defined in Table 1B, the nucleotide sequence as defined in columns 8 and 9 of Table 2, nucleotide sequences encoding the polypeptide encoded by the nucleotide sequence as defined in columns 8 and 9 of Table 2, the nucleotide sequence as defined in column 6 of Table 1C, nucleotide sequences encoding the polypeptide encoded by the nucleotide sequence as defined in column 6 of Table 1C, the cDNA sequence contained in ATCC Deposit No:Z, nucleotide sequences encoding the polypeptide encoded by the cDNA sequence contained in ATCC Deposit No:Z, and/or nucleotide sequences encoding a mature (secreted) polypeptide encoded by the cDNA sequence contained in ATCC Deposit No:Z.

[0181] The present invention also encompasses variants of the polypeptide sequence disclosed in SEQ ID NO:Y, the polypeptide as defined in columns 13 and 14 of Table 1A, the polypeptide sequence as defined in columns 6 and 7 of Table 1B.1, a polypeptide sequence encoded by the polynucleotide sequence in SEQ ID NO:X, a polypeptide sequence encoded by the nucleotide sequence as defined in columns 8 and 9 of Table 2, a polypeptide sequence encoded by the nucleotide sequence as defined in column 6 of Table 1C, a polypeptide sequence encoded by the complement of the polynucleotide sequence in SEQ ID NO:X, the polypeptide sequence encoded by the cDNA sequence contained in ATCC Deposit No:Z and/or a mature (secreted) polypeptide encoded by the cDNA sequence contained in ATCC Deposit No:Z.

[0182] “Variant” refers to a polynucleotide or polypeptide differing from the polynucleotide or polypeptide of the present invention, but retaining essential properties thereof. Generally, variants are overall closely similar, and, in many regions, identical to the polynucleotide or polypeptide of the present invention.

[0183] Thus, one aspect of the invention provides an isolated nucleic acid molecule comprising, or alternatively consisting of, a polynucleotide having a nucleotide sequence selected from the group consisting of: (a) a nucleotide sequence described in SEQ ID NO:X or contained in the cDNA sequence of ATCC Deposit No:Z; (b) a nucleotide sequence in SEQ ID NO:X or the cDNA in ATCC Deposit No:Z which encodes the complete amino acid sequence of SEQ ID NO:Y or the complete amino acid sequence encoded by the cDNA in ATCC Deposit No:Z; (c) a nucleotide sequence in SEQ ID NO:X or the cDNA in ATCC Deposit No:Z which encodes a mature polypeptide (i.e., a secreted polypeptide (e.g., as delineated in columns 14 and 15 of Table 1A)); (d) a nucleotide sequence in SEQ ID NO:X or the cDNA sequence of ATCC Deposit No:Z, which encodes a biologically active fragment of a polypeptide; (e) a nucleotide sequence in SEQ ID NO:X or the cDNA sequence of ATCC Deposit No:Z, which encodes an antigenic fragment of a polypeptide; (f) a nucleotide sequence encoding a polypeptide comprising the complete amino acid sequence of SEQ ID NO:Y or the complete amino acid sequence encoded by the cDNA in ATCC Deposit No:Z; (g) a nucleotide sequence encoding a mature polypeptide of the amino acid sequence of SEQ ID NO:Y (i.e., a secreted polypeptide (e.g., as delineated in columns 14 and 15 of Table 1A)) or a mature polypeptide of the amino acid sequence encoded by the cDNA in ATCC Deposit No:Z; (h) a nucleotide sequence encoding a biologically active fragment of a polypeptide having the complete amino acid sequence of SEQ ID NO:Y or the complete amino acid sequence encoded by the cDNA in ATCC Deposit No:Z; (i) a nucleotide sequence encoding an antigenic fragment of a polypeptide having the complete amino acid sequence of SEQ ID NO:Y or the complete amino acid sequence encoded by the cDNA in ATCC Deposit No:Z; and (j) a nucleotide sequence complementary to any of the nucleotide sequences in (a), (b), (c), (d), (e), (f), (g), (h), or (i) above.

[0184] The present invention is also directed to nucleic acid molecules which comprise, or alternatively consist of, a nucleotide sequence which is at least 80%, 85%, 90%, 95%, 96%, 97%, 98%, 99% or 100%, identical to, for example, any of the nucleotide sequences in (a), (b), (c), (d), (e), (f), (g), (h), (i), or (j) above, the nucleotide coding sequence in SEQ ID NO:X or the complementary strand thereto, the nucleotide coding sequence of the cDNA contained in ATCC Deposit No:Z or the complementary strand thereto, a nucleotide sequence encoding the polypeptide of SEQ ID NO:Y, a nucleotide sequence encoding a polypeptide sequence encoded by the nucleotide sequence in SEQ ID NO:X, a polypeptide sequence encoded by the complement of the polynucleotide sequence in SEQ ID NO:X, a nucleotide sequence encoding the polypeptide encoded by the cDNA contained in ATCC Deposit No:Z, the nucleotide coding sequence in SEQ ID NO:X as defined in columns 8 and 9 of Table 2 or the complementary strand thereto, a nucleotide sequence encoding the polypeptide encoded by the nucleotide sequence in SEQ ID NO:X as defined in columns 8 and 9 of Table 2 or the complementary strand thereto, the nucleotide coding sequence in SEQ ID NO:B as defined in column 6 of Table 1C or the complementary strand thereto, a nucleotide sequence encoding the polypeptide encoded by the nucleotide sequence in SEQ ID NO:B as defined in column 6 of Table 1C or the complementary strand thereto, the nucleotide sequence in SEQ ID NO:X encoding the polypeptide sequence as defined in columns 6 and 7 of Table 1B.1 or the complementary strand thereto, nucleotide sequences encoding the polypeptide as defined in column 6 and 7 of Table 1B.1 or the complementary strand thereto, and/or polynucleotide fragments of any of these nucleic acid molecules (e.g., those fragments described herein). Polynucleotides which hybridize to the complement of these nucleic acid molecules under stringent hybridization conditions or alternatively, under lower stringency conditions, are also encompassed by the invention, as are polypeptides encoded by these polynucleotides and nucleic acids.

[0185] In a preferred embodiment, the invention encompasses nucleic acid molecules which comprise, or alternatively, consist of a polynucleotide which hybridizes under stringent hybridization conditions, or alternatively, under lower stringency conditions, to a polynucleotide in (a), (b), (c), (d), (e), (f), (g), (h), or (i), above, as are polypeptides encoded by these polynucleotides. In another preferred embodiment, polynucleotides which hybridize to the complement of these nucleic acid molecules under stringent hybridization conditions, or alternatively, under lower stringency conditions, are also encompassed by the invention, as are polypeptides encoded by these polynucleotides.

[0186] In another embodiment, the invention provides a purified protein comprising, or alternatively consisting of, a polypeptide having an amino acid sequence selected from the group consisting of: (a) the complete amino acid sequence of SEQ ID NO:Y or the complete amino acid sequence encoded by the cDNA in ATCC Deposit No:Z; (b) the amino acid sequence of a mature (secreted) form of a polypeptide having the amino acid sequence of SEQ ID NO:Y (e.g., as delineated in columns 14 and 15 of Table 1A) or a mature form of the amino acid sequence encoded by the cDNA in ATCC Deposit No:Z mature; (c) the amino acid sequence of a biologically active fragment of a polypeptide having the complete amino acid sequence of SEQ ID NO:Y or the complete amino acid sequence encoded by the cDNA in ATCC Deposit No:Z; and (d) the amino acid sequence of an antigenic fragment of a polypeptide having the complete amino acid sequence of SEQ ID NO:Y or the complete amino acid sequence encoded by the cDNA in ATCC Deposit No:Z.

[0187] The present invention is also directed to proteins which comprise, or alternatively consist of, an amino acid sequence which is at least 80%, 85%, 90%, 95%, 96%, 97%, 98%, 99% or 100%, identical to, for example, any of the amino acid sequences in (a), (b), (c), or (d), above, the amino acid sequence shown in SEQ ID NO:Y, the amino acid sequence encoded by the cDNA contained in ATCC Deposit No:Z, the amino acid sequence of the polypeptide encoded by the nucleotide sequence in SEQ ID NO:X as defined in columns 8 and 9 of Table 2, the amino acid sequence of the polypeptide encoded by the nucleotide sequence in SEQ ID NO:B as defined in column 6 of Table 1C, the amino acid sequence as defined in columns 6 and 7 of Table 1B.1, an amino acid sequence encoded by the nucleotide sequence in SEQ ID NO:X, and an amino acid sequence encoded by the complement of the polynucleotide sequence in SEQ ID NO:X. Fragments of these polypeptides are also provided (e.g., those fragments described herein). Further proteins encoded by polynucleotides which hybridize to the complement of the nucleic acid molecules encoding these amino acid sequences under stringent hybridization conditions or alternatively, under lower stringency conditions, are also encompassed by the invention, as are the polynucleotides encoding these proteins.

[0188] By a nucleic acid having a nucleotide sequence at least, for example, 95% “identical” to a reference nucleotide sequence of the present invention, it is intended that the nucleotide sequence of the nucleic acid is identical to the reference sequence except that the nucleotide sequence may include up to five point mutations per each 100 nucleotides of the reference nucleotide sequence encoding the polypeptide. In other words, to obtain a nucleic acid having a nucleotide sequence at least 95% identical to a reference nucleotide sequence, up to 5% of the nucleotides in the reference sequence may be deleted or substituted with another nucleotide, or a number of nucleotides up to 5% of the total nucleotides in the reference sequence may be inserted into the reference sequence. The query sequence may be an entire sequence referred to in Table 1B or 2 as the ORF (open reading frame), or any fragment specified as described herein.

[0189] As a practical matter, whether any particular nucleic acid molecule or polypeptide is at least 80%, 85%, 90%, 95%, 96%, 97%, 98% or 99% identical to a nucleotide sequence of the present invention can be determined conventionally using known computer programs. A preferred method for determining the best overall match between a query sequence (a sequence of the present invention) and a subject sequence, also referred to as a global sequence alignment, can be determined using the FASTDB computer program based on the algorithm of Brutlag et al. (Comp. App. Biosci. 6:237-245 (1990)). In a sequence alignment the query and subject sequences are both DNA sequences. An RNA sequence can be compared by converting U's to T's. The result of said global sequence alignment is expressed as percent identity. Preferred parameters used in a FASTDB alignment of DNA sequences to calculate percent identity are: Matrix=Unitary, k-tuple=4, Mismatch Penalty-1, Joining Penalty=30, Randomization Group Length=0, Cutoff Score=1, Gap Penalty=5, Gap Size Penalty 0.05, Window Size=500 or the length of the subject nucleotide sequence, whichever is shorter.

[0190] If the subject sequence is shorter than the query sequence because of 5′ or 3′ deletions, not because of internal deletions, a manual correction must be made to the results. This is because the FASTDB program does not account for 5′ and 3′ truncations of the subject sequence when calculating percent identity. For subject sequences truncated at the 5′ or 3′ ends, relative to the query sequence, the percent identity is corrected by calculating the number of bases of the query sequence that are 5′ and 3′ of the subject sequence, which are not matched/aligned, as a percent of the total bases of the query sequence. Whether a nucleotide is matched/aligned is determined by results of the FASTDB sequence alignment. This percentage is then subtracted from the percent identity, calculated by the above FASTDB program using the specified parameters, to arrive at a final percent identity score. This corrected score is what is used for the purposes of the present invention. Only bases outside the 5′ and 3′ bases of the subject sequence, as displayed by the FASTDB alignment, which are not matched/aligned with the query sequence, are calculated for the purposes of manually adjusting the percent identity score.

[0191] For example, a 90 base subject sequence is aligned to a 100 base query sequence to determine percent identity. The deletions occur at the 5′ end of the subject sequence and therefore, the FASTDB alignment does not show a matched/alignment of the first 10 bases at 5′ end. The 10 unpaired bases represent 10% of the sequence (number of bases at the 5′ and 3′ ends not matched/total number of bases in the query sequence) so 10% is subtracted from the percent identity score calculated by the FASTDB program. If the remaining 90 bases were perfectly matched the final percent identity would be 90%. In another example, a 90 base subject sequence is compared with a 100 base query sequence. This time the deletions are internal deletions so that there are no bases on the 5′ or 3′ of the subject sequence which are not matched/aligned with the query. In this case the percent identity calculated by FASTDB is not manually corrected. Once again, only bases 5′ and 3′ of the subject sequence which are not matched/aligned with the query sequence are manually corrected for. No other manual corrections are to be made for the purposes of the present invention.

[0192] By a polypeptide having an amino acid sequence at least, for example, 95% “identical” to a query amino acid sequence of the present invention, it is intended that the amino acid sequence of the subject polypeptide is identical to the query sequence except that the subject polypeptide sequence may include up to five amino acid alterations per each 100 amino acids of the query amino acid sequence. In other words, to obtain a polypeptide having an amino acid sequence at least 95% identical to a query amino acid sequence, up to 5% of the amino acid residues in the subject sequence may be inserted, deleted, (indels) or substituted with another amino acid. These alterations of the reference sequence may occur at the amino or carboxy terminal positions of the reference amino acid sequence or anywhere between those terminal positions, interspersed either individually among residues in the reference sequence or in one or more contiguous groups within the reference sequence.

[0193] As a practical matter, whether any particular polypeptide is at least 80%, 85%, 90%, 95%, 96%, 97%, 98% or 99% identical to, for instance, the amino acid sequence of a polypeptide referred to in Table 1A (e.g., the amino acid sequence delineated in columns 14 and 15) or a fragment thereof, Table 1B.1 (e.g., the amino acid sequence identified in column 6) or a fragment thereof, Table 2 (e.g., the amino acid sequence of the polypeptide encoded by the polynucleotide sequence defined in columns 8 and 9 of Table 2) or a fragment thereof, the amino acid sequence of the polypeptide encoded by the polynucleotide sequence in SEQ ID NO:B as defined in column 6 of Table 1C or a fragment thereof, the amino acid sequence of the polypeptide encoded by the nucleotide sequence in SEQ ID NO:X or a fragment thereof, or the amino acid sequence of the polypeptide encoded by cDNA contained in ATCC Deposit No:Z, or a fragment thereof, the amino acid sequence of a mature (secreted) polypeptide encoded by cDNA contained in ATCC Deposit No:Z, or a fragment thereof, can be determined conventionally using known computer programs. A preferred method for determining the best overall match between a query sequence (a sequence of the present invention) and a subject sequence, also referred to as a global sequence alignment, can be determined using the FASTDB computer program based on the algorithm of Brutlag et al. (Comp. App. Biosci. 6:237-245 (1990)). In a sequence alignment the query and subject sequences are either both nucleotide sequences or both amino acid sequences. The result of said global sequence alignment is expressed as percent identity. Preferred parameters used in a FASTDB amino acid alignment are: Matrix=PAM 0, k-tuple=2, Mismatch Penalty=1, Joining Penalty=20, Randomization Group Length=0, Cutoff Score=1, Window Size=sequence length, Gap Penalty=5, Gap Size Penalty=0.05, Window Size=500 or the length of the subject amino acid sequence, whichever is shorter.

[0194] If the subject sequence is shorter than the query sequence due to N- or C-terminal deletions, not because of internal deletions, a manual correction must be made to the results. This is because the FASTDB program does not account for N- and C-terminal truncations of the subject sequence when calculating global percent identity. For subject sequences truncated at the N- and C-termini, relative to the query sequence, the percent identity is corrected by calculating the number of residues of the query sequence that are N- and C-terminal of the subject sequence, which are not matched/aligned with a corresponding subject residue, as a percent of the total bases of the query sequence. Whether a residue is matched/aligned is determined by results of the FASTDB sequence alignment. This percentage is then subtracted from the percent identity, calculated by the above FASTDB program using the specified parameters, to arrive at a final percent identity score. This final percent identity score is what is used for the purposes of the present invention. Only residues to the N- and C-termini of the subject sequence, which are not matched/aligned with the query sequence, are considered for the purposes of manually adjusting the percent identity score. That is, only query residue positions outside the farthest N- and C-terminal residues of the subject sequence.

[0195] For example, a 90 amino acid residue subject sequence is aligned with a 100 residue query sequence to determine percent identity. The deletion occurs at the N-terminus of the subject sequence and therefore, the FASTDB alignment does not show a matching/alignment of the first 10 residues at the N-terminus. The 10 unpaired residues represent 10% of the sequence (number of residues at the N- and C-termini not matched/total number of residues in the query sequence) so 10% is subtracted from the percent identity score calculated by the FASTDB program. If the remaining 90 residues were perfectly matched the final percent identity would be 90%. In another example, a 90 residue subject sequence is compared with a 100 residue query sequence. This time the deletions are internal deletions so there are no residues at the N- or C-termini of the subject sequence which are not matched/aligned with the query. In this case the percent identity calculated by FASTDB is not manually corrected. Once again, only residue positions outside the N- and C-terminal ends of the subject sequence, as displayed in the FASTDB alignment, which are not matched/aligned with the query sequnce are manually corrected for. No other manual corrections are to made for the purposes of the present invention.

[0196] The polynucleotide variants of the invention may contain alterations in the coding regions, non-coding regions, or both. Especially preferred are polynucleotide variants containing alterations which produce silent substitutions, additions, or deletions, but do not alter the properties or activities of the encoded polypeptide. Nucleotide variants produced by silent substitutions due to the degeneracy of the genetic code are preferred. Moreover, polypeptide variants in which less than 50, less than 40, less than 30, less than 20, less than 10, or 5-50, 5-25, 5-10, 1-5, or 1-2 amino acids are substituted, deleted, or added in any combination are also preferred. Polynucleotide variants can be produced for a variety of reasons, e.g., to optimize codon expression for a particular host (change codons in the human mRNA to those preferred by a bacterial host such as E. coli).

[0197] Naturally occurring variants are called “allelic variants,” and refer to one of several alternate forms of a gene occupying a given locus on a chromosome of an organism. (Genes II, Lewin, B., ed., John Wiley & Sons, New York (1985)). These allelic variants can vary at either the polynucleotide and/or polypeptide level and are included in the present invention. Alternatively, non-naturally occurring variants may be produced by mutagenesis techniques or by direct synthesis.

[0198] Using known methods of protein engineering and recombinant DNA technology, variants may be generated to improve or alter the characteristics of the polypeptides of the present invention. For instance, one or more amino acids can be deleted from the N-terminus or C-terminus of the polypeptide of the present invention without substantial loss of biological function. As an example, Ron et al. (J. Biol. Chem. 268: 2984-2988 (1993)) reported variant KGF proteins having heparin binding activity even after deleting 3, 8, or 27 amino-terminal amino acid residues. Similarly, Interferon gamma exhibited up to ten times higher activity after deleting 8-10 amino acid residues from the carboxy terminus of this protein. (Dobeli et al., J. Biotechnology 7:199-216 (1988).)

[0199] Moreover, ample evidence demonstrates that variants often retain a biological activity similar to that of the naturally occurring protein. For example, Gayle and coworkers (J. Biol. Chem. 268:22105-22111 (1993)) conducted extensive mutational analysis of human cytokine IL-1a. They used random mutagenesis to generate over 3,500 individual IL-1a mutants that averaged 2.5 amino acid changes per variant over the entire length of the molecule. Multiple mutations were examined at every possible amino acid position. The investigators found that “[m]ost of the molecule could be altered with little effect on either [binding or biological activity].” In fact, only 23 unique amino acid sequences, out of more than 3,500 nucleotide sequences examined, produced a protein that significantly differed in activity from wild-type.

[0200] Furthermore, even if deleting one or more amino acids from the N-terminus or C-terminus of a polypeptide results in modification or loss of one or more biological functions, other biological activities may still be retained. For example, the ability of a deletion variant to induce and/or to bind antibodies which recognize the secreted form will likely be retained when less than the majority of the residues of the secreted form are removed from the N-terminus or C-terminus. Whether a particular polypeptide lacking N- or C-terminal residues of a protein retains such immunogenic activities can readily be determined by routine methods described herein and otherwise known in the art.

[0201] Thus, the invention further includes polypeptide variants which show a biological or functional activity of the polypeptides of the invention (such as, for example, activity useful in detecting, preventing, diagnosing, prognosticating, treating, and/or ameliorating cardiovascular disorders). Such variants include deletions, insertions, inversions, repeats, and substitutions selected according to general rules known in the art so as have little effect on activity.

[0202] The present application is directed to nucleic acid molecules at least 80%, 85%, 90%, 95%, 96%, 97%, 98%, 99% or 100% identical to the nucleic acid sequences disclosed herein, (e.g., encoding a polypeptide having the amino acid sequence of an N and/or C terminal deletion), irrespective of whether they encode a polypeptide having functional activity. This is because even where a particular nucleic acid molecule does not encode a polypeptide having functional activity, one of skill in the art would still know how to use the nucleic acid molecule, for instance, as a hybridization probe or a polymerase chain reaction (PCR) primer. Uses of the nucleic acid molecules of the present invention that do not encode a polypeptide having functional activity include, inter alia, (1) isolating a gene or allelic or splice variants thereof in a cDNA library; (2) in situ hybridization (e.g., “FISH”) to metaphase chromosomal spreads to provide precise chromosomal location of the gene, as described in Verma et al., Human Chromosomes: A Manual of Basic Techniques, Pergamon Press, New York (1988); (3) Northern Blot analysis for detecting mRNA expression in specific tissues (e.g., normal or diseased tissues); and (4) in situ hybridization (e.g., histochemistry) for detecting mRNA expression in specific tissues (e.g., normal or diseased tissues).

[0203] Preferred, however, are nucleic acid molecules having sequences at least 80%, 85%, 90%, 95%, 96%, 97%, 98%, 99% or 100% identical to the nucleic acid sequences disclosed herein, which do, in fact, encode a polypeptide having functional activity. By a polypeptide having “functional activity” is meant, a polypeptide capable of displaying one or more known functional activities associated with a full-length (complete) protein and/or a mature (secreted) protein of the invention. Such functional activities include, but are not limited to, biological activity (such as, for example, activity useful in detecting, preventing, diagnosing, prognosticating, treating, and/or ameliorating cancer and other hyperproliferative diseases and disorders), antigenicity (ability to bind, or compete with a polypeptide of the invention for binding, to an anti-polypeptide of the invention antibody), immunogenicity (ability to generate antibody which binds to a specific polypeptide of the invention), ability to form multimers with polypeptides of the invention, and ability to bind to a receptor or ligand for a polypeptide of the invention.

[0204] The functional activity of the polypeptides, and fragments, variants and derivatives of the invention, can be assayed by various methods.

[0205] For example, in one embodiment where one is assaying for the ability to bind or compete with a full-length polypeptide of the present invention for binding to an anti-polypetide antibody, various immunoassays known in the art can be used, including but not limited to, competitive and non-competitive assay systems using techniques such as radioimmunoassays, ELISA (enzyme linked immunosorbent assay), “sandwich” immunoassays, immunoradiometric assays, gel diffusion precipitation reactions, immunodiffusion assays, in situ immunoassays (using colloidal gold, enzyme or radioisotope labels, for example), western blots, precipitation reactions, agglutination assays (e.g., gel agglutination assays, hemagglutination assays), complement fixation assays, immunofluorescence assays, protein A assays, and immunoelectrophoresis assays, etc. In one embodiment, antibody binding is detected by detecting a label on the primary antibody. In another embodiment, the primary antibody is detected by detecting binding of a secondary antibody or reagent to the primary antibody. In a further embodiment, the secondary antibody is labeled. Many means are known in the art for detecting binding in an immunoassay and are within the scope of the present invention.

[0206] In another embodiment, where a ligand is identified, or the ability of a polypeptide fragment, variant or derivative of the invention to multimerize is being evaluated, binding can be assayed, e.g., by means well-known in the art, such as, for example, reducing and non-reducing gel chromatography, protein affinity chromatography, and affinity blotting. See generally, Phizicky et al., Microbiol. Rev. 59:94-123 (1995). In another embodiment, the ability of physiological correlates of a polypeptide of the present invention to bind to a substrate(s) of the polypeptide of the invention can be routinely assayed using techniques known in the art.

[0207] In addition, assays described herein (see Examples) and otherwise known in the art may routinely be applied to measure the ability of polypeptides of the present invention and fragments, variants and derivatives thereof to elicit polypeptide related biological activity (either in vitro or in vivo). Other methods will be known to the skilled artisan and are within the scope of the invention.

[0208] Of course, due to the degeneracy of the genetic code, one of ordinary skill in the art will immediately recognize that a large number of the nucleic acid molecules having a sequence at least 80%, 85%, 90%, 95%, 96%, 97%, 98%, 99%, or 100% identical to, for example, the nucleic acid sequence of the cDNA contained in ATCC Deposit No:Z, the nucleic acid sequence referred to in Table 1B (SEQ ID NO:X), the nucleic acid sequence disclosed in Table 1A (e.g., the nucleic acid sequence delineated in columns 7 and 8), the nucleic acid sequence disclosed in Table 2 (e.g., the nucleic acid sequence delineated in columns 8 and 9) or fragments thereof, will encode polypeptides “having functional activity.” In fact, since degenerate variants of any of these nucleotide sequences all encode the same polypeptide, in many instances, this will be clear to the skilled artisan even without performing the above described comparison assay. It will be further recognized in the art that, for such nucleic acid molecules that are not degenerate variants, a reasonable number will also encode a polypeptide having functional activity. This is because the skilled artisan is fully aware of amino acid substitutions that are either less likely or not likely to significantly effect protein function (e.g., replacing one aliphatic amino acid with a second aliphatic amino acid), as further described below.

[0209] For example, guidance concerning how to make phenotypically silent amino acid substitutions is provided in Bowie et al., “Deciphering the Message in Protein Sequences: Tolerance to Amino Acid Substitutions,” Science 247:1306-1310 (1990), wherein the authors indicate that there are two main strategies for studying the tolerance of an amino acid sequence to change.

[0210] The first strategy exploits the tolerance of amino acid substitutions by natural selection during the process of evolution. By comparing amino acid sequences in different species, conserved amino acids can be identified. These conserved amino acids are likely important for protein function. In contrast, the amino acid positions where substitutions have been tolerated by natural selection indicates that these positions are not critical for protein function. Thus, positions tolerating amino acid substitution could be modified while still maintaining biological activity of the protein.

[0211] The second strategy uses genetic engineering to introduce amino acid changes at specific positions of a cloned gene to identify regions critical for protein function. For example, site directed mutagenesis or alanine-scanning mutagenesis (introduction of single alanine mutations at every residue in the molecule) can be used. See Cunningham and Wells, Science 244:1081-1085 (1989). The resulting mutant molecules can then be tested for biological activity.

[0212] As the authors state, these two strategies have revealed that proteins are surprisingly tolerant of amino acid substitutions. The authors further indicate which amino acid changes are likely to be permissive at certain amino acid positions in the protein. For example, most buried (within the tertiary structure of the protein) amino acid residues require nonpolar side chains, whereas few features of surface side chains are generally conserved. Moreover, tolerated conservative amino acid substitutions involve replacement of the aliphatic or hydrophobic amino acids Ala, Val, Leu and Ile; replacement of the hydroxyl residues Ser and Thr; replacement of the acidic residues Asp and Glu; replacement of the amide residues Asn and Gln, replacement of the basic residues Lys, Arg, and His; replacement of the aromatic residues Phe, Tyr, and Trp, and replacement of the small-sized amino acids Ala, Ser, Thr, Met, and Gly.

[0213] Besides conservative amino acid substitution, variants of the present invention include (i) substitutions with one or more of the non-conserved amino acid residues, where the substituted amino acid residues may or may not be one encoded by the genetic code, or (ii) substitutions with one or more of the amino acid residues having a substituent group, or (iii) fusion of the mature polypeptide with another compound, such as a compound to increase the stability and/or solubility of the polypeptide (for example, polyethylene glycol), (iv) fusion of the polypeptide with additional amino acids, such as, for example, an IgG Fc fusion region peptide, serum albumin (preferably human serum albumin) or a fragment thereof, or leader or secretory sequence, or a sequence facilitating purification, or (v) fusion of the polypeptide with another compound, such as albumin (including but not limited to recombinant albumin (see, e.g., U.S. Pat. No. 5,876,969, issued Mar. 2, 1999, EP Patent 0 413 622, and U.S. Pat. No. 5,766,883, issued Jun. 16, 1998, herein incorporated by reference in their entirety)). Such variant polypeptides are deemed to be within the scope of those skilled in the art from the teachings herein.

[0214] For example, polypeptide variants containing amino acid substitutions of charged amino acids with other charged or neutral amino acids may produce proteins with improved characteristics, such as less aggregation. Aggregation of pharmaceutical formulations both reduces activity and increases clearance due to the aggregate's immunogenic activity. See Pinckard et al., Clin. Exp. Immunol. 2:331-340 (1967); Robbins et al., Diabetes 36: 838-845 (1987); Cleland et al., Crit. Rev. Therapeutic Drug Carrier Systems 10:307-377 (1993).

[0215] A further embodiment of the invention relates to polypeptides which comprise the amino acid sequence of a polypeptide having an amino acid sequence which contains at least one amino acid substitution, but not more than 50 amino acid substitutions, even more preferably, not more than 40 amino acid substitutions, still more preferably, not more than 30 amino acid substitutions, and still even more preferably, not more than 20 amino acid substitutions from a polypeptide sequence disclosed herein. Of course it is highly preferable for a polypeptide to have an amino acid sequence which, for example, comprises the amino acid sequence of a polypeptide of SEQ ID NO:Y, the amino acid sequence of the mature (e.g., secreted) polypeptide of SEQ ID NO:Y, an amino acid sequence encoded by SEQ ID NO:X, an amino acid sequence encoded by the portion of SEQ ID NO:X as defined in columnns 8 and 9 of Table 2, an amino acid sequence encoded by the complement of SEQ ID NO:X, an amino acid sequence encoded by cDNA contained in ATCC Deposit No:Z, and/or the amino acid sequence of a mature (secreted) polypeptide encoded by cDNA contained in ATCC Deposit No:Z, or a fragment thereof, which contains, in order of ever-increasing preference, at least one, but not more than 10, 9, 8, 7, 6, 5, 4, 3, 2 or 1 amino acid substitutions.

[0216] In specific embodiments, the polypeptides of the invention comprise, or alternatively, consist of, fragments or variants of a reference amino acid sequence selected from: (a) the amino acid sequence of SEQ ID NO:Y or fragments thereof (e.g., the mature form and/or other fragments described herein); (b) the amino acid sequence encoded by SEQ ID NO:X or fragments thereof; (c) the amino acid sequence encoded by the complement of SEQ ID NO:X or fragments thereof; (d) the amino acid sequence encoded by the portion of SEQ ID NO:X as defined in columns 8 and 9 of Table 2 or fragments thereof; and (e) the amino acid sequence encoded by cDNA contained in ATCC Deposit No:Z or fragments thereof; wherein the fragments or variants have 1-5, 5-10, 5-25, 5-50, 10-50 or 50-150, amino acid residue additions, substitutions, and/or deletions when compared to the reference amino acid sequence. In preferred embodiments, the amino acid substitutions are conservative. Polynucleotides encoding these polypeptides are also encompassed by the invention.

[0217] Polynucleotide and Polypeptide Fragments

[0218] The present invention is also directed to polynucleotide fragments of the polynucleotides (nucleic acids) of the invention. In the present invention, a “polynucleotide fragment” refers to a polynucleotide having a nucleic acid sequence which, for example: is a portion of the cDNA contained in ATCC Deposit No:Z or the complementary strand thereto; is a portion of the polynucleotide sequence encoding the polypeptide encoded by the cDNA contained in ATCC Deposit No:Z or the complementary strand thereto; is a portion of the polynucleotide sequence encoding the mature (secreted) polypeptide encoded by the cDNA contained in ATCC Deposit No:Z or the complementary strand thereto; is a portion of a polynucleotide sequence encoding the mature amino acid sequence as defined in columns 14 and 15 of Table 1A or the complementary strand thereto; is a portion of a polynucleotide sequence encoding the amino acid sequence encoded by the region of SEQ ID NO:X as defined in columns 8 and 9 of Table 2 or the complementary strand thereto; is a portion of the polynucleotide sequence of SEQ ID NO:X as defined in columns 8 and 9 of Table 2 or the complementary strand thereto; is a portion of the polynucleotide sequence in SEQ ID NO:X or the complementary strand thereto; is a polynucleotide sequence encoding a portion of the polypeptide of SEQ ID NO:Y; is a polynucleotide sequence encoding a portion of a polypeptide encoded by SEQ ID NO:X; is a polynucleotide sequence encoding a portion of a polypeptide encoded by the complement of the polynucleotide sequence in SEQ ID NO:X; is a portion of a polynucleotide sequence encoding the amino acid sequence encoded by the region of SEQ ID NO:B as defined in column 6 of Table 1C or the complementary strand thereto; or is a portion of the polynucleotide sequence of SEQ ID NO:B as defined in column 6 of Table 1C or the complementary strand thereto.

[0219] The polynucleotide fragments of the invention are preferably at least about 15 nt, and more preferably at least about 20 nt, still more preferably at least about 30 nt, and even more preferably, at least about 40 nt, at least about 50 nt, at least about 75 nt, or at least about 150 nt in length. A fragment “at least 20 nt in length,” for example, is intended to include 20 or more contiguous bases from the cDNA sequence contained in ATCC Deposit No:Z, or the nucleotide sequence shown in SEQ ID NO:X or the complementary stand thereto. In this context “about” includes the particularly recited value or a value larger or smaller by several (5, 4, 3, 2, or 1) nucleotides, at either terminus or at both termini. These nucleotide fragments have uses that include, but are not limited to, as diagnostic probes and primers as discussed herein. Of course, larger fragments (e.g., at least 160, 170, 180, 190, 200, 250, 500, 600, 1000, or 2000 nucleotides in length) are also encompassed by the invention.

[0220] Moreover, representative examples of polynucleotide fragments of the invention comprise, or alternatively consist of, a sequence from about nucleotide number 1-50, 51-100, 101-150, 151-200, 201-250, 251-300, 301-350, 351-400, 401-450, 451-500, 501-550, 551-600, 601-650, 651-700, 701-750, 751-800, 801-850, 851-900, 901-950, 951-1000, 1001-1050, 1051-1100, 1101-1150, 1151-1200, 1201-1250, 1251-1300, 1301-1350, 1351-1400, 1401-1450, 1451-1500, 1501-1550, 1551-1600, 1601-1650, 1651-1700, 1701-1750, 1751-1800, 1801-1850, 1851-1900, 1901-1950, 1951-2000, 2001-2050, 2051-2100, 2101-2150, 2151-2200, 2201-2250, 2251-2300, 2301-2350, 2351-2400, 2401-2450, 2451-2500, 2501-2550, 2551-2600, 2601-2650, 2651-2700, 2701-2750, 2751-2800, 2801-2850, 2851-2900, 2901-2950, 2951-3000, 3001-3050, 3051-3100, 3101-3150, 3151-3200, 3201-3250, 3251-3300, 3301-3350, 3351-3400, 3401-3450, 3451-3500, 3501-3550, 3551-3600, 3601-3650, 3651-3700, 3701-3750, 3751-3800, 3801-3850, 3851-3900, 3901-3950, 3951-4000, 4001-4050, 4051-4100, 4101-4150, 4151-4200, 4201-4250, 4251-4300, 4301-4350, 4351-4400, 4401-4450, 4451-4500, 4501-4550, 4551-4600, 4601-4650, 4651-4700, 4701-4750, 4751-4800, 4801-4850, 4851-4900, 4901-4950, 4951-5000, 5001-5050, 5051-5100, 5101-5150, 5151-5200, 5201-5250, 5251-5300, 5301-5350, 5351-5400, 5401-5450, 5451-5500, 5501-5550, 5551-5600, 5601-5650, 5651-5700, 5701-5750, 5751-5800, 5801-5850, 5851-5900, 5901-5950, 5951-6000, 6001-6050, 6051-6100, 6101-6150, 6151-6200, 6201-6250, 6251-6300, 6301-6350, 6351-6400, 6401-6450, 6451-6500, 6501-6550, 6551-6600, 6601-6650, 6651-6700, 6701-6750, 6751-6800, 6801-6850, 6851-6900, 6901-6950, 6951-7000, 7001-7050, 7051-7100, 7101-7150, 7151-7200, 7201-7250, 7251-7300 or 7301 to the end of SEQ ID NO:X, or the complementary strand thereto. In this context “about” includes the particularly recited range or a range larger or smaller by several (5, 4, 3, 2, or 1) nucleotides, at either terminus or at both termini. Preferably, these fragments encode a polypeptide which has a functional activity (e.g., biological activity; such as, for example, activity useful in detecting, preventing, diagnosing, prognosticating, treating, and/or ameliorating cancer and other hyperproliferative diseases and disorders). More preferably, these polynucleotides can be used as probes or primers as discussed herein. Polynucleotides which hybridize to one or more of these polynucleotides under stringent hybridization conditions or alternatively, under lower stringency conditions are also encompassed by the invention, as are polypeptides encoded by these polynucleotides.

[0221] Further representative examples of polynucleotide fragments of the invention comprise, or alternatively consist of, a sequence from about nucleotide number 1-50, 51-100, 101-150, 151-200, 201-250, 251-300, 301-350, 351-400, 401-450, 451-500, 501-550, 551-600, 601-650, 651-700, 701-750, 751-800, 801-850, 851-900, 901-950, 951-1000, 1001-1050, 1051-1100, 1101-1150, 1151-1200, 1201-1250, 1251-1300, 1301-1350, 1351-1400, 1401-1450, 1451-1500, 1501-1550, 1551-1600, 1601-1650, 1651-1700, 1701-1750, 1751-1800, 1801-1850, 1851-1900, 1901-1950, 1951-2000, 2001-2050, 2051-2100, 2101-2150, 2151-2200, 2201-2250, 2251-2300, 2301-2350, 2351-2400, 2401-2450, 2451-2500, 2501-2550, 2551-2600, 2601-2650, 2651-2700, 2701-2750, 2751-2800, 2801-2850, 2851-2900, 2901-2950, 2951-3000, 3001-3050, 3051-3100, 3101-3150, 3151-3200, 3201-3250, 3251-3300, 3301-3350, 3351-3400, 3401-3450, 3451-3500, 3501-3550, 3551-3600, 3601-3650, 3651-3700, 3701-3750, 3751-3800, 3801-3850, 3851-3900, 3901-3950, 3951-4000, 4001-4050, 4051-4100, 4101-4150, 4151-4200, 4201-4250, 4251-4300, 4301-4350, 4351-4400, 4401-4450, 4451-4500, 4501-4550, 4551-4600, 4601-4650, 4651-4700, 4701-4750, 4751-4800, 4801-4850, 4851-4900, 4901-4950, 4951-5000, 5001-5050, 5051-5100, 5101-5150, 5151-5200, 5201-5250, 5251-5300, 5301-5350, 5351-5400, 5401-5450, 5451-5500, 5501-5550, 5551-5600, 5601-5650, 5651-5700, 5701-5750, 5751-5800, 5801-5850, 5851-5900, 5901-5950, 5951-6000, 6001-6050, 6051-6100, 6101-6150, 6151-6200, 6201-6250, 6251-6300, 6301-6350, 6351-6400, 6401-6450, 6451-6500, 6501-6550, 6551-6600, 6601-6650, 6651-6700, 6701-6750, 6751-6800, 6801-6850, 6851-6900, 6901-6950, 6951-7000, 7001-7050, 7051-7100, 7101-7150, 7151-7200, 7201-7250, 7251-7300 or 7301 to the end of the cDNA sequence contained in ATCC Deposit No:Z, or the complementary strand thereto. In this context “about” includes the particularly recited range or a range larger or smaller by several (5, 4, 3, 2, or 1) nucleotides, at either terminus or at both termini. Preferably, these fragments encode a polypeptide which has a functional activity (e.g., biological activity). More preferably, these polynucleotides can be used as probes or primers as discussed herein. Polynucleotides which hybridize to one or more of these polynucleotides under stringent hybridization conditions or alternatively, under lower stringency conditions are also encompassed by the invention, as are polypeptides encoded by these polynucleotides.

[0222] Moreover, representative examples of polynucleotide fragments of the invention comprise, or alternatively consist of, a nucleic acid sequence comprising one, two, three, four, five, six, seven, eight, nine, ten, or more of the above described polynucleotide fragments of the invention in combination with a polynucleotide sequence delineated in Table 1C column 6. Additional, representative examples of polynucleotide fragments of the invention comprise, or alternatively consist of, a nucleic acid sequence comprising one, two, three, four, five, six, seven, eight, nine, ten, or more of the above described polynucleotide fragments of the invention in combination with a polynucleotide sequence that is the complementary strand of a sequence delineated in column 6 of Table 1C. In further embodiments, the above-described polynucleotide fragments of the invention comprise, or alternatively consist of, sequences delineated in Table 1C, column 6, and have a nucleic acid sequence which is different from that of the BAC fragment having the sequence disclosed in SEQ ID NO:B (see Table 1C, column 5). In additional embodiments, the above-described polynucleotide fragments of the invention comprise, or alternatively consist of, sequences delineated in Table 1C, column 6, and have a nucleic acid sequence which is different from that published for the BAC clone identified as BAC ID NO:A (see Table 1C, column 4). In additional embodiments, the above-described polynucleotides of the invention comprise, or alternatively consist of, sequences delineated Table 1C, column 6, and have a nucleic acid sequence which is different from that contained in the BAC clone identified as BAC ID NO:A (see Table 1C, column 4). Polypeptides encoded by these polynucleotides, other polynucleotides that encode these polypeptides, and antibodies that bind these polypeptides are also encompassed by the invention. Additionally, fragments and variants of the above-described polynucleotides and polypeptides are also encompassed by the invention.

[0223] In additional specific embodiments, polynucleotides of the invention comprise, or alternatively consist of, one, two, three, four, five, six, seven, eight, nine, ten, or more fragments of the sequences delineated in column 6 of Table 1C, and the polynucleotide sequence of SEQ ID NO:X (e.g., as defined in Table 1C, column 2) or fragments or variants thereof. Polypeptides encoded by these polynucleotides, other polynucleotides that encode these polypeptides, and antibodies that bind these polypeptides are also encompassed by the invention.

[0224] In additional specific embodiments, polynucleotides of the invention comprise, or alternatively consist of, one, two, three, four, five, six, seven, eight, nine, ten, or more fragments of the sequences delineated in column 6 of Table 1C which correspond to the same ATCC Deposit No:Z (see Table 1C, column 1), and the polynucleotide sequence of SEQ ID NO:X (e.g., as defined in Table 1A, 1B, or 1C) or fragments or variants thereof. Polypeptides encoded by these polynucleotides, other polynucleotides that encode these polypeptides, and antibodies that bind these polypeptides are also encompassed by the invention.

[0225] In further specific embodiments, polynucleotides of the invention comprise, or alternatively consist of, one, two, three, four, five, six, seven, eight, nine, ten, or more fragments of the sequences delineated in the same row of column 6 of Table 1C, and the polynucleotide sequence of SEQ ID NO:X (e.g., as defined in Table 1A, 1B, or 1C) or fragments or variants thereof. Polypeptides encoded by these polynucleotides, other polynucleotides that encode these polypeptides, and antibodies that bind these polypeptides are also encompassed by the invention.

[0226] In additional specific embodiments, polynucleotides of the invention comprise, or alternatively consist of a polynucleotide sequence in which the 3′ 10 polynucleotides of one of the sequences delineated in column 6 of Table 1C and the 5′ 10 polynucleotides of the sequence of SEQ ID NO:X are directly contiguous. Nucleic acids which hybridize to the complement of these 20 contiguous polynucleotides under stringent hybridization conditions or alternatively, under lower stringency conditions, are also encompassed by the invention. Polypeptides encoded by these polynucleotides and/or nucleic acids, other polynucleotides and/or nucleic acids that encode these polypeptides, and antibodies that bind these polypeptides are also encompassed by the invention. Additionally, fragments and variants of the above-described polynucleotides, nucleic acids, and polypeptides are also encompassed by the invention.

[0227] In additional specific embodiments, polynucleotides of the invention comprise, or alternatively consist of a polynucleotide sequence in which the 3′ 10 polynucleotides of one of the sequences delineated in column 6 of Table 1C and the 5′ 10 polynucleotides of a fragment or variant of the sequence of SEQ ID NO:X (e.g., as described herein) are directly contiguous Nucleic acids which hybridize to the complement of these 20 contiguous polynucleotides under stringent hybridization conditions or alternatively, under lower stringency conditions, are also encompassed by the invention. Polypeptides encoded by these polynucleotides and/or nucleic acids, other polynucleotides and/or nucleic acids encoding these polypeptides, and antibodies that bind these polypeptides are also encompassed by the invention. Additionally, fragments and variants of the above-described polynucleotides, nucleic acids, and polypeptides are also encompassed by the invention.

[0228] In further specific embodiments, polynucleotides of the invention comprise, or alternatively consist of a polynucleotide sequence in which the 3′ 10 polynucleotides of a fragment or variant of the sequence of SEQ ID NO:X and the 5′ 10 polynucleotides of the sequence of one of the sequences delineated in column 6 of Table 1C are directly contiguous. Nucleic acids which hybridize to the complement of these 20 contiguous polynucleotides under stringent hybridization conditions or alternatively, under lower stringency conditions, are also encompassed by the invention. Polypeptides encoded by these polynucleotides and/or nucleic acids, other polynucleotides and/or nucleic acids encoding these polypeptides, and antibodies that bind these polypeptides are also encompassed by the invention. Additionally, fragments and variants of the above-described polynucleotides, nucleic acids, and polypeptides are also encompassed by the invention.

[0229] In specific embodiments, polynucleotides of the invention comprise, or alternatively consist of a polynucleotide sequence in which the 3′ 10 polynucleotides of one of the sequences delineated in column 6 of Table 1C and the 5′ 10 polynucleotides of another sequence in column 6 are directly contiguous. In preferred embodiments, the 3′ 10 polynucleotides of one of the sequences delineated in column 6 of Table 1C is directly contiguous with the 5′ 10 polynucleotides of the next sequential exon delineated in Table 1C, column 6. Nucleic acids which hybridize to the complement of these 20 contiguous polynucleotides under stringent hybridization conditions or alternatively, under lower stringency conditions, are also encompassed by the invention. Polypeptides encoded by these polynucleotides and/or nucleic acids, other polynucleotides and/or nucleic acids encoding these polypeptides, and antibodies that bind these polypeptides are also encompassed by the invention. Additionally, fragments and variants of the above-described polynucleotides, nucleic acids, and polypeptides are also encompassed by the invention.

[0230] In the present invention, a “polypeptide fragment” refers to an amino acid sequence which is a portion of the amino acid sequence contained in SEQ ID NO:Y, is a portion of the mature form of SEQ ID NO:Y as defined in columns 14 and 15 of Table 1A, a portion of an amino acid sequence encoded by the portion of SEQ ID NO:X as defined in columnns 8 and 9 of Table 2, is a portion of an amino acid sequence encoded by the polynucleotide sequence of SEQ ID NO:X, is a portion of an amino acid sequence encoded by the complement of the polynucleotide sequence in SEQ ID NO:X, is a portion of the amino acid sequence of a mature (secreted) polypeptide encoded by the cDNA contained in ATCC Deposit No:Z, and/or is a portion of an amino acid sequence encoded by the cDNA contained in ATCC Deposit No:Z. Protein (polypeptide) fragments may be “free-standing,” or comprised within a larger polypeptide of which the fragment forms a part or region, most preferably as a single continuous region. Representative examples of polypeptide fragments of the invention, include, for example, fragments comprising, or alternatively consisting of, from about amino acid number 1-20, 21-40, 41-60, 61-80, 81-100, 101-120, 121-140, 141-160, 161-180, 181-200, 201-220, 221-240, 241-260, 261-280, 281-300, 301-320, 321-340, 341-360, 361-380, 381-400, 401-420, 421-440, 441-460, 461-480, 481-500, 501-520, 521-540, 541-560, 561-580, 581-600, 601-620, 621-640, 641-660, 661-680, 681-700, 701-720, 721-740, 741-760, 761-780, 781-800, 801-820, 821-840, 841-860, 861-880, 881-900, 901-920, 921-940, 941-960, 961-980, 981-1000, 1001-1020, 1021-1040, 1041-1060, 1061-1080, 1081-1100, 1101-1120, 1121-1140, 1141-1160, 1161-1180, 1181-1200, 1201-1220, 1221-1240, 1241-1260, 1261-1280, 1281-1300, 1301-1320, 1321-1340, 1341-1360, 1361-1380, 1381-1400, 1401-1420, 1421-1440, or 1441 to the end of the coding region of cDNA and SEQ ID NO: Y. In a preferred embodiment, polypeptide fragments of the invention include, for example, fragments comprising, or alternatively consisting of, from about amino acid number 1-20, 21-40, 41-60, 61-80, 81-100, 101-120, 121-140, 141-160, 161-180, 181-200, 201-220, 221-240, 241-260, 261-280, 281-300, 301-320, 321-340, 341-360, 361-380, 381-400, 401-420, 421-440, 441-460, 461-480, 481-500, 501-520, 521-540, 541-560, 561-580, 581-600, 601-620, 621-640, 641-660, 661-680, 681-700, 701-720, 721-740, 741-760, 761-780, 781-800, 801-820, 821-840, 841-860, 861-880, 881-900, 901-920, 921-940, 941-960, 961-980, 981-1000, 1001-1020, 1021-1040, 1041-1060, 1061-1080, 1081-1100, 1101-1120, 1121-1140, 1141-1160, 1161-1180, 1181-1200, 1201-1220, 1221-1240, 1241-1260, 1261-1280, 1281-1300, 1301-1320, 1321-1340, 1341-1360, 1361-1380, 1381-1400, 1401-1420, 1421-1440, or 1441 to the end of the coding region of SEQ ID NO:Y. Moreover, polypeptide fragments of the invention may be at least about 10, 15, 20, 25, 30, 35, 40, 45, 50, 55, 60, 65, 70, 75, 80, 85, 90, 100, 110, 120, 130, 140, or 150 amino acids in length. In this context “about” includes the particularly recited ranges or values, or ranges or values larger or smaller by several (5, 4, 3, 2, or 1) amino acids, at either extreme or at both extremes. Polynucleotides encoding these polypeptide fragments are also encompassed by the invention.

[0231] Even if deletion of one or more amino acids from the N-terminus of a protein results in modification of loss of one or more biological functions of the protein, other functional activities (e.g., biological activities; such as, for example, activity useful in detecting, preventing, diagnosing, prognosticating, treating, and/or ameliorating cancer and other hyperproliferative diseases and disorders; ability to multimerize; ability to bind a ligand; antigenic ability useful for production of polypeptide specific antibodies) may still be retained. For example, the ability of shortened muteins to induce and/or bind to antibodies which recognize the complete or mature forms of the polypeptides generally will be retained when less than the majority of the residues of the complete or mature polypeptide are removed from the N-terminus. Whether a particular polypeptide lacking N-terminal residues of a complete polypeptide retains such immunologic activities can readily be determined by routine methods described herein and otherwise known in the art. It is not unlikely that a mutein with a large number of deleted N-terminal amino acid residues may retain some biological or immunogenic activities. In fact, peptides composed of as few as six amino acid residues may often evoke an immune response.

[0232] Accordingly, polypeptide fragments include the secreted protein as well as the mature form. Further preferred polypeptide fragments include the secreted protein or the mature form having a continuous series of deleted residues from the amino or the carboxy terminus, or both. For example, any number of amino acids, ranging from 1-60, can be deleted from the amino terminus of either the secreted polypeptide or the mature form. Similarly, any number of amino acids, ranging from 1-30, can be deleted from the carboxy terminus of the secreted protein or mature form. Furthermore, any combination of the above amino and carboxy terminus deletions are preferred. Similarly, polynucleotides encoding these polypeptide fragments are also preferred.

[0233] The present invention further provides polypeptides having one or more residues deleted from the amino terminus of the amino acid sequence of a polypeptide disclosed herein (e.g., a polypeptide of SEQ ID NO:Y, a polypeptide as defined in columns 14 and 15 of Table 1A, a polypeptide encoded by the polynucleotide sequence contained in SEQ ID NO:X or the complement thereof, a polypeptide encoded by the portion of SEQ ID NO:X as defined in columns 8 and 9 of Table 2, a polypeptide encoded by the portion of SEQ ID NO:B as defined in column 6 of Table 1C, a polypeptide encoded by the cDNA contained in ATCC Deposit No:Z, and/or a mature polypeptide encoded by the cDNA contained in ATCC Deposit No:Z). In particular, N-terminal deletions may be described by the general formula m-q, where q is a whole integer representing the total number of amino acid residues in a polypeptide of the invention (e.g., the polypeptide disclosed in SEQ ID NO:Y, the mature (secreted) portion of SEQ ID NO:Y as defined in columns 14 and 15 of Table 1A, or the polypeptide encoded by the portion of SEQ ID NO:X as defined in columns 8 and 9 of Table 2), and m is defined as any integer ranging from 2 to q−6. Polynucleotides encoding these polypeptides are also encompassed by the invention.

[0234] The present invention further provides polypeptides having one or more residues from the carboxy terminus of the amino acid sequence of a polypeptide disclosed herein (e.g., a polypeptide of SEQ ID NO:Y, the mature (secreted) portion of SEQ ID NO:Y as defined in columns 14 and 15 of Table 1A, a polypeptide encoded by the polynucleotide sequence contained in SEQ ID NO:X, a polypeptide encoded by the portion of SEQ ID NO:X as defined in columns 8 and 9 of Table 2, a polypeptide encoded by the portion of SEQ ID NO:B as defined in column 6 of Table 1C, a polypeptide encoded by the cDNA contained in ATCC Deposit No:Z, and/or a mature polypeptide encoded by the cDNA contained in ATCC Deposit No:Z). In particular, C-terminal deletions may be described by the general formula 1-n, where n is any whole integer ranging from 6 to q−1, and where n corresponds to the position of amino acid residue in a polypeptide of the invention. Polynucleotides encoding these polypeptides are also encompassed by the invention.

[0235] In addition, any of the above described N- or C-terminal deletions can be combined to produce a N- and C-terminal deleted polypeptide. The invention also provides polypeptides having one or more amino acids deleted from both the amino and the carboxyl termini, which may be described generally as having residues m-n of a polypeptide encoded by SEQ ID NO:X (e.g., including, but not limited to, the preferred polypeptide disclosed as SEQ ID NO:Y, the mature (secreted) portion of SEQ ID NO:Y as defined in columns 14 and 15 of Table 1A, and the polypeptide encoded by the portion of SEQ ID NO:X as defined in columns 8 and 9 of Table 2), the cDNA contained in ATCC Deposit No:Z, and/or the complement thereof, where n and m are integers as described above. Polynucleotides encoding these polypeptides are also encompassed by the invention.

[0236] Also as mentioned above, even if deletion of one or more amino acids from the C-terminus of a protein results in modification of loss of one or more biological functions of the protein, other functional activities (e.g., biological activities such as, for example, activity useful in detecting, preventing, diagnosing, prognosticating, treating, and/or ameliorating cancer and other hyperproliferative diseases and disorders; ability to multimerize; ability to bind a ligand; antigenic ability useful for production of polypeptide specific antibodies) may still be retained. For example the ability of the shortened mutein to induce and/or bind to antibodies which recognize the complete or mature forms of the polypeptide generally will be retained when less than the majority of the residues of the complete or mature polypeptide are removed from the C-terminus. Whether a particular polypeptide lacking C-terminal residues of a complete polypeptide retains such immunologic activities can readily be determined by routine methods described herein and otherwise known in the art. It is not unlikely that a mutein with a large number of deleted C-terminal amino acid residues may retain some biological or immunogenic activities. In fact, peptides composed of as few as six amino acid residues may often evoke an immune response.

[0237] The present application is also directed to proteins containing polypeptides at least 80%, 85%, 90%, 95%, 96%, 97%, 98% or 99% identical to a polypeptide sequence set forth herein. In preferred embodiments, the application is directed to proteins containing polypeptides at least 80%, 85%, 90%, 95%, 96%, 97%, 98% or 99% identical to polypeptides having the amino acid sequence of the specific N- and C-terminal deletions. Polynucleotides encoding these polypeptides are also encompassed by the invention.

[0238] Any polypeptide sequence encoded by, for example, the polynucleotide sequences set forth as SEQ ID NO:X or the complement thereof, (presented, for example, in Tables 1A and 2), the cDNA contained in ATCC Deposit No:Z, or the polynucleotide sequence as defined in column 6 of Table 1C, may be analyzed to determine certain preferred regions of the polypeptide. For example, the amino acid sequence of a polypeptide encoded by a polynucleotide sequence of SEQ ID NO:X (e.g., the polypeptide of SEQ ID NO:Y and the polypeptide encoded by the portion of SEQ ID NO:X as defined in columnns 8 and 9 of Table 2) or the cDNA contained in ATCC Deposit No:Z may be analyzed using the default parameters of the DNASTAR computer algorithm (DNASTAR, Inc., 1228 S. Park St., Madison, Wis. 53715 USA; http://www.dnastar.com/).

[0239] Polypeptide regions that may be routinely obtained using the DNASTAR computer algorithm include, but are not limited to, Garnier-Robson alpha-regions, beta-regions, turn-regions, and coil-regions; Chou-Fasman alpha-regions, beta-regions, and turn-regions; Kyte-Doolittle hydrophilic regions and hydrophobic regions; Eisenberg alpha- and beta-amphipathic regions; Karplus-Schulz flexible regions; Emini surface-forming regions; and Jameson-Wolf regions of high antigenic index. Among highly preferred polynucleotides of the invention in this regard are those that encode polypeptides comprising regions that combine several structural features, such as several (e.g., 1, 2, 3 or 4) of the features set out above.

[0240] Additionally, Kyte-Doolittle hydrophilic regions and hydrophobic regions, Emini surface-forming regions, and Jameson-Wolf regions of high antigenic index (i.e., containing four or more contiguous amino acids having an antigenic index of greater than or equal to 1.5, as identified using the default parameters of the Jameson-Wolf program) can routinely be used to determine polypeptide regions that exhibit a high degree of potential for antigenicity. Regions of high antigenicity are determined from data by DNASTAR analysis by choosing values which represent regions of the polypeptide which are likely to be exposed on the surface of the polypeptide in an environment in which antigen recognition may occur in the process of initiation of an immune response.

[0241] Preferred polypeptide fragments of the invention are fragments comprising, or alternatively, consisting of, an amino acid sequence that displays a functional activity (e.g. biological activity such as, for example, activity useful in detecting, preventing, diagnosing, prognosticating, treating, and/or ameliorating cancer and other hyperproliferative diseases and disorders; ability to multimerize; ability to bind a ligand; antigenic ability useful for production of polypeptide specific antibodies) of the polypeptide sequence of which the amino acid sequence is a fragment. By a polypeptide displaying a “functional activity” is meant a polypeptide capable of one or more known functional activities associated with a full-length protein, such as, for example, biological activity, antigenicity, immunogenicity, and/or multimerization, as described herein.

[0242] Other preferred polypeptide fragments are biologically active fragments. Biologically active fragments are those exhibiting activity similar, but not necessarily identical, to an activity of the polypeptide of the present invention. The biological activity of the fragments may include an improved desired activity, or a decreased undesirable activity.

[0243] In preferred embodiments, polypeptides of the invention comprise, or alternatively consist of, one, two, three, four, five or more of the antigenic fragments of the polypeptide of SEQ ID NO:Y, or portions thereof. Polynucleotides encoding these polypeptides are also encompassed by the invention.

[0244] Epitopes and Antibodies

[0245] The present invention encompasses polypeptides comprising, or alternatively consisting of, an epitope of: the polypeptide sequence shown in SEQ ID NO:Y; a polypeptide sequence encoded by SEQ ID NO:X or the complementary strand thereto; the polypeptide sequence encoded by the portion of SEQ ID NO:X as defined in columns 8 and 9 of Table 2; the polypeptide sequence encoded by the portion of SEQ ID NO:B as defined in column 6 of Table 1C or the complement thereto; the polypeptide sequence encoded by the cDNA contained in ATCC Deposit No:Z; or the polypeptide sequence encoded by a polynucleotide that hybridizes to the sequence of SEQ ID NO:X, the complement of the sequence of SEQ ID NO:X, the complement of a portion of SEQ ID NO:X as defined in columns 8 and 9 of Table 2, or the cDNA sequence contained in ATCC Deposit No:Z under stringent hybridization conditions or alternatively, under lower stringency hybridization as defined supra. The present invention further encompasses polynucleotide sequences encoding an epitope of a polypeptide sequence of the invention (such as, for example, the sequence disclosed in SEQ ID NO:X, or a fragment thereof), polynucleotide sequences of the complementary strand of a polynucleotide sequence encoding an epitope of the invention, and polynucleotide sequences which hybridize to the complementary strand under stringent hybridization conditions or alternatively, under lower stringency hybridization conditions defined supra.

[0246] The term “epitopes,” as used herein, refers to portions of a polypeptide having antigenic or immunogenic activity in an animal, preferably a mammal, and most preferably in a human. In a preferred embodiment, the present invention encompasses a polypeptide comprising an epitope, as well as the polynucleotide encoding this polypeptide. An “immunogenic epitope,” as used herein, is defined as a portion of a protein that elicits an antibody response in an animal, as determined by any method known in the art, for example, by the methods for generating antibodies described infra. (See, for example, Geysen et al., Proc. Natl. Acad. Sci. USA 81:3998-4002 (1983)). The term “antigenic epitope,” as used herein, is defined as a portion of a protein to which an antibody can immunospecifically bind its antigen as determined by any method well known in the art, for example, by the immunoassays described herein. Immunospecific binding excludes non-specific binding but does not necessarily exclude cross-reactivity with other antigens. Antigenic epitopes need not necessarily be immunogenic.

[0247] Fragments which function as epitopes may be produced by any conventional means. (See, e.g., Houghten, R. A., Proc. Natl. Acad. Sci. USA 82:5131-5135 (1985) further described in U.S. Pat. No. 4,631,211.)

[0248] In the present invention, antigenic epitopes preferably contain a sequence of at least 4, at least 5, at least 6, at least 7, more preferably at least 8, at least 9, at least 10, at least 11, at least 12, at least 13, at least 14, at least 15, at least 20, at least 25, at least 30, at least 40, at least 50, and, most preferably, between about 15 to about 30 amino acids. Preferred polypeptides comprising immunogenic or antigenic epitopes are at least 10, 15, 20, 25, 30, 35, 40, 45, 50, 55, 60, 65, 70, 75, 80, 85, 90, 95, or 100 amino acid residues in length. Additional non-exclusive preferred antigenic epitopes include the antigenic epitopes disclosed herein, as well as portions thereof. Antigenic epitopes are useful, for example, to raise antibodies, including monoclonal antibodies, that specifically bind the epitope. Preferred antigenic epitopes include the antigenic epitopes disclosed herein, as well as any combination of two, three, four, five or more of these antigenic epitopes. Antigenic epitopes can be used as the target molecules in immunoassays. (See, for instance, Wilson et al., Cell 37:767-778 (1984); Sutcliffe et al., Science 219:660-666 (1983)).

[0249] Non-limiting examples of epitopes of polypeptides that can be used to generate antibodies of the invention include a polypeptide comprising, or alternatively consisting of, at least one, two, three, four, five, six or more of the portion(s) of SEQ ID NO:Y specified in column 6 of Table 1B.1. These polypeptide fragments have been determined to bear antigenic epitopes of the proteins of the invention by the analysis of the Jameson-Wolf antigenic index which is included in the DNAStar suite of computer programs. By “comprise” it is intended that a polypeptide contains at least one, two, three, four, five, six or more of the portion(s) of SEQ ID NO:Y shown in column 6 of Table 1B.1, but it may contain additional flanking residues on either the amino or carboxyl termini of the recited portion. Such additional flanking sequences are preferably sequences naturally found adjacent to the portion; i.e., contiguous sequence shown in SEQ ID NO:Y. The flanking sequence may, however, be sequences from a heterolgous polypeptide, such as from another protein described herein or from a heterologous polypeptide not described herein. In particular embodiments, epitope portions of a polypeptide of the invention comprise one, two, three, or more of the portions of SEQ ID NO:Y shown in column 6 of Table 1B.1.

[0250] Similarly, immunogenic epitopes can be used, for example, to induce antibodies according to methods well known in the art. See, for instance, Sutcliffe et al., supra; Wilson et al., supra; Chow et al., Proc. Natl. Acad. Sci. USA 82:910-914; and Bittle et al., J. Gen. Virol. 66:2347-2354 (1985). Preferred immunogenic epitopes include the immunogenic epitopes disclosed herein, as well as any combination of two, three, four, five or more of these immunogenic epitopes. The polypeptides comprising one or more immunogenic epitopes may be presented for eliciting an antibody response together with a carrier protein, such as an albumin, to an animal system (such as rabbit or mouse), or, if the polypeptide is of sufficient length (at least about 25 amino acids), the polypeptide may be presented without a carrier. However, immunogenic epitopes comprising as few as 8 to 10 amino acids have been shown to be sufficient to raise antibodies capable of binding to, at the very least, linear epitopes in a denatured polypeptide (e.g., in Western blotting).

[0251] Epitope-bearing polypeptides of the present invention may be used to induce antibodies according to methods well known in the art including, but not limited to, in vivo immunization, in vitro immunization, and phage display methods. See, e.g., Sutcliffe et al., supra; Wilson et al., supra, and Bittle et al., J. Gen. Virol., 66:2347-2354 (1985). If in vivo immunization is used, animals may be immunized with free peptide; however, anti-peptide antibody titer may be boosted by coupling the peptide to a macromolecular carrier, such as keyhole limpet hemacyanin (KLH) or tetanus toxoid. For instance, peptides containing cysteine residues may be coupled to a carrier using a linker such as maleimidobenzoyl-N-hydroxysuccinimide ester (MBS), while other peptides may be coupled to carriers using a more general linking agent such as glutaraldehyde. Animals such as rabbits, rats and mice are immunized with either free or carrier-coupled peptides, for instance, by intraperitoneal and/or intradermal injection of emulsions containing about 100 μg of peptide or carrier protein and Freund's adjuvant or any other adjuvant known for stimulating an immune response. Several booster injections may be needed, for instance, at intervals of about two weeks, to provide a useful titer of anti-peptide antibody which can be detected, for example, by ELISA assay using free peptide adsorbed to a solid surface. The titer of anti-peptide antibodies in serum from an immunized animal may be increased by selection of anti-peptide antibodies, for instance, by adsorption to the peptide on a solid support and elution of the selected antibodies according to methods well known in the art.

[0252] As one of skill in the art will appreciate, and as discussed above, the polypeptides of the present invention (e.g., those comprising an immunogenic or antigenic epitope) can be fused to heterologous polypeptide sequences. For example, polypeptides of the present invention (including fragments or variants thereof), may be fused with the constant domain of immunoglobulins (IgA, IgE, IgG, IgM), or portions thereof (CH1, CH2, CH3, or any combination thereof and portions thereof, resulting in chimeric polypeptides. By way of another non-limiting example, polypeptides and/or antibodies of the present invention (including fragments or variants thereof) may be fused with albumin (including but not limited to recombinant human serum albumin or fragments or variants thereof (see, e.g., U.S. Pat. No. 5,876,969, issued Mar. 2, 1999, EP Patent 0 413 622, and U.S. Pat. No. 5,766,883, issued Jun. 16, 1998, herein incorporated by reference in their entirety)). In a preferred embodiment, polypeptides and/or antibodies of the present invention (including fragments or variants thereof) are fused with the mature form of human serum albumin (i.e., amino acids 1-585 of human serum albumin as shown in FIGS. 1 and 2 of EP Patent 0 322 094) which is herein incorporated by reference in its entirety. In another preferred embodiment, polypeptides and/or antibodies of the present invention (including fragments or variants thereof) are fused with polypeptide fragments comprising, or alternatively consisting of, amino acid residues 1-z of human serum albumin, where z is an integer from 369 to 419, as described in U.S. Pat. No. 5,766,883 herein incorporated by reference in its entirety. Polypeptides and/or antibodies of the present invention (including fragments or variants thereof) may be fused to either the N- or C-terminal end of the heterologous protein (e.g., immunoglobulin Fc polypeptide or human serum albumin polypeptide). Polynucleotides encoding fusion proteins of the invention are also encompassed by the invention.

[0253] Such fusion proteins as those described above may facilitate purification and may increase half-life in vivo. This has been shown for chimeric proteins consisting of the first two domains of the human CD4-polypeptide and various domains of the constant regions of the heavy or light chains of mammalian immunoglobulins. See, e.g., EP 394,827; Traunecker et al., Nature, 331:84-86 (1988). Enhanced delivery of an antigen across the epithelial barrier to the immune system has been demonstrated for antigens (e.g., insulin) conjugated to an FcRn binding partner such as IgG or Fc fragments (see, e.g., PCT Publications WO 96/22024 and WO 99/04813). IgG fusion proteins that have a disulfide-linked dimeric structure due to the IgG portion desulfide bonds have also been found to be more efficient in binding and neutralizing other molecules than monomeric polypeptides or fragments thereof alone. See, e.g., Fountoulakis et al., J. Biochem., 270:3958-3964 (1995). Nucleic acids encoding the above epitopes can also be recombined with a gene of interest as an epitope tag (e.g., the hemagglutinin (HA) tag or flag tag) to aid in detection and purification of the expressed polypeptide. For example, a system described by Janknecht et al. allows for the ready purification of non-denatured fusion proteins expressed in human cell lines (Janknecht et al., 1991, Proc. Natl. Acad. Sci. USA 88:8972-897). In this system, the gene of interest is subcloned into a vaccinia recombination plasmid such that the open reading frame of the gene is translationally fused to an amino-terminal tag consisting of six histidine residues. The tag serves as a matrix binding domain for the fusion protein. Extracts from cells infected with the recombinant vaccinia virus are loaded onto Ni2+ nitriloacetic acid-agarose column and histidine-tagged proteins can be selectively eluted with imidazole-containing buffers.

[0254] Fusion Proteins

[0255] Any polypeptide of the present invention can be used to generate fusion proteins. For example, the polypeptide of the present invention, when fused to a second protein, can be used as an antigenic tag. Antibodies raised against the polypeptide of the present invention can be used to indirectly detect the second protein by binding to the polypeptide. Moreover, because secreted proteins target cellular locations based on trafficking signals, polypeptides of the present invention which are shown to be secreted can be used as targeting molecules once fused to other proteins.

[0256] Examples of domains that can be fused to polypeptides of the present invention include not only heterologous signal sequences, but also other heterologous functional regions. The fusion does not necessarily need to be direct, but may occur through linker sequences.

[0257] In certain preferred embodiments, proteins of the invention are fusion proteins comprising an amino acid sequence that is an N and/or C-terminal deletion of a polypeptide of the invention. In preferred embodiments, the invention is directed to a fusion protein comprising an amino acid sequence that is at least 90%, 95%, 96%, 97%, 98% or 99% identical to a polypeptide sequence of the invention. Polynucleotides encoding these proteins are also encompassed by the invention.

[0258] Moreover, fusion proteins may also be engineered to improve characteristics of the polypeptide of the present invention. For instance, a region of additional amino acids, particularly charged amino acids, may be added to the N-terminus of the polypeptide to improve stability and persistence during purification from the host cell or subsequent handling and storage. Also, peptide moieties may be added to the polypeptide to facilitate purification. Such regions may be removed prior to final preparation of the polypeptide. The addition of peptide moieties to facilitate handling of polypeptides are familiar and routine techniques in the art.

[0259] As one of skill in the art will appreciate that, as discussed above, polypeptides of the present invention, and epitope-bearing fragments thereof, can be combined with heterologous polypeptide sequences. For example, the polypeptides of the present invention may be fused with heterologous polypeptide sequences, for example, the polypeptides of the present invention may be fused with the constant domain of immunoglobulins (IgA, IgE, IgG, IgM) or portions thereof (CH1, CH2, CH3, and any combination thereof, including both entire domains and portions thereof), or albumin (including, but not limited to, native or recombinant human albumin or fragments or variants thereof (see, e.g., U.S. Pat. No. 5,876,969, issued Mar. 2, 1999, EP Patent 0 413 622, and U.S. Pat. No. 5,766,883, issued Jun. 16, 1998, herein incorporated by reference in their entirety)), resulting in chimeric polypeptides. For example, EP-A-O 464 533 (Canadian counterpart 2045869) discloses fusion proteins comprising various portions of constant region of immunoglobulin molecules together with another human protein or part thereof. In many cases, the Fc part in a fusion protein is beneficial in therapy and diagnosis, and thus can result in, for example, improved pharmacokinetic properties (EP-A 0232 262). Alternatively, deleting the Fc part after the fusion protein has been expressed, detected, and purified, would be desired. For example, the Fc portion may hinder therapy and diagnosis if the fusion protein is used as an antigen for immunizations. In drug discovery, for example, human proteins, such as hIL-5, have been fused with Fc portions for the purpose of high-throughput screening assays to identify antagonists of hIL-5. See, D. Bennett et al., J. Molecular Recognition 8:52-58 (1995); K. Johanson et al., J. Biol. Chem. 270:9459-9471 (1995).

[0260] Moreover, the polypeptides of the present invention can be fused to marker sequences, such as a polypeptide which facilitates purification of the fused polypeptide. In preferred embodiments, the marker amino acid sequence is a hexa-histidine peptide, such as the tag provided in a pQE vector (QIAGEN, Inc., 9259 Eton Avenue, Chatsworth, Calif., 91311), among others, many of which are commercially available. As described in Gentz et al., Proc. Natl. Acad. Sci. USA 86:821-824 (1989), for instance, hexa-histidine provides for convenient purification of the fusion protein. Another peptide tag useful for purification, the “HA” tag, corresponds to an epitope derived from the influenza hemagglutinin protein (Wilson et al., Cell 37:767 (1984)).

[0261] Additional fusion proteins of the invention may be generated through the techniques of gene-shuffling, motif-shuffling, exon-shuffling, and/or codon-shuffling (collectively referred to as “DNA shuffling”). DNA shuffling may be employed to modulate the activities of polypeptides of the invention, such methods can be used to generate polypeptides with altered activity, as well as agonists and antagonists of the polypeptides. See, generally, U.S. Pat. Nos. 5,605,793; 5,811,238; 5,830,721; 5,834,252; and 5,837,458, and Patten et al., Curr. Opinion Biotechnol. 8:724-33 (1997); Harayama, Trends Biotechnol. 16(2):76-82 (1998); Hansson, et al., J. Mol. Biol. 287:265-76 (1999); and Lorenzo and Blasco, Biotechniques 24(2):308-13 (1998) (each of these patents and publications are hereby incorporated by reference in its entirety). In one embodiment, alteration of polynucleotides corresponding to SEQ ID NO:X and the polypeptides encoded by these polynucleotides may be achieved by DNA shuffling. DNA shuffling involves the assembly of two or more DNA segments by homologous or site-specific recombination to generate variation in the polynucleotide sequence. In another embodiment, polynucleotides of the invention, or the encoded polypeptides, may be altered by being subjected to random mutagenesis by error-prone PCR, random nucleotide insertion or other methods prior to recombination. In another embodiment, one or more components, motifs, sections, parts, domains, fragments, etc., of a polynucleotide encoding a polypeptide of the invention may be recombined with one or more components, motifs, sections, parts, domains, fragments, etc. of one or more heterologous molecules.

[0262] Thus, any of these above fusions can be engineered using the polynucleotides or the polypeptides of the present invention.

[0263] Recombinant and Synthetic Production of Polypeptides of the Invention

[0264] The present invention also relates to vectors containing the polynucleotide of the present invention, host cells, and the production of polypeptides by synthetic and recombinant techniques. The vector may be, for example, a phage, plasmid, viral, or retroviral vector. Retroviral vectors may be replication competent or replication defective. In the latter case, viral propagation generally will occur only in complementing host cells.

[0265] The polynucleotides of the invention may be joined to a vector containing a selectable marker for propagation in a host. Generally, a plasmid vector is introduced in a precipitate, such as a calcium phosphate precipitate, or in a complex with a charged lipid. If the vector is a virus, it may be packaged in vitro using an appropriate packaging cell line and then transduced into host cells.

[0266] The polynucleotide insert should be operatively linked to an appropriate promoter, such as the phage lambda PL promoter, the E. coli lac, trp, phoA and tac promoters, the SV40 early and late promoters and promoters of retroviral LTRs, to name a few. Other suitable promoters will be known to the skilled artisan. The expression constructs will further contain sites for transcription initiation, termination, and, in the transcribed region, a ribosome binding site for translation. The coding portion of the transcripts expressed by the constructs will preferably include a translation initiating codon at the beginning and a termination codon (UAA, UGA or UAG) appropriately positioned at the end of the polypeptide to be translated.

[0267] As indicated, the expression vectors will preferably include at least one selectable marker. Such markers include dihydrofolate reductase, G418, glutamine synthase, or neomycin resistance for eukaryotic cell culture, and tetracycline, kanamycin or ampicillin resistance genes for culturing in E. coli and other bacteria. Representative examples of appropriate hosts include, but are not limited to, bacterial cells, such as E. coli, Streptomyces and Salmonella typhimurium cells; fungal cells, such as yeast cells (e.g., Saccharomyces cerevisiae or Pichia pastoris (ATCC Accession No. 201178)); insect cells such as Drosophila S2 and Spodoptera Sf9 cells; animal cells such as CHO, COS, 293, and Bowes melanoma cells; and plant cells. Appropriate culture mediums and conditions for the above-described host cells are known in the art.

[0268] Among vectors preferred for use in bacteria include pQE70, pQE60 and pQE-9, available from QIAGEN, Inc.; pBluescript vectors, Phagescript vectors, pNH8A, pNH16a, pNH18A, pNH46A, available from Stratagene Cloning Systems, Inc.; and ptrc99a, pKK223-3, pKK233-3, pDR540, pRIT5 available from Pharmacia Biotech, Inc. Among preferred eukaryotic vectors are pWLNEO, pSV2CAT, pOG44, pXT1 and pSG available from Stratagene; and pSVK3, pBPV, pMSG and pSVL available from Pharmacia. Preferred expression vectors for use in yeast systems include, but are not limited to pYES2, pYD1, pTEF1/Zeo, pYES2/GS, pPICZ, pGAPZ, pGAPZalph, pPIC9, pPIC3.5, pHIL-D2, pHIL-S1, pPIC3.5K, pPIC9K, and PAO815 (all available from Invitrogen, Carlbad, Calif.). Other suitable vectors will be readily apparent to the skilled artisan.

[0269] Vectors which use glutamine synthase (GS) or DHFR as the selectable markers can be amplified in the presence of the drugs methionine sulphoximine or methotrexate, respectively. An advantage of glutamine synthase based vectors are the availabilty of cell lines (e.g., the murine myeloma cell line, NS0) which are glutamine synthase negative. Glutamine synthase expression systems can also function in glutamine synthase expressing cells (e.g., Chinese Hamster Ovary (CHO) cells) by providing additional inhibitor to prevent the functioning of the endogenous gene. A glutamine synthase expression system and components thereof are detailed in PCT publications: WO87/04462; WO86/05807; WO89/01036; WO89/10404; and WO91/06657, which are hereby incorporated in their entireties by reference herein. Additionally, glutamine synthase expression vectors can be obtained from Lonza Biologics, Inc. (Portsmouth, N.H.). Expression and production of monoclonal antibodies using a GS expression system in murine myeloma cells is described in Bebbington et al., Bio/technology 10:169(1992) and in Biblia and Robinson Biotechnol. Prog. 11:1 (1995) which are herein incorporated by reference.

[0270] The present invention also relates to host cells containing the above-described vector constructs described herein, and additionally encompasses host cells containing nucleotide sequences of the invention that are operably associated with one or more heterologous control regions (e.g., promoter and/or enhancer) using techniques known of in the art. The host cell can be a higher eukaryotic cell, such as a mammalian cell (e.g., a human derived cell), or a lower eukaryotic cell, such as a yeast cell, or the host cell can be a prokaryotic cell, such as a bacterial cell. A host strain may be chosen which modulates the expression of the inserted gene sequences, or modifies and processes the gene product in the specific fashion desired. Expression from certain promoters can be elevated in the presence of certain inducers; thus expression of the genetically engineered polypeptide may be controlled. Furthermore, different host cells have characteristics and specific mechanisms for the translational and post-translational processing and modification (e.g., phosphorylation, cleavage) of proteins. Appropriate cell lines can be chosen to ensure the desired modifications and processing of the foreign protein expressed.

[0271] Introduction of the nucleic acids and nucleic acid constructs of the invention into the host cell can be effected by calcium phosphate transfection, DEAE-dextran mediated transfection, cationic lipid-mediated transfection, electroporation, transduction, infection, or other methods. Such methods are described in many standard laboratory manuals, such as Davis et al., Basic Methods In Molecular Biology (1986). It is specifically contemplated that the polypeptides of the present invention may in fact be expressed by a host cell lacking a recombinant vector.

[0272] In addition to encompassing host cells containing the vector constructs discussed herein, the invention also encompasses primary, secondary, and immortalized host cells of vertebrate origin, particularly mammalian origin, that have been engineered to delete or replace endogenous genetic material (e.g., the coding sequence), and/or to include genetic material (e.g., heterologous polynucleotide sequences) that is operably associated with polynucleotides of the invention, and which activates, alters, and/or amplifies endogenous polynucleotides. For example, techniques known in the art may be used to operably associate heterologous control regions (e.g., promoter and/or enhancer) and endogenous polynucleotide sequences via homologous recombination (see, e.g., U.S. Pat. No. 5,641,670, issued Jun. 24, 1997; International Publication Number WO 96/29411; International Publication Number WO 94/12650; Koller et al., Proc. Natl. Acad. Sci. USA 86:8932-8935 (1989); and Zijlstra et al., Nature 342:435-438 (1989), the disclosures of each of which are incorporated by reference in their entireties).

[0273] Polypeptides of the invention can be recovered and purified from recombinant cell cultures by well-known methods including ammonium sulfate or ethanol precipitation, acid extraction, anion or cation exchange chromatography, phosphocellulose chromatography, hydrophobic interaction chromatography, affinity chromatography, hydroxylapatite chromatography and lectin chromatography. Most preferably, high performance liquid chromatography (“HPLC”) is employed for purification.

[0274] Polypeptides of the present invention can also be recovered from: products purified from natural sources, including bodily fluids, tissues and cells, whether directly isolated or cultured; products of chemical synthetic procedures; and products produced by recombinant techniques from a prokaryotic or eukaryotic host, including, for example, bacterial, yeast, higher plant, insect, and mammalian cells. Depending upon the host employed in a recombinant production procedure, the polypeptides of the present invention may be glycosylated or may be non-glycosylated. In addition, polypeptides of the invention may also include an initial modified methionine residue, in some cases as a result of host-mediated processes. Thus, it is well known in the art that the N-terminal methionine encoded by the translation initiation codon generally is removed with high efficiency from any protein after translation in all eukaryotic cells. While the N-terminal methionine on most proteins also is efficiently removed in most prokaryotes, for some proteins, this prokaryotic removal process is inefficient, depending on the nature of the amino acid to which the N-terminal methionine is covalently linked.

[0275] In one embodiment, the yeast Pichia pastoris is used to express polypeptides of the invention in a eukaryotic system. Pichia pastoris is a methylotrophic yeast which can metabolize methanol as its sole carbon source. A main step in the methanol metabolization pathway is the oxidation of methanol to formaldehyde using O₂. This reaction is catalyzed by the enzyme alcohol oxidase. In order to metabolize methanol as its sole carbon source, Pichia pastoris must generate high levels of alcohol oxidase due, in part, to the relatively low affinity of alcohol oxidase for O₂. Consequently, in a growth medium depending on methanol as a main carbon source, the promoter region of one of the two alcohol oxidase genes (AOX1) is highly active. In the presence of methanol, alcohol oxidase produced from the AOX1 gene comprises up to approximately 30% of the total soluble protein in Pichia pastoris. See Ellis, S. B., et al., Mol. Cell. Biol. 5:1111-21 (1985); Koutz, P. J, et al., Yeast 5:167-77 (1989); Tschopp, J. F., et al., Nucl. Acids Res. 15:3859-76 (1987). Thus, a heterologous coding sequence, such as, for example, a polynucleotide of the present invention, under the transcriptional regulation of all or part of the AOX1 regulatory sequence is expressed at exceptionally high levels in Pichia yeast grown in the presence of methanol.

[0276] In one example, the plasmid vector pPIC9K is used to express DNA encoding a polypeptide of the invention, as set forth herein, in a Pichea yeast system essentially as described in “Pichia Protocols: Methods in Molecular Biology,” D. R. Higgins and J. Cregg, eds. The Humana Press, Totowa, N.J., 1998. This expression vector allows expression and secretion of a polypeptide of the invention by virtue of the strong AOX1 promoter linked to the Pichia pastoris alkaline phosphatase (PHO) secretory signal peptide (i.e., leader) located upstream of a multiple cloning site.

[0277] Many other yeast vectors could be used in place of pPIC9K, such as, pYES2, pYD1, pTEF1/Zeo, pYES2/GS, pPICZ, pGAPZ, pGAPZalpha, pPIC9, pPIC3.5, pHIL-D2, pHIL-S1, pPIC3.5K, and PAO815, as one skilled in the art would readily appreciate, as long as the proposed expression construct provides appropriately located signals for transcription, translation, secretion (if desired), and the like, including an in-frame AUG as required.

[0278] In another embodiment, high-level expression of a heterologous coding sequence, such as, for example, a polynucleotide of the present invention, may be achieved by cloning the heterologous polynucleotide of the invention into an expression vector such as, for example, pGAPZ or pGAPZalpha, and growing the yeast culture in the absence of methanol.

[0279] In addition to encompassing host cells containing the vector constructs discussed herein, the invention also encompasses primary, secondary, and immortalized host cells of vertebrate origin, particularly mammalian origin, that have been engineered to delete or replace endogenous genetic material (e.g., coding sequence), and/or to include genetic material (e.g., heterologous polynucleotide sequences) that is operably associated with polynucleotides of the invention, and which activates, alters, and/or amplifies endogenous polynucleotides. For example, techniques known in the art may be used to operably associate heterologous control regions (e.g., promoter and/or enhancer) and endogenous polynucleotide sequences via homologous recombination (see, e.g., U.S. Pat. No. 5,641,670, issued Jun. 24, 1997; International Publication No. WO 96/29411, published Sep. 26, 1996; International Publication No. WO 94/12650, published Aug. 4, 1994; Koller et al., Proc. Natl. Acad. Sci. USA 86:8932-8935 (1989); and Zijlstra et al., Nature 342:435-438 (1989), the disclosures of each of which are incorporated by reference in their entireties).

[0280] In addition, polypeptides of the invention can be chemically synthesized using techniques known in the art (e.g., see Creighton, 1983, Proteins: Structures and Molecular Principles, W.H. Freeman & Co., N.Y., and Hunkapiller et al., Nature, 310:105-111 (1984)). For example, a polypeptide corresponding to a fragment of a polypeptide can be synthesized by use of a peptide synthesizer. Furthermore, if desired, nonclassical amino acids or chemical amino acid analogs can be introduced as a substitution or addition into the polypeptide sequence. Non-classical amino acids include, but are not limited to, to the D-isomers of the common amino acids, 2,4-diaminobutyric acid, a-amino isobutyric acid, 4-aminobutyric acid, Abu, 2-amino butyric acid, g-Abu, e-Ahx, 6-amino hexanoic acid, Aib, 2-amino isobutyric acid, 3-amino propionic acid, ornithine, norleucine, norvaline, hydroxyproline, sarcosine, citrulline, homocitrulline, cysteic acid, t-butylglycine, t-butylalanine, phenylglycine, cyclohexylalanine, b-alanine, fluoro-amino acids, designer amino acids such as b-methyl amino acids, Ca-methyl amino acids, Na-methyl amino acids, and amino acid analogs in general. Furthermore, the amino acid can be D (dextrorotary) or L (levorotary).

[0281] The invention encompasses polypeptides of the present invention which are differentially modified during or after translation, e.g., by glycosylation, acetylation, phosphorylation, amidation, derivatization by known protecting/blocking groups, proteolytic cleavage, linkage to an antibody molecule or other cellular ligand, etc. Any of numerous chemical modifications may be carried out by known techniques, including but not limited, to specific chemical cleavage by cyanogen bromide, trypsin, chymotrypsin, papain, V8 protease, NaBH₄; acetylation, formylation, oxidation, reduction; metabolic synthesis in the presence of tunicamycin; etc.

[0282] Additional post-translational modifications encompassed by the invention include, for example, e.g., N-linked or O-linked carbohydrate chains, processing of N-terminal or C-terminal ends), attachment of chemical moieties to the amino acid backbone, chemical modifications of N-linked or O-linked carbohydrate chains, and addition or deletion of an N-terminal methionine residue as a result of procaryotic host cell expression. The polypeptides may also be modified with a detectable label, such as an enzymatic, fluorescent, isotopic or affinity label to allow for detection and isolation of the protein.

[0283] Examples of suitable enzymes include horseradish peroxidase, alkaline phosphatase, beta-galactosidase, or acetylcholinesterase; examples of suitable prosthetic group complexes include streptavidin/biotin and avidin/biotin; examples of suitable fluorescent materials include umbelliferone, fluorescein, fluorescein isothiocyanate, rhodamine, dichlorotriazinylamine fluorescein, dansyl chloride or phycoerythrin; an example of a luminescent material includes luminol; examples of bioluminescent materials include luciferase, luciferin, and aequorin; and examples of suitable radioactive material include iodine (¹²¹I, ¹²³I, ¹²⁵I, ¹³¹I), carbon (¹⁴C), sulfur (³⁵S), tritium (³H), indium (¹¹¹In, ¹¹²In, ^{113m}In, ^{115m}In), technetium (⁹⁹Tc, ^{99m}Tc), thallium (²⁰¹Ti), gallium (⁶⁸Ga, ⁶⁷Ga), palladium (¹⁰³Pd), molybdenum (⁹⁹Mo), xenon (¹³³Xe), fluorine (¹⁸F), ¹⁵³Sm, ¹⁷⁷Lu, ¹⁵⁹Gd, ¹⁴⁹Pm, ¹⁴⁰La, ¹⁷⁵Yb, ¹⁶⁶Ho, ⁹⁰Y, ⁴⁷Sc, ¹⁸⁶Re, ¹⁸⁸Re, ¹⁴²Pr, ¹⁰⁵Rh, and ⁹⁷Ru.

[0284] In specific embodiments, a polypeptide of the present invention or fragment or variant thereof is attached to macrocyclic chelators that associate with radiometal ions, including but not limited to, ¹⁷⁷Lu, ⁹⁰Y, ¹⁶⁶Ho, and ¹⁵³Sm, to polypeptides. In a preferred embodiment, the radiometal ion associated with the macrocyclic chelators is ¹¹¹In. In another preferred embodiment, the radiometal ion associated with the macrocyclic chelator is ⁹⁰Y. In specific embodiments, the macrocyclic chelator is 1,4,7,10-tetraazacyclododecane-N,N′,N″,N′″-tetraacetic acid (DOTA). In other specific embodiments, DOTA is attached to an antibody of the invention or fragment thereof via a linker molecule. Examples of linker molecules useful for conjugating DOTA to a polypeptide are commonly known in the art—see, for example, DeNardo et al., Clin Cancer Res. 4(10):2483-90 (1998); Peterson et al., Bioconjug. Chem. 10(4):553-7 (1999); and Zimmerman et al, Nucl. Med. Biol. 26(8):943-50 (1999); which are hereby incorporated by reference in their entirety.

[0285] As mentioned, the proteins of the invention may be modified by either natural processes, such as posttranslational processing, or by chemical modification techniques which are well known in the art. It will be appreciated that the same type of modification may be present in the same or varying degrees at several sites in a given polypeptide. Polypeptides of the invention may be branched, for example, as a result of ubiquitination, and they may be cyclic, with or without branching. Cyclic, branched, and branched cyclic polypeptides may result from posttranslation natural processes or may be made by synthetic methods. Modifications include acetylation, acylation, ADP-ribosylation, amidation, covalent attachment of flavin, covalent attachment of a heme moiety, covalent attachment of a nucleotide or nucleotide derivative, covalent attachment of a lipid or lipid derivative, covalent attachment of phosphotidylinositol, cross-linking, cyclization, disulfide bond formation, demethylation, formation of covalent cross-links, formation of cysteine, formation of pyroglutamate, formylation, gamma-carboxylation, glycosylation, GPI anchor formation, hydroxylation, iodination, methylation, myristoylation, oxidation, pegylation, proteolytic processing, phosphorylation, prenylation, racemization, selenoylation, sulfation, transfer-RNA mediated addition of amino acids to proteins such as arginylation, and ubiquitination. (See, for instance, PROTEINS—STRUCTURE AND MOLECULAR PROPERTES, 2nd Ed., T. E. Creighton, W. H. Freeman and Company, New York (1993); POSTTRANSLATIONAL COVALENT MODIFICATION OF PROTEINS, B. C. Johnson, Ed., Academic Press, New York, pgs. 1-12 (1983); Seifter et al., Meth. Enzymol. 182:626-646 (1990); Rattan et al., Ann. N.Y. Acad. Sci. 663:48-62 (1992)).

[0286] Also provided by the invention are chemically modified derivatives of the polypeptides of the invention which may provide additional advantages such as increased solubility, stability and circulating time of the polypeptide, or decreased immunogenicity (see U.S. Pat. No. 4,179,337). The chemical moieties for derivitization may be selected from water soluble polymers such as polyethylene glycol, ethylene glycol/propylene glycol copolymers, carboxymethylcellulose, dextran, polyvinyl alcohol and the like. The polypeptides may be modified at random positions within the molecule, or at predetermined positions within the molecule and may include one, two, three or more attached chemical moieties.

[0287] The polymer may be of any molecular weight, and may be branched or unbranched. For polyethylene glycol, the preferred molecular weight is between about 1 kDa and about 100 kDa (the term “about” indicating that in preparations of polyethylene glycol, some molecules will weigh more, some less, than the stated molecular weight) for ease in handling and manufacturing. Other sizes may be used, depending on the desired therapeutic profile (e.g., the duration of sustained release desired, the effects, if any on biological activity, the ease in handling, the degree or lack of antigenicity and other known effects of the polyethylene glycol to a therapeutic protein or analog). For example, the polyethylene glycol may have an average molecular weight of about 200, 500, 1000, 1500, 2000, 2500, 3000, 3500, 4000, 4500, 5000, 5500, 6000, 6500, 7000, 7500, 8000, 8500, 9000, 9500, 10,000, 10,500, 11,000, 11,500, 12,000, 12,500, 13,000, 13,500, 14,000, 14,500, 15,000, 15,500, 16,000, 16,500, 17,000, 17,500, 18,000, 18,500, 19,000, 19,500, 20,000, 25,000, 30,000, 35,000, 40,000, 45,000, 50,000, 55,000, 60,000, 65,000, 70,000, 75,000, 80,000, 85,000, 90,000, 95,000, or 100,000 kDa.

[0288] As noted above, the polyethylene glycol may have a branched structure. Branched polyethylene glycols are described, for example, in U.S. Pat. No. 5,643,575; Morpurgo et al., Appl. Biochem. Biotechnol. 56:59-72 (1996); Vorobjev et al., Nucleosides Nucleotides 18:2745-2750 (1999); and Caliceti et al., Bioconjug. Chem. 10:638-646 (1999), the disclosures of each of which are incorporated herein by reference.

[0289] The polyethylene glycol molecules (or other chemical moieties) should be attached to the protein with consideration of effects on functional or antigenic domains of the protein. There are a number of attachment methods available to those skilled in the art, such as, for example, the method disclosed in EP 0 401 384 (coupling PEG to G-CSF), herein incorporated by reference; see also Malik et al., Exp. Hematol. 20:1028-1035 (1992), reporting pegylation of GM-CSF using tresyl chloride. For example, polyethylene glycol may be covalently bound through amino acid residues via a reactive group, such as a free amino or carboxyl group. Reactive groups are those to which an activated polyethylene glycol molecule may be bound. The amino acid residues having a free amino group may include lysine residues and the N-terminal amino acid residues; those having a free carboxyl group may include aspartic acid residues glutamic acid residues and the C-terminal amino acid residue. Sulfhydryl groups may also be used as a reactive group for attaching the polyethylene glycol molecules. Preferred for therapeutic purposes is attachment at an amino group, such as attachment at the N-terminus or lysine group.

[0290] As suggested above, polyethylene glycol may be attached to proteins via linkage to any of a number of amino acid residues. For example, polyethylene glycol can be linked to proteins via covalent bonds to lysine, histidine, aspartic acid, glutamic acid, or cysteine residues. One or more reaction chemistries may be employed to attach polyethylene glycol to specific amino acid residues (e.g., lysine, histidine, aspartic acid, glutamic acid, or cysteine) of the protein or to more than one type of amino acid residue (e.g., lysine, histidine, aspartic acid, glutamic acid, cysteine and combinations thereof) of the protein.

[0291] One may specifically desire proteins chemically modified at the N-terminus. Using polyethylene glycol as an illustration of the present composition, one may select from a variety of polyethylene glycol molecules (by molecular weight, branching, etc.), the proportion of polyethylene glycol molecules to protein (polypeptide) molecules in the reaction mix, the type of pegylation reaction to be performed, and the method of obtaining the selected N-terminally pegylated protein. The method of obtaining the N-terminally pegylated preparation (i.e., separating this moiety from other monopegylated moieties if necessary) may be by purification of the N-terminally pegylated material from a population of pegylated protein molecules. Selective proteins chemically modified at the N-terminus modification may be accomplished by reductive alkylation which exploits differential reactivity of different types of primary amino groups (lysine versus the N-terminal) available for derivatization in a particular protein. Under the appropriate reaction conditions, substantially selective derivatization of the protein at the N-terminus with a carbonyl group containing polymer is achieved.

[0292] As indicated above, pegylation of the proteins of the invention may be accomplished by any number of means. For example, polyethylene glycol may be attached to the protein either directly or by an intervening linker. Linkerless systems for attaching polyethylene glycol to proteins are described in Delgado et al., Crit. Rev. Thera. Drug Carrier Sys. 9:249-304 (1992); Francis et al., Intern. J. of Hematol. 68:1-18 (1998); U.S. Pat. No. 4,002,531; U.S. Pat. No. 5,349,052; WO 95/06058; and WO 98/32466, the disclosures of each of which are incorporated herein by reference.

[0293] One system for attaching polyethylene glycol directly to amino acid residues of proteins without an intervening linker employs tresylated MPEG, which is produced by the modification of monmethoxy polyethylene glycol (MPEG) using tresylchloride (ClSO₂CH₂CF₃). Upon reaction of protein with tresylated MPEG, polyethylene glycol is directly attached to amine groups of the protein. Thus, the invention includes protein-polyethylene glycol conjugates produced by reacting proteins of the invention with a polyethylene glycol molecule having a 2,2,2-trifluoreothane sulphonyl group.

[0294] Polyethylene glycol can also be attached to proteins using a number of different intervening linkers. For example, U.S. Pat. No. 5,612,460, the entire disclosure of which is incorporated herein by reference, discloses urethane linkers for connecting polyethylene glycol to proteins. Protein-polyethylene glycol conjugates wherein the polyethylene glycol is attached to the protein by a linker can also be produced by reaction of proteins with compounds such as MPEG-succinimidylsuccinate, MPEG activated with 1,1′-carbonyldiimidazole, MPEG-2,4,5-trichloropenylcarbonate, MPEG-p-nitrophenolcarbonate, and various MPEG-succinate derivatives. A number of additional polyethylene glycol derivatives and reaction chemistries for attaching polyethylene glycol to proteins are described in International Publication No. WO 98/32466, the entire disclosure of which is incorporated herein by reference. Pegylated protein products produced using the reaction chemistries set out herein are included within the scope of the invention.

[0295] The number of polyethylene glycol moieties attached to each protein of the invention (i.e., the degree of substitution) may also vary. For example, the pegylated proteins of the invention may be linked, on average, to 1, 2, 3, 4, 5, 6, 7, 8, 9, 10, 12, 15, 17, 20, or more polyethylene glycol molecules. Similarly, the average degree of substitution within ranges such as 1-3, 2-4, 3-5, 4-6, 5-7, 6-8, 7-9, 8-10, 9-11, 10-12, 11-13, 12-14, 13-15, 14-16, 15-17, 16-18, 17-19, or 18-20 polyethylene glycol moieties per protein molecule. Methods for determining the degree of substitution are discussed, for example, in Delgado et al., Crit. Rev. Thera. Drug Carrier Sys. 9:249-304 (1992).

[0296] The polypeptides of the invention can be recovered and purified from chemical synthesis and recombinant cell cultures by standard methods which include, but are not limited to, ammonium sulfate or ethanol precipitation, acid extraction, anion or cation exchange chromatography, phosphocellulose chromatography, hydrophobic interaction chromatography, affinity chromatography, hydroxylapatite chromatography and lectin chromatography. Most preferably, high performance liquid chromatography (“HPLC”) is employed for purification. Well known techniques for refolding protein may be employed to regenerate active conformation when the polypeptide is denatured during isolation and/or purification.

[0297] The polypeptides of the invention may be in monomers or multimers (i.e., dimers, trimers, tetramers and higher multimers). Accordingly, the present invention relates to monomers and multimers of the polypeptides of the invention, their preparation, and compositions (preferably, Therapeutics) containing them. In specific embodiments, the polypeptides of the invention are monomers, dimers, trimers or tetramers. In additional embodiments, the multimers of the invention are at least dimers, at least trimers, or at least tetramers.

[0298] Multimers encompassed by the invention may be homomers or heteromers. As used herein, the term homomer refers to a multimer containing only polypeptides corresponding to a protein of the invention (e.g., the amino acid sequence of SEQ ID NO:Y, an amino acid sequence encoded by SEQ ID NO:X or the complement of SEQ ID NO:X, the amino acid sequence encoded by the portion of SEQ ID NO:X as defined in columns 8 and 9 of Table 2, and/or an amino acid sequence encoded by cDNA contained in ATCC Deposit No:Z (including fragments, variants, splice variants, and fusion proteins, corresponding to these as described herein)). These homomers may contain polypeptides having identical or different amino acid sequences. In a specific embodiment, a homomer of the invention is a multimer containing only polypeptides having an identical amino acid sequence. In another specific embodiment, a homomer of the invention is a multimer containing polypeptides having different amino acid sequences. In specific embodiments, the multimer of the invention is a homodimer (e.g., containing two polypeptides having identical or different amino acid sequences) or a homotrimer (e.g., containing three polypeptides having identical and/or different amino acid sequences). In additional embodiments, the homomeric multimer of the invention is at least a homodimer, at least a homotrimer, or at least a homotetramer.

[0299] As used herein, the term heteromer refers to a multimer containing one or more heterologous polypeptides (i.e., polypeptides of different proteins) in addition to the polypeptides of the invention. In a specific embodiment, the multimer of the invention is a heterodimer, a heterotrimer, or a heterotetramer. In additional embodiments, the heteromeric multimer of the invention is at least a heterodimer, at least a heterotrimer, or at least a heterotetramer.

[0300] Multimers of the invention may be the result of hydrophobic, hydrophilic, ionic and/or covalent associations and/or may be indirectly linked by, for example, liposome formation. Thus, in one embodiment, multimers of the invention, such as, for example, homodimers or homotrimers, are formed when polypeptides of the invention contact one another in solution. In another embodiment, heteromultimers of the invention, such as, for example, heterotrimers or heterotetramers, are formed when polypeptides of the invention contact antibodies to the polypeptides of the invention (including antibodies to the heterologous polypeptide sequence in a fusion protein of the invention) in solution. In other embodiments, multimers of the invention are formed by covalent associations with and/or between the polypeptides of the invention. Such covalent associations may involve one or more amino acid residues contained in the polypeptide sequence (e.g., that recited in SEQ ID NO:Y, encoded by the portion of SEQ ID NO:X as defined in columns 8 and 9 of Table 2, and/or encoded by the cDNA contained in ATCC Deposit No:Z). In one instance, the covalent associations are cross-linking between cysteine residues located within the polypeptide sequences which interact in the native (i.e., naturally occurring) polypeptide. In another instance, the covalent associations are the consequence of chemical or recombinant manipulation. Alternatively, such covalent associations may involve one or more amino acid residues contained in the heterologous polypeptide sequence in a fusion protein. In one example, covalent associations are between the heterologous sequence contained in a fusion protein of the invention (see, e.g., U.S. Pat. No. 5,478,925). In a specific example, the covalent associations are between the heterologous sequence contained in a Fc fusion protein of the invention (as described herein). In another specific example, covalent associations of fusion proteins of the invention are between heterologous polypeptide sequence from another protein that is capable of forming covalently associated multimers, such as for example, osteoprotegerin (see, e.g., International Publication NO: WO 98/49305, the contents of which are herein incorporated by reference in its entirety). In another embodiment, two or more polypeptides of the invention are joined through peptide linkers. Examples include those peptide linkers described in U.S. Pat. No. 5,073,627 (hereby incorporated by reference). Proteins comprising multiple polypeptides of the invention separated by peptide linkers may be produced using conventional recombinant DNA technology.

[0301] Another method for preparing multimer polypeptides of the invention involves use of polypeptides of the invention fused to a leucine zipper or isoleucine zipper polypeptide sequence. Leucine zipper and isoleucine zipper domains are polypeptides that promote multimerization of the proteins in which they are found. Leucine zippers were originally identified in several DNA-binding proteins (Landschulz et al., Science 240:1759, (1988)), and have since been found in a variety of different proteins. Among the known leucine zippers are naturally occurring peptides and derivatives thereof that dimerize or trimerize. Examples of leucine zipper domains suitable for producing soluble multimeric proteins of the invention are those described in PCT application WO 94/10308, hereby incorporated by reference. Recombinant fusion proteins comprising a polypeptide of the invention fused to a polypeptide sequence that dimerizes or trimerizes in solution are expressed in suitable host cells, and the resulting soluble multimeric fusion protein is recovered from the culture supernatant using techniques known in the art.

[0302] Trimeric polypeptides of the invention may offer the advantage of enhanced biological activity. Preferred leucine zipper moieties and isoleucine moieties are those that preferentially form trimers. One example is a leucine zipper derived from lung surfactant protein D (SPD), as described in Hoppe et al. (FEBS Letters 344:191, (1994)) and in U.S. patent application Ser. No. 08/446,922, hereby incorporated by reference. Other peptides derived from naturally occurring trimeric proteins may be employed in preparing trimeric polypeptides of the invention.

[0303] In another example, proteins of the invention are associated by interactions between Flag® polypeptide sequence contained in fusion proteins of the invention containing Flag® polypeptide sequence. In a further embodiment, proteins of the invention are associated by interactions between heterologous polypeptide sequence contained in Flag® fusion proteins of the invention and anti-Flag® antibody.

[0304] The multimers of the invention may be generated using chemical techniques known in the art. For example, polypeptides desired to be contained in the multimers of the invention may be chemically cross-linked using linker molecules and linker molecule length optimization techniques known in the art (see, e.g., U.S. Pat. No. 5,478,925, which is herein incorporated by reference in its entirety). Additionally, multimers of the invention may be generated using techniques known in the art to form one or more inter-molecule cross-links between the cysteine residues located within the sequence of the polypeptides desired to be contained in the multimer (see, e.g., U.S. Pat. No. 5,478,925, which is herein incorporated by reference in its entirety). Further, polypeptides of the invention may be routinely modified by the addition of cysteine or biotin to the C-terminus or N-terminus of the polypeptide and techniques known in the art may be applied to generate multimers containing one or more of these modified polypeptides (see, e.g., U.S. Pat. No. 5,478,925, which is herein incorporated by reference in its entirety). Additionally, techniques known in the art may be applied to generate liposomes containing the polypeptide components desired to be contained in the multimer of the invention (see, e.g., U.S. Pat. No. 5,478,925, which is herein incorporated by reference in its entirety).

[0305] Alternatively, multimers of the invention may be generated using genetic engineering techniques known in the art. In one embodiment, polypeptides contained in multimers of the invention are produced recombinantly using fusion protein technology described herein or otherwise known in the art (see, e.g., U.S. Pat. No. 5,478,925, which is herein incorporated by reference in its entirety). In a specific embodiment, polynucleotides coding for a homodimer of the invention are generated by ligating a polynucleotide sequence encoding a polypeptide of the invention to a sequence encoding a linker polypeptide and then further to a synthetic polynucleotide encoding the translated product of the polypeptide in the reverse orientation from the original C-terminus to the N-terminus (lacking the leader sequence) (see, e.g., U.S. Pat. No. 5,478,925, which is herein incorporated by reference in its entirety). In another embodiment, recombinant techniques described herein or otherwise known in the art are applied to generate recombinant polypeptides of the invention which contain a transmembrane domain (or hydrophobic or signal peptide) and which can be incorporated by membrane reconstitution techniques into liposomes (see, e.g., U.S. Pat. No. 5,478,925, which is herein incorporated by reference in its entirety).

[0306] Antibodies

[0307] Further polypeptides of the invention relate to antibodies and T-cell antigen receptors (TCR) which immunospecifically bind a polypeptide, polypeptide fragment, or variant of the invention (e.g., a polypeptide or fragment or variant of the amino acid sequence of SEQ ID NO:Y or a polypeptide encoded by the cDNA contained in ATCC Deposit No:Z, and/or an epitope, of the present invention) as determined by immunoassays well known in the art for assaying specific antibody-antigen binding. Antibodies of the invention include, but are not limited to, polyclonal, monoclonal, multispecific, human, humanized or chimeric antibodies, single chain antibodies, Fab fragments, F(ab′) fragments, fragments produced by a Fab expression library, anti-idiotypic (anti-Id) antibodies (including, e.g., anti-Id antibodies to antibodies of the invention), intracellularly-made antibodies (i.e., intrabodies), and epitope-binding fragments of any of the above. The term “antibody,” as used herein, refers to immunoglobulin molecules and immunologically active portions of immunoglobulin molecules, i.e., molecules that contain an antigen binding site that immunospecifically binds an antigen. The immunoglobulin molecules of the invention can be of any type (e.g., IgG, IgE, IgM, IgD, IgA and IgY), class (e.g., IgG1, IgG2, IgG3, IgG4, IgA1 and IgA2) or subclass of immunoglobulin molecule. In preferred embodiments, the immunoglobulin molecules of the invention are IgG1. In other preferred embodiments, the immunoglobulin molecules of the invention are IgG4.

[0308] Most preferably the antibodies are human antigen-binding antibody fragments of the present invention and include, but are not limited to, Fab, Fab′ and F(ab′)2, Fd, single-chain Fvs (scFv), single-chain antibodies, disulfide-linked Fvs (sdFv) and fragments comprising either a VL or VH domain. Antigen-binding antibody fragments, including single-chain antibodies, may comprise the variable region(s) alone or in combination with the entirety or a portion of the following: hinge region, CH1, CH2, and CH3 domains. Also included in the invention are antigen-binding fragments also comprising any combination of variable region(s) with a hinge region, CH1, CH2, and CH3 domains. The antibodies of the invention may be from any animal origin including birds and mammals. Preferably, the antibodies are human, murine (e.g., mouse and rat), donkey, ship rabbit, goat, guinea pig, camel, horse, or chicken. As used herein, “human” antibodies include antibodies having the amino acid sequence of a human immunoglobulin and include antibodies isolated from human immunoglobulin libraries or from animals transgenic for one or more human immunoglobulin and that do not express endogenous immunoglobulins, as described infra and, for example in, U.S. Pat. No. 5,939,598 by Kucherlapati et al.

[0309] The antibodies of the present invention may be monospecific, bispecific, trispecific or of greater multispecificity. Multispecific antibodies may be specific for different epitopes of a polypeptide of the present invention or may be specific for both a polypeptide of the present invention as well as for a heterologous epitope, such as a heterologous polypeptide or solid support material. See, e.g., PCT publications WO 93/17715; WO 92/08802; WO 91/00360; WO 92/05793; Tutt, et al., J. Immunol. 147:60-69 (1991); U.S. Pat. Nos. 4,474,893; 4,714,681; 4,925,648; 5,573,920; 5,601,819; Kostelny et al., J. Immunol. 148:1547-1553 (1992).

[0310] Antibodies of the present invention may be described or specified in terms of the epitope(s) or portion(s) of a polypeptide of the present invention which they recognize or specifically bind. The epitope(s) or polypeptide portion(s) may be specified as described herein, e.g., by N-terminal and C-terminal positions, or by size in contiguous amino acid residues, or listed in the Tables and Figures. Preferred epitopes of the invention include the predicted epitopes shown in column 7 of Table 1B.], as well as polynucleotides that encode these epitopes. Antibodies which specifically bind any epitope or polypeptide of the present invention may also be excluded. Therefore, the present invention includes antibodies that specifically bind polypeptides of the present invention, and allows for the exclusion of the same.

[0311] Antibodies of the present invention may also be described or specified in terms of their cross-reactivity. Antibodies that do not bind any other analog, ortholog, or homolog of a polypeptide of the present invention are included. Antibodies that bind polypeptides with at least 95%, at least 90%, at least 85%, at least 80%, at least 75%, at least 70%, at least 65%, at least 60%, at least 55%, and at least 50% identity (as calculated using methods known in the art and described herein) to a polypeptide of the present invention are also included in the present invention. In specific embodiments, antibodies of the present invention cross-react with murine, rat and/or rabbit homologs of human proteins and the corresponding epitopes thereof. Antibodies that do not bind polypeptides with less than 95%, less than 90%, less than 85%, less than 80%, less than 75%, less than 70%, less than 65%, less than 60%, less than 55%, and less than 50% identity (as calculated using methods known in the art and described herein) to a polypeptide of the present invention are also included in the present invention. In a specific embodiment, the above-described cross-reactivity is with respect to any single specific antigenic or immunogenic polypeptide, or combination(s) of 2, 3, 4, 5, or more of the specific antigenic and/or immunogenic polypeptides disclosed herein. Further included in the present invention are antibodies which bind polypeptides encoded by polynucleotides which hybridize to a polynucleotide of the present invention under stringent hybridization conditions (as described herein). Antibodies of the present invention may also be described or specified in terms of their binding affinity to a polypeptide of the invention. Preferred binding affinities include those with a dissociation constant or Kd less than 5×10⁻² M, 10⁻² M, 5×10⁻³ M, 10⁻³ M, 5×10⁻⁴ M, 10⁻⁴ M, 5×10⁻⁵ M, 10⁻⁵ M, 5×10⁻⁶ M, 10⁻⁶M, 5×10⁻⁷ M, 10⁻⁷ M, 5×10⁻⁸ M, 10⁻⁸ M, 5×10⁻⁹ M, 10⁻⁹ M, 5×10⁻¹⁰ M, 10⁻¹⁰ M, 5×10⁻¹¹ M, 10⁻¹¹ M, 5×10⁻¹² M, 10⁻¹² M, 5×10⁻¹³ M, 10⁻¹³ M, 5×10⁻¹⁴ M, 10⁻¹⁴ M, 5×10⁻¹⁵ M, or 10⁻¹⁵ M.

[0312] The invention also provides antibodies that competitively inhibit binding of an antibody to an epitope of the invention as determined by any method known in the art for determining competitive binding, for example, the immunoassays described herein. In preferred embodiments, the antibody competitively inhibits binding to the epitope by at least 95%, at least 90%, at least 85%, at least 80%, at least 75%, at least 70%, at least 60%, or at least 50%.

[0313] Antibodies of the present invention may act as agonists or antagonists of the polypeptides of the present invention. For example, the present invention includes antibodies which disrupt the receptor/ligand interactions with the polypeptides of the invention either partially or fully. Preferably, antibodies of the present invention bind an antigenic epitope disclosed herein, or a portion thereof. The invention features both receptor-specific antibodies and ligand-specific antibodies. The invention also features receptor-specific antibodies which do not prevent ligand binding but prevent receptor activation. Receptor activation (i.e., signaling) may be determined by techniques described herein or otherwise known in the art. For example, receptor activation can be determined by detecting the phosphorylation (e.g., tyrosine or serine/threonine) of the receptor or its substrate by immunoprecipitation followed by western blot analysis (for example, as described supra). In specific embodiments, antibodies are provided that inhibit ligand activity or receptor activity by at least 95%, at least 90%, at least 85%, at least 80%, at least 75%, at least 70%, at least 60%, or at least 50% of the activity in absence of the antibody.

[0314] The invention also features receptor-specific antibodies which both prevent ligand binding and receptor activation as well as antibodies that recognize the receptor-ligand complex, and, preferably, do not specifically recognize the unbound receptor or the unbound ligand. Likewise, included in the invention are neutralizing antibodies which bind the ligand and prevent binding of the ligand to the receptor, as well as antibodies which bind the ligand, thereby preventing receptor activation, but do not prevent the ligand from binding the receptor. Further included in the invention are antibodies which activate the receptor. These antibodies may act as receptor agonists, i.e., potentiate or activate either all or a subset of the biological activities of the ligand-mediated receptor activation, for example, by inducing dimerization of the receptor. The antibodies may be specified as agonists, antagonists or inverse agonists for biological activities comprising the specific biological activities of the peptides of the invention disclosed herein. The above antibody agonists can be made using methods known in the art. See, e.g., PCT publication WO 96/40281; U.S. Pat. No. 5,811,097; Deng et al., Blood 92(6):1981-1988 (1998); Chen et al., Cancer Res. 58(16):3668-3678 (1998); Harrop et al., J. Immunol. 161(4):1786-1794 (1998); Zhu et al., Cancer Res. 58(15):3209-3214 (1998); Yoon et al., J. Immunol. 160(7):3170-3179 (1998); Prat et al., J. Cell. Sci. 111(Pt2):237-247 (1998); Pitard et al., J. Immunol. Methods 205(2):177-190 (1997); Liautard et al., Cytokine 9(4):233-241 (1997); Carlson et al., J. Biol. Chem. 272(17):11295-11301 (1997); Taryman et al., Neuron 14(4):755-762 (1995); Muller et al., Structure 6(9):1153-1167 (1998); Bartunek et al., Cytokine 8(1):14-20 (1996) (which are all incorporated by reference herein in their entireties).

[0315] Antibodies of the present invention may be used, for example, to purify, detect, and target the polypeptides of the present invention, including both in vitro and in vivo diagnostic and therapeutic methods. For example, the antibodies have utility in immunoassays for qualitatively and quantitatively measuring levels of the polypeptides of the present invention in biological samples. See, e.g., Harlow et al., Antibodies: A Laboratory Manual, (Cold Spring Harbor Laboratory Press, 2nd ed. 1988); incorporated by reference herein in its entirety.

[0316] As discussed in more detail below, the antibodies of the present invention may be used either alone or in combination with other compositions. The antibodies may further be recombinantly fused to a heterologous polypeptide at the N- or C-terminus or chemically conjugated (including covalent and non-covalent conjugations) to polypeptides or other compositions. For example, antibodies of the present invention may be recombinantly fused or conjugated to molecules useful as labels in detection assays and effector molecules such as heterologous polypeptides, drugs, radionuclides, or toxins. See, e.g., PCT publications WO 92/08495; WO 91/14438; WO 89/12624; U.S. Pat. No. 5,314,995; and EP 396,387; the disclosures of which are incorporated herein by reference in their entireties.

[0317] The antibodies of the invention include derivatives that are modified, i.e, by the covalent attachment of any type of molecule to the antibody such that covalent attachment does not prevent the antibody from generating an anti-idiotypic response. For example, but not by way of limitation, the antibody derivatives include antibodies that have been modified, e.g., by glycosylation, acetylation, pegylation, phosphylation, amidation, derivatization by known protecting/blocking groups, proteolytic cleavage, linkage to a cellular ligand or other protein, etc. Any of numerous chemical modifications may be carried out by known techniques, including, but not limited to specific chemical cleavage, acetylation, formylation, metabolic synthesis of tunicamycin, etc. Additionally, the derivative may contain one or more non-classical amino acids.

[0318] The antibodies of the present invention may be generated by any suitable method known in the art. Polyclonal antibodies to an antigen-of-interest can be produced by various procedures well known in the art. For example, a polypeptide of the invention can be administered to various host animals including, but not limited to, rabbits, mice, rats, etc. to induce the production of sera containing polyclonal antibodies specific for the antigen. Various adjuvants may be used to increase the immunological response, depending on the host species, and include but are not limited to, Freund's (complete and incomplete), mineral gels such as aluminum hydroxide, surface active substances such as lysolecithin, pluronic polyols, polyanions, peptides, oil emulsions, keyhole limpet hemocyanins, dinitrophenol, and potentially useful human adjuvants such as BCG (bacille Calmette-Guerin) and corynebacterium parvum. Such adjuvants are also well known in the art.

[0319] Monoclonal antibodies can be prepared using a wide variety of techniques known in the art including the use of hybridoma, recombinant, and phage display technologies, or a combination thereof. For example, monoclonal antibodies can be produced using hybridoma techniques including those known in the art and taught, for example, in Harlow et al., Antibodies: A Laboratory Manual, (Cold Spring Harbor Laboratory Press, 2nd ed. 1988); Hammerling, et al., in: Monoclonal Antibodies and T-Cell Hybridomas 563-681 (Elsevier, N.Y., 1981) (said references incorporated by reference in their entireties). The term “monoclonal antibody” as used herein is not limited to antibodies produced through hybridoma technology. The term “monoclonal antibody” refers to an antibody that is derived from a single clone, including any eukaryotic, prokaryotic, or phage clone, and not the method by which it is produced.

[0320] Methods for producing and screening for specific antibodies using hybridoma technology are routine and well known in the art and are discussed in detail in the Examples. In a non-limiting example, mice can be immunized with a polypeptide of the invention or a cell expressing such peptide. Once an immune response is detected, e.g., antibodies specific for the antigen are detected in the mouse serum, the mouse spleen is harvested and splenocytes isolated. The splenocytes are then fused by well known techniques to any suitable myeloma cells, for example cells from cell line SP20 available from the ATCC. Hybridomas are selected and cloned by limited dilution. The hybridoma clones are then assayed by methods known in the art for cells that secrete antibodies capable of binding a polypeptide of the invention. Ascites fluid, which generally contains high levels of antibodies, can be generated by immunizing mice with positive hybridoma clones.

[0321] Accordingly, the present invention provides methods of generating monoclonal antibodies as well as antibodies produced by the method comprising culturing a hybridoma cell secreting an antibody of the invention wherein, preferably, the hybridoma is generated by fusing splenocytes isolated from a mouse immunized with an antigen of the invention with myeloma cells and then screening the hybridomas resulting from the fusion for hybridoma clones that secrete an antibody able to bind a polypeptide of the invention.

[0322] Another well known method for producing both polyclonal and monoclonal human B cell lines is transformation using Epstein Barr Virus (EBV). Protocols for generating EBV-transformed B cell lines are commonly known in the art, such as, for example, the protocol outlined in Chapter 7.22 of Current Protocols in Immunology, Coligan et al., Eds., 1994, John Wiley & Sons, NY, which is hereby incorporated in its entirety by reference. The source of B cells for transformation is commonly human peripheral blood, but B cells for transformation may also be derived from other sources including, but not limited to, lymph nodes, tonsil, spleen, tumor tissue, and infected tissues. Tissues are generally made into single cell suspensions prior to EBV transformation. Additionally, steps may be taken to either physically remove or inactivate T cells (e.g., by treatment with cyclosporin A) in B cell-containing samples, because T cells from individuals seropositive for anti-EBV antibodies can suppress B cell immortalization by EBV.

[0323] In general, the sample containing human B cells is innoculated with EBV, and cultured for 3-4 weeks. A typical source of EBV is the culture supernatant of the B95-8 cell line (ATCC #VR-1492). Physical signs of EBV transformation can generally be seen towards the end of the 3-4 week culture period. By phase-contrast microscopy, transformed cells may appear large, clear, hairy and tend to aggregate in tight clusters of cells. Initially, EBV lines are generally polyclonal. However, over prolonged periods of cell cultures, EBV lines may become monoclonal or polyclonal as a result of the selective outgrowth of particular B cell clones. Alternatively, polyclonal EBV transformed lines may be subcloned (e.g., by limiting dilution culture) or fused with a suitable fusion partner and plated at limiting dilution to obtain monoclonal B cell lines. Suitable fusion partners for EBV transformed cell lines include mouse myeloma cell lines (e.g., SP2/0, X63-Ag8.653), heteromyeloma cell lines (human×mouse; e.g, SPAM-8, SBC-H20, and CB-F7), and human cell lines (e.g., GM 1500, SKO-007, RPMI 8226, and KR-4). Thus, the present invention also provides a method of generating polyclonal or monoclonal human antibodies against polypeptides of the invention or fragments thereof, comprising EBV-transformation of human B cells.

[0324] Antibody fragments which recognize specific epitopes may be generated by known techniques. For example, Fab and F(ab′)2 fragments of the invention may be produced by proteolytic cleavage of immunoglobulin molecules, using enzymes such as papain (to produce Fab fragments) or pepsin (to produce F(ab′)2 fragments). F(ab′)2 fragments contain the variable region, the light chain constant region and the CH1 domain of the heavy chain.

[0325] For example, the antibodies of the present invention can also be generated using various phage display methods known in the art. In phage display methods, functional antibody domains are displayed on the surface of phage particles which carry the polynucleotide sequences encoding them. In a particular embodiment, such phage can be utilized to display antigen binding domains expressed from a repertoire or combinatorial antibody library (e.g., human or murine). Phage expressing an antigen binding domain that binds the antigen of interest can be selected or identified with antigen, e.g., using labeled antigen or antigen bound or captured to a solid surface or bead. Phage used in these methods are typically filamentous phage including fd and M13 binding domains expressed from phage with Fab, Fv or disulfide stabilized Fv antibody domains recombinantly fused to either the phage gene III or gene VIII protein. Examples of phage display methods that can be used to make the antibodies of the present invention include those disclosed in Brinkman et al., J. Immunol. Methods 182:41-50 (1995); Ames et al., J. Immunol. Methods 184:177-186 (1995); Kettleborough et al., Eur. J. Immunol. 24:952-958 (1994); Persic et al., Gene 187 9-18 (1997); Burton et al., Advances in Immunology 57:191-280 (1994); PCT application No. PCT/GB91/01134; PCT publications WO 90/02809; WO 91/10737; WO 92/01047; WO 92/18619; WO 93/11236; WO 95/15982; WO 95/20401; and U.S. Pat. Nos. 5,698,426; 5,223,409; 5,403,484; 5,580,717; 5,427,908; 5,750,753; 5,821,047; 5,571,698; 5,427,908; 5,516,637; 5,780,225; 5,658,727; 5,733,743 and 5,969,108; each of which is incorporated herein by reference in its entirety.

[0326] As described in the above references, after phage selection, the antibody coding regions from the phage can be isolated and used to generate whole antibodies, including human antibodies, or any other desired antigen binding fragment, and expressed in any desired host, including mammalian cells, insect cells, plant cells, yeast, and bacteria, e.g., as described in detail below. For example, techniques to recombinantly produce Fab, Fab′ and F(ab′)2 fragments can also be employed using methods known in the art such as those disclosed in PCT publication WO 92/22324; Mullinax et al., BioTechniques 12(6):864-869 (1992); and Sawai et al., AJRI 34:26-34 (1995); and Better et al., Science 240:1041-1043 (1988) (said references incorporated by reference in their entireties).

[0327] Examples of techniques which can be used to produce single-chain Fvs and antibodies include those described in U.S. Pat. Nos. 4,946,778 and 5,258,498; Huston et al., Methods in Enzymology 203:46-88 (1991); Shu et al., PNAS 90:7995-7999 (1993); and Skerra et al., Science 240:1038-1040 (1988). For some uses, including in vivo use of antibodies in humans and in vitro detection assays, it may be preferable to use chimeric, humanized, or human antibodies. A chimeric antibody is a molecule in which different portions of the antibody are derived from different animal species, such as antibodies having a variable region derived from a murine monoclonal antibody and a human immunoglobulin constant region. Methods for producing chimeric antibodies are known in the art. See e.g., Morrison, Science 229:1202 (1985); Oi et al., BioTechniques 4:214 (1986); Gillies et al., (1989) J. Immunol. Methods 125:191-202; U.S. Pat. Nos. 5,807,715; 4,816,567; and 4,816,397, which are incorporated herein by reference in their entirety. Humanized antibodies are antibody molecules from non-human species antibody that binds the desired antigen having one or more complementarity determining regions (CDRs) from the non-human species and a framework regions from a human immunoglobulin molecule. Often, framework residues in the human framework regions will be substituted with the corresponding residue from the CDR donor antibody to alter, preferably improve, antigen binding. These framework substitutions are identified by methods well known in the art, e.g., by modeling of the interactions of the CDR and framework residues to identify framework residues important for antigen binding and sequence comparison to identify unusual framework residues at particular positions. (See, e.g., Queen et al., U.S. Pat. No. 5,585,089; Riechmann et al., Nature 332:323 (1988), which are incorporated herein by reference in their entireties.) Antibodies can be humanized using a variety of techniques known in the art including, for example, CDR-grafting (EP 239,400; PCT publication WO 91/09967; U.S. Pat. Nos. 5,225,539; 5,530,101; and 5,585,089), veneering or resurfacing (EP 592,106; EP 519,596; Padlan, Molecular Immunology 28(4/5):489-498 (1991); Studnicka et al., Protein Engineering 7(6):805-814 (1994); Roguska. et al., PNAS 91:969-973 (1994)), and chain shuffling (U.S. Pat. No. 5,565,332).

[0328] Completely human antibodies are particularly desirable for therapeutic treatment of human patients. Human antibodies can be made by a variety of methods known in the art including phage display methods described above using antibody libraries derived from human immunoglobulin sequences. See also, U.S. Pat. Nos. 4,444,887 and 4,716,111; and PCT publications WO 98/46645, WO 98/50433, WO 98/24893, WO 98/16654, WO 96/34096, WO 96/33735, and WO 91/10741; each of which is incorporated herein by reference in its entirety.

[0329] Human antibodies can also be produced using transgenic mice which are incapable of expressing functional endogenous immunoglobulins, but which can express human immunoglobulin genes. For example, the human heavy and light chain immunoglobulin gene complexes may be introduced randomly or by homologous recombination into mouse embryonic stem cells. Alternatively, the human variable region, constant region, and diversity region may be introduced into mouse embryonic stem cells in addition to the human heavy and light chain genes. The mouse heavy and light chain immunoglobulin genes may be rendered non-functional separately or simultaneously with the introduction of human immunoglobulin loci by homologous recombination. In particular, homozygous deletion of the JH region prevents endogenous antibody production. The modified embryonic stem cells are expanded and microinjected into blastocysts to produce chimeric mice. The chimeric mice are then bred to produce homozygous offspring which express human antibodies. The transgenic mice are immunized in the normal fashion with a selected antigen, e.g., all or a portion of a polypeptide of the invention. Monoclonal antibodies directed against the antigen can be obtained from the immunized, transgenic mice using conventional hybridoma technology. The human immunoglobulin transgenes harbored by the transgenic mice rearrange during B cell differentiation, and subsequently undergo class switching and somatic mutation. Thus, using such a technique, it is possible to produce therapeutically useful IgG, IgA, IgM and IgE antibodies. For an overview of this technology for producing human antibodies, see Lonberg and Huszar, Int. Rev. Immunol. 13:65-93 (1995). For a detailed discussion of this technology for producing human antibodies and human monoclonal antibodies and protocols for producing such antibodies, see, e.g., PCT publications WO 98/24893; WO 92/01047; WO 96/34096; WO 96/33735; European Patent No. 0 598 877; U.S. Pat. Nos. 5,413,923; 5,625,126; 5,633,425; 5,569,825; 5,661,016; 5,545,806; 5,814,318; 5,885,793; 5,916,771; 5,939,598; 6,075,181; and 6,114,598, which are incorporated by reference herein in their entirety. In addition, companies such as Abgenix, Inc. (Freemont, Calif.) and Genpharm (San Jose, Calif.) can be engaged to provide human antibodies directed against a selected antigen using technology similar to that described above.

[0330] Completely human antibodies which recognize a selected epitope can be generated using a technique referred to as “guided selection.” In this approach a selected non-human monoclonal antibody, e.g., a mouse antibody, is used to guide the selection of a completely human antibody recognizing the same epitope. (Jespers et al., Bio/technology 12:899-903 (1988)).

[0331] Further, antibodies to the polypeptides of the invention can, in turn, be utilized to generate anti-idiotype antibodies that “mimic” polypeptides of the invention using techniques well known to those skilled in the art. (See, e.g., Greenspan & Bona, FASEB J. 7(5):437-444; (1989) and Nissinoff, J. Immunol. 147(8):2429-2438 (1991)). For example, antibodies which bind to and competitively inhibit polypeptide multimerization and/or binding of a polypeptide of the invention to a ligand can be used to generate anti-idiotypes that “mimic” the polypeptide multimerization and/or binding domain and, as a consequence, bind to and neutralize polypeptide and/or its ligand. Such neutralizing anti-idiotypes or Fab fragments of such anti-idiotypes can be used in therapeutic regimens to neutralize polypeptide ligand(s)/receptor(s). For example, such anti-idiotypic antibodies can be used to bind a polypeptide of the invention and/or to bind its ligand(s)/receptor(s), and thereby block its biological activity. Alternatively, antibodies which bind to and enhance polypeptide multimerization and/or binding, and/or receptor/ligand multimerization, binding and/or signaling can be used to generate anti-idiotypes that function as agonists of a polypeptide of the invention and/or its ligand/receptor. Such agonistic anti-idiotypes or Fab fragments of such anti-idiotypes can be used in therapeutic regimens as agonists of the polypeptides of the invention or its ligand(s)/receptor(s). For example, such anti-idiotypic antibodies can be used to bind a polypeptide of the invention and/or to bind its ligand(s)/receptor(s), and thereby promote or enhance its biological activity.

[0332] Intrabodies of the invention can be produced using methods known in the art, such as those disclosed and reviewed in Chen et al., Hum. Gene Ther. 5:595-601 (1994); Marasco, W. A., Gene Ther. 4:11-15 (1997); Rondon and Marasco, Annu. Rev. Microbiol. 51:257-283 (1997); Proba et al., J. Mol. Biol. 275:245-253 (1998); Cohen et al., Oncogene 17:2445-2456 (1998); Ohage and Steipe, J. Mol. Biol. 291:1119-1128 (1999); Ohage et al., J. Mol. Biol. 291:1129-1134 (1999); Wirtz and Steipe, Protein Sci. 8:2245-2250 (1999); Zhu et al., J. Immunol. Methods 231:207-222 (1999); and references cited therein.

[0333] Polynucleotides Encoding Antibodies

[0334] The invention further provides polynucleotides comprising a nucleotide sequence encoding an antibody of the invention and fragments thereof. The invention also encompasses polynucleotides that hybridize under stringent or alternatively, under lower stringency hybridization conditions, e.g., as defined supra, to polynucleotides that encode an antibody, preferably, that specifically binds to a polypeptide of the invention, preferably, an antibody that binds to a polypeptide having the amino acid sequence of SEQ ID NO:Y, to a polypeptide encoded by a portion of SEQ ID NO:X as defined in columns 8 and 9 of Table 2, and/or to a polypeptide encoded by the cDNA contained in ATCC Deposit No:Z.

[0335] The polynucleotides may be obtained, and the nucleotide sequence of the polynucleotides determined, by any method known in the art. For example, if the nucleotide sequence of the antibody is known, a polynucleotide encoding the antibody may be assembled from chemically synthesized oligonucleotides (e.g., as described in Kutmeier et al., BioTechniques 17:242 (1994)), which, briefly, involves the synthesis of overlapping oligonucleotides containing portions of the sequence encoding the antibody, annealing and ligating of those oligonucleotides, and then amplification of the ligated oligonucleotides by PCR.

[0336] Alternatively, a polynucleotide encoding an antibody may be generated from nucleic acid from a suitable source. If a clone containing a nucleic acid encoding a particular antibody is not available, but the sequence of the antibody molecule is known, a nucleic acid encoding the immunoglobulin may be chemically synthesized or obtained from a suitable source (e.g., an antibody cDNA library, or a cDNA library generated from, or nucleic acid, preferably poly A+ RNA, isolated from, any tissue or cells expressing the antibody, such as hybridoma cells selected to express an antibody of the invention) by PCR amplification using synthetic primers hybridizable to the 3′ and 5′ ends of the sequence or by cloning using an oligonucleotide probe specific for the particular gene sequence to identify, e.g., a cDNA clone from a cDNA library that encodes the antibody. Amplified nucleic acids generated by PCR may then be cloned into replicable cloning vectors using any method well known in the art.

[0337] Once the nucleotide sequence and corresponding amino acid sequence of the antibody is determined, the nucleotide sequence of the antibody may be manipulated using methods well known in the art for the manipulation of nucleotide sequences, e.g., recombinant DNA techniques, site directed mutagenesis, PCR, etc. (see, for example, the techniques described in Sambrook et al., 1990, Molecular Cloning, A Laboratory Manual, 2d Ed., Cold Spring Harbor Laboratory, Cold Spring Harbor, N.Y. and Ausubel et al., eds., 1998, Current Protocols in Molecular Biology, John Wiley & Sons, NY, which are both incorporated by reference herein in their entireties), to generate antibodies having a different amino acid sequence, for example to create amino acid substitutions, deletions, and/or insertions.

[0338] In a specific embodiment, the amino acid sequence of the heavy and/or light chain variable domains may be inspected to identify the sequences of the complementarity determining regions (CDRs) by methods that are well know in the art, e.g., by comparison to known amino acid sequences of other heavy and light chain variable regions to determine the regions of sequence hypervariability. Using routine recombinant DNA techniques, one or more of the CDRs may be inserted within framework regions, e.g., into human framework regions to humanize a non-human antibody, as described supra. The framework regions may be naturally occurring or consensus framework regions, and preferably human framework regions (see, e.g., Chothia et al., J. Mol. Biol. 278: 457-479 (1998) for a listing of human framework regions). Preferably, the polynucleotide generated by the combination of the framework regions and CDRs encodes an antibody that specifically binds a polypeptide of the invention. Preferably, as discussed supra, one or more amino acid substitutions may be made within the framework regions, and, preferably, the amino acid substitutions improve binding of the antibody to its antigen. Additionally, such methods may be used to make amino acid substitutions or deletions of one or more variable region cysteine residues participating in an intrachain disulfide bond to generate antibody molecules lacking one or more intrachain disulfide bonds. Other alterations to the polynucleotide are encompassed by the present invention and within the skill of the art.

[0339] In addition, techniques developed for the production of “chimeric antibodies” (Morrison et al., Proc. Natl. Acad. Sci. 81:851-855 (1984); Neuberger et al., Nature 312:604-608 (1984); Takeda et al., Nature 314:452-454 (1985)) by splicing genes from a mouse antibody molecule of appropriate antigen specificity together with genes from a human antibody molecule of appropriate biological activity can be used. As described supra, a chimeric antibody is a molecule in which different portions are derived from different animal species, such as those having a variable region derived from a murine mAb and a human immunoglobulin constant region, e.g., humanized antibodies.

[0340] Alternatively, techniques described for the production of single chain antibodies (U.S. Pat. No. 4,946,778; Bird, Science 242:423-42 (1988); Huston et al., Proc. Natl. Acad. Sci. USA 85:5879-5883 (1988); and Ward et al., Nature 334:544-54 (1989)) can be adapted to produce single chain antibodies. Single chain antibodies are formed by linking the heavy and light chain fragments of the Fv region via an amino acid bridge, resulting in a single chain polypeptide. Techniques for the assembly of functional Fv fragments in E. coli may also be used (Skerra et al., Science 242:1038-1041 (1988)).

[0341] Methods of Producing Antibodies

[0342] The antibodies of the invention can be produced by any method known in the art for the synthesis of antibodies, in particular, by chemical synthesis or preferably, by recombinant expression techniques. Methods of producing antibodies include, but are not limited to, hybridoma technology, EBV transformation, and other methods discussed herein as well as through the use recombinant DNA technology, as discussed below.

[0343] Recombinant expression of an antibody of the invention, or fragment, derivative or analog thereof, (e.g., a heavy or light chain of an antibody of the invention or a single chain antibody of the invention), requires construction of an expression vector containing a polynucleotide that encodes the antibody. Once a polynucleotide encoding an antibody molecule or a heavy or light chain of an antibody, or portion thereof (preferably containing the heavy or light chain variable domain), of the invention has been obtained, the vector for the production of the antibody molecule may be produced by recombinant DNA technology using techniques well known in the art. Thus, methods for preparing a protein by expressing a polynucleotide containing an antibody encoding nucleotide sequence are described herein. Methods which are well known to those skilled in the art can be used to construct expression vectors containing antibody coding sequences and appropriate transcriptional and translational control signals. These methods include, for example, in vitro recombinant DNA techniques, synthetic techniques, and in vivo genetic recombination. The invention, thus, provides replicable vectors comprising a nucleotide sequence encoding an antibody molecule of the invention, or a heavy or light chain thereof, or a heavy or light chain variable domain, operably linked to a promoter. Such vectors may include the nucleotide sequence encoding the constant region of the antibody molecule (see, e.g., PCT Publication WO 86/05807; PCT Publication WO 89/01036; and U.S. Pat. No. 5,122,464) and the variable domain of the antibody may be cloned into such a vector for expression of the entire heavy or light chain.

[0344] The expression vector is transferred to a host cell by conventional techniques and the transfected cells are then cultured by conventional techniques to produce an antibody of the invention. Thus, the invention includes host cells containing a polynucleotide encoding an antibody of the invention, or a heavy or light chain thereof, or a single chain antibody of the invention, operably linked to a heterologous promoter. In preferred embodiments for the expression of double-chained antibodies, vectors encoding both the heavy and light chains may be co-expressed in the host cell for expression of the entire immunoglobulin molecule, as detailed below.

[0345] A variety of host-expression vector systems may be utilized to express the antibody molecules of the invention. Such host-expression systems represent vehicles by which the coding sequences of interest may be produced and subsequently purified, but also represent cells which may, when transformed or transfected with the appropriate nucleotide coding sequences, express an antibody molecule of the invention in situ. These include but are not limited to microorganisms such as bacteria (e.g., E. coli, B. subtilis) transformed with recombinant bacteriophage DNA, plasmid DNA or cosmid DNA expression vectors containing antibody coding sequences; yeast (e.g., Saccharomyces, Pichia) transformed with recombinant yeast expression vectors containing antibody coding sequences; insect cell systems infected with recombinant virus expression vectors (e.g., baculovirus) containing antibody coding sequences; plant cell systems infected with recombinant virus expression vectors (e.g., cauliflower mosaic virus, CaMV; tobacco mosaic virus, TMV) or transformed with recombinant plasmid expression vectors (e.g., Ti plasmid) containing antibody coding sequences; or mammalian cell systems (e.g., COS, CHO, BHK, 293, 3T3 cells) harboring recombinant expression constructs containing promoters derived from the genome of mammalian cells (e.g., metallothionein promoter) or from mammalian viruses (e.g., the adenovirus late promoter; the vaccinia virus 7.5K promoter). Preferably, bacterial cells such as Escherichia coli, and more preferably, eukaryotic cells, especially for the expression of whole recombinant antibody molecule, are used for the expression of a recombinant antibody molecule. For example, mammalian cells such as Chinese hamster ovary cells (CHO), in conjunction with a vector such as the major intermediate early gene promoter element from human cytomegalovirus is an effective expression system for antibodies (Foecking et al., Gene 45:101 (1986); Cockett et al., Bio/Technology 8:2 (1990)).

[0346] In bacterial systems, a number of expression vectors may be advantageously selected depending upon the use intended for the antibody molecule being expressed. For example, when a large quantity of such a protein is to be produced, for the generation of pharmaceutical compositions of an antibody molecule, vectors which direct the expression of high levels of fusion protein products that are readily purified may be desirable. Such vectors include, but are not limited, to the E. coli expression vector pUR278 (Ruther et al., EMBO J. 2:1791 (1983)), in which the antibody coding sequence may be ligated individually into the vector in frame with the lac Z coding region so that a fusion protein is produced; pIN vectors (Inouye & Inouye, Nucleic Acids Res. 13:3101-3109 (1985); Van Heeke & Schuster, J. Biol. Chem. 24:5503-5509 (1989)); and the like. pGEX vectors may also be used to express foreign polypeptides as fusion proteins with glutathione S-transferase (GST). In general, such fusion proteins are soluble and can easily be purified from lysed cells by adsorption and binding to matrix glutathione-agarose beads followed by elution in the presence of free glutathione. The pGEX vectors are designed to include thrombin or factor Xa protease cleavage sites so that the cloned target gene product can be released from the GST moiety.

[0347] In an insect system, Autographa californica nuclear polyhedrosis virus (AcNPV) is used as a vector to express foreign genes. The virus grows in Spodoptera frugiperda cells. The antibody coding sequence may be cloned individually into non-essential regions (for example the polyhedrin gene) of the virus and placed under control of an AcNPV promoter (for example the polyhedrin promoter).

[0348] In mammalian host cells, a number of viral-based expression systems may be utilized. In cases where an adenovirus is used as an expression vector, the antibody coding sequence of interest may be ligated to an adenovirus transcription/translation control complex, e.g., the late promoter and tripartite leader sequence. This chimeric gene may then be inserted in the adenovirus genome by in vitro or in vivo recombination. Insertion in a non-essential region of the viral genome (e.g., region E1 or E3) will result in a recombinant virus that is viable and capable of expressing the antibody molecule in infected hosts. (e.g., see Logan & Shenk, Proc. Natl. Acad. Sci. USA 81:355-359 (1984)). Specific initiation signals may also be required for efficient translation of inserted antibody coding sequences. These signals include the ATG initiation codon and adjacent sequences. Furthermore, the initiation codon must be in phase with the reading frame of the desired coding sequence to ensure translation of the entire insert. These exogenous translational control signals and initiation codons can be of a variety of origins, both natural and synthetic. The efficiency of expression may be enhanced by the inclusion of appropriate transcription enhancer elements, transcription terminators, etc. (see Bittner et al., Methods in Enzymol. 153:51-544 (1987)).

[0349] In addition, a host cell strain may be chosen which modulates the expression of the inserted sequences, or modifies and processes the gene product in the specific fashion desired. Such modifications (e.g., glycosylation) and processing (e.g., cleavage) of protein products may be important for the function of the protein. Different host cells have characteristic and specific mechanisms for the post-translational processing and modification of proteins and gene products. Appropriate cell lines or host systems can be chosen to ensure the correct modification and processing of the foreign protein expressed. To this end, eukaryotic host cells which possess the cellular machinery for proper processing of the primary transcript, glycosylation, and phosphorylation of the gene product may be used. Such mammalian host cells include but are not limited to CHO, VERY, BHK, Hela, COS, MDCK, 293, 3T3, WI38, and in particular, breast cancer cell lines such as, for example, BT483, Hs578T, HTB2, BT20 and T47D, and normal mammary gland cell line such as, for example, CRL7030 and Hs578Bst.

[0350] For long-term, high-yield production of recombinant proteins, stable expression is preferred. For example, cell lines which stably express the antibody molecule may be engineered. Rather than using expression vectors which contain viral origins of replication, host cells can be transformed with DNA controlled by appropriate expression control elements (e.g., promoter, enhancer, sequences, transcription terminators, polyadenylation sites, etc.), and a selectable marker. Following the introduction of the foreign DNA, engineered cells may be allowed to grow for 1-2 days in an enriched media, and then are switched to a selective media. The selectable marker in the recombinant plasmid confers resistance to the selection and allows cells to stably integrate the plasmid into their chromosomes and grow to form foci which in turn can be cloned and expanded into cell lines. This method may advantageously be used to engineer cell lines which express the antibody molecule. Such engineered cell lines may be particularly useful in screening and evaluation of compounds that interact directly or indirectly with the antibody molecule.

[0351] A number of selection systems may be used, including but not limited to the herpes simplex virus thymidine kinase (Wigler et al., Cell 11:223 (1977)), hypoxanthine-guanine phosphoribosyltransferase (Szybalska & Szybalski, Proc. Natl. Acad. Sci. USA 48:202 (1992)), and adenine phosphoribosyltransferase (Lowy et al., Cell 22:817 (1980)) genes can be employed in tk−, hgprt− or aprt− cells, respectively. Also, antimetabolite resistance can be used as the basis of selection for the following genes: dhfr, which confers resistance to methotrexate (Wigler et al., Natl. Acad. Sci. USA 77:357 (1980); O'Hare et al., Proc. Natl. Acad. Sci. USA 78:1527 (1981)); gpt, which confers resistance to mycophenolic acid (Mulligan & Berg, Proc. Natl. Acad. Sci. USA 78:2072 (1981)); neo, which confers resistance to the aminoglycoside G-418 Clinical Pharmacy 12:488-505; Wu and Wu, Biotherapy 3:87-95 (1991); Tolstoshev, Ann. Rev. Pharmacol. Toxicol. 32:573-596 (1993); Mulligan, Science 260:926-932 (1993); and Morgan and Anderson, Ann. Rev. Biochem. 62:191-217 (1993); May, 1993, TIB TECH 11(5):155-215 (1993)); and hygro, which confers resistance to hygromycin (Santerre et al., Gene 30:147 (1984)). Methods commonly known in the art of recombinant DNA technology may be routinely applied to select the desired recombinant clone, and such methods are described, for example, in Ausubel et al. (eds.), Current Protocols in Molecular Biology, John Wiley & Sons, NY (1993); Kriegler, Gene Transfer and Expression, A Laboratory Manual, Stockton Press, NY (1990); and in Chapters 12 and 13, Dracopoli et al. (eds), Current Protocols in Human Genetics, John Wiley & Sons, NY (1994); Colberre-Garapin et al., J. Mol. Biol. 150:1 (1981), which are incorporated by reference herein in their entireties.

[0352] The expression levels of an antibody molecule can be increased by vector amplification (for a review, see Bebbington and Hentschel, The use of vectors based on gene amplification for the expression of cloned genes in mammalian cells in DNA cloning, Vol. 3. (Academic Press, New York, 1987)). When a marker in the vector system expressing antibody is amplifiable, increase in the level of inhibitor present in culture of host cell will increase the number of copies of the marker gene. Since the amplified region is associated with the antibody gene, production of the antibody will also increase (Crouse et al., Mol. Cell. Biol. 3:257 (1983)).

[0353] Vectors which use glutamine synthase (GS) or DHFR as the selectable markers can be amplified in the presence of the drugs methionine sulphoximine or methotrexate, respectively. An advantage of glutamine synthase based vectors are the availabilty of cell lines (e.g., the murine myeloma cell line, NS0) which are glutamine synthase negative. Glutamine synthase expression systems can also function in glutamine synthase expressing cells (e.g. Chinese Hamster Ovary (CHO) cells) by providing additional inhibitor to prevent the functioning of the endogenous gene. A glutamine synthase expression system and components thereof are detailed in PCT publications: WO87/04462; WO86/05807; WO89/01036; WO89/10404; and WO91/06657 which are incorporated in their entireties by reference herein. Additionally, glutamine synthase expression vectors that may be used according to the present invention are commercially available from suplliers, including, for example Lonza Biologics, Inc. (Portsmouth, N.H.). Expression and production of monoclonal antibodies using a GS expression system in murine myeloma cells is described in Bebbington et al., Bio/technology 10:169(1992) and in Biblia and Robinson Biotechnol. Prog. 11:1 (1995) which are incorporated in their entirities by reference herein.

[0354] The host cell may be co-transfected with two expression vectors of the invention, the first vector encoding a heavy chain derived polypeptide and the second vector encoding a light chain derived polypeptide. The two vectors may contain identical selectable markers which enable equal expression of heavy and light chain polypeptides. Alternatively, a single vector may be used which encodes, and is capable of expressing, both heavy and light chain polypeptides. In such situations, the light chain should be placed before the heavy chain to avoid an excess of toxic free heavy chain (Proudfoot, Nature 322:52 (1986); Kohler, Proc. Natl. Acad. Sci. USA 77:2197 (1980)). The coding sequences for the heavy and light chains may comprise cDNA or genomic DNA.

[0355] Once an antibody molecule of the invention has been produced by an animal, chemically synthesized, or recombinantly expressed, it may be purified by any method known in the art for purification of an immunoglobulin molecule, for example, by chromatography (e.g., ion exchange, affinity, particularly by affinity for the specific antigen after Protein A, and sizing column chromatography), centrifugation, differential solubility, or by any other standard technique for the purification of proteins. In addition, the antibodies of the present invention or fragments thereof can be fused to heterologous polypeptide sequences described herein or otherwise known in the art, to facilitate purification.

[0356] The present invention encompasses antibodies recombinantly fused or chemically conjugated (including both covalently and non-covalently conjugations) to a polypeptide (or portion thereof, preferably at least 10, 20, 30, 40, 50, 60, 70, 80, 90 or 100 amino acids of the polypeptide) of the present invention to generate fusion proteins. The fusion does not necessarily need to be direct, but may occur through linker sequences. The antibodies may be specific for antigens other than polypeptides (or portion thereof, preferably at least 10, 20, 30, 40, 50, 60, 70, 80, 90 or 100 amino acids of the polypeptide) of the present invention. For example, antibodies may be used to target the polypeptides of the present invention to particular cell types, either in vitro or in vivo, by fusing or conjugating the polypeptides of the present invention to antibodies specific for particular cell surface receptors. Antibodies fused or conjugated to the polypeptides of the present invention may also be used in in vitro immunoassays and purification methods using methods known in the art. See e.g., Harbor et al., supra, and PCT publication WO 93/21232; EP 439,095; Naramura et al., Immunol. Lett. 39:91-99 (1994); U.S. Pat. No. 5,474,981; Gillies et al., PNAS 89:1428-1432 (1992); Fell et al., J. Immunol. 146:2446-2452 (1991), which are incorporated by reference in their entireties.

[0357] The present invention further includes compositions comprising the polypeptides of the present invention fused or conjugated to antibody domains other than the variable regions. For example, the polypeptides of the present invention may be fused or conjugated to an antibody Fc region, or portion thereof. The antibody portion fused to a polypeptide of the present invention may comprise the constant region, hinge region, CH1 domain, CH2 domain, and CH3 domain or any combination of whole domains or portions thereof. The polypeptides may also be fused or conjugated to the above antibody portions to form multimers. For example, Fc portions fused to the polypeptides of the present invention can form dimers through disulfide bonding between the Fc portions. Higher multimeric forms can be made by fusing the polypeptides to portions of IgA and IgM. Methods for fusing or conjugating the polypeptides of the present invention to antibody portions are known in the art. See, e.g., U.S. Pat. Nos. 5,336,603; 5,622,929; 5,359,046; 5,349,053; 5,447,851; 5,112,946; EP 307,434; EP 367,166; PCT publications WO 96/04388; WO 91/06570; Ashkenazi et al., Proc. Natl. Acad. Sci. USA 88:10535-10539 (1991); Zheng et al., J. Immunol. 154:5590-5600 (1995); and Vil et al., Proc. Natl. Acad. Sci. USA 89:11337-11341 (1992) (said references incorporated by reference in their entireties).

[0358] As discussed, supra, the polypeptides corresponding to a polypeptide, polypeptide fragment, or a variant of SEQ ID NO:Y may be fused or conjugated to the above antibody portions to increase the in vivo half life of the polypeptides or for use in immunoassays using methods known in the art. Further, the polypeptides corresponding to SEQ ID NO:Y may be fused or conjugated to the above antibody portions to facilitate purification. One reported example describes chimeric proteins consisting of the first two domains of the human CD4-polypeptide and various domains of the constant regions of the heavy or light chains of mammalian immunoglobulins. See EP 394,827; and Traunecker et al., Nature 331:84-86 (1988). The polypeptides of the present invention fused or conjugated to an antibody having disulfide-linked dimeric structures (due to the IgG) may also be more efficient in binding and neutralizing other molecules, than the monomeric secreted protein or protein fragment alone. See, for example, Fountoulakis et al., J. Biochem. 270:3958-3964 (1995). In many cases, the Fc part in a fusion protein is beneficial in therapy and diagnosis, and thus can result in, for example, improved pharmacokinetic properties. See, for example, EP A 232,262. Alternatively, deleting the Fc part after the fusion protein has been expressed, detected, and purified, would be desired. For example, the Fc portion may hinder therapy and diagnosis if the fusion protein is used as an antigen for immunizations. In drug discovery, for example, human proteins, such as hIL-5, have been fused with Fc portions for the purpose of high-throughput screening assays to identify antagonists of hIL-5. (See, Bennett et al., J. Molecular Recognition 8:52-58 (1995); Johanson et al., J. Biol. Chem. 270:9459-9471 (1995)).

[0359] Moreover, the antibodies or fragments thereof of the present invention can be fused to marker sequences, such as a peptide to facilitate purification. In preferred embodiments, the marker amino acid sequence is a hexa-histidine peptide, such as the tag provided in a pQE vector (QIAGEN, Inc., 9259 Eton Avenue, Chatsworth, Calif., 91311), among others, many of which are commercially available. As described in Gentz et al., Proc. Natl. Acad. Sci. USA 86:821-824 (1989), for instance, hexa-histidine provides for convenient purification of the fusion protein. Other peptide tags useful for purification include, but are not limited to, the “HA” tag, which corresponds to an epitope derived from the influenza hemagglutinin protein (Wilson et al., Cell 37:767 (1984)) and the “flag” tag.

[0360] The present invention further encompasses antibodies or fragments thereof conjugated to a diagnostic or therapeutic agent. The antibodies can be used diagnostically to, for example, monitor the development or progression of a tumor as part of a clinical testing procedure to, e.g., determine the efficacy of a given treatment regimen. Detection can be facilitated by coupling the antibody to a detectable substance. Examples of detectable substances include various enzymes, prosthetic groups, fluorescent materials, luminescent materials, bioluminescent materials, radioactive materials, positron emitting metals using various positron emission tomographies, and nonradioactive paramagnetic metal ions. The detectable substance may be coupled or conjugated either directly to the antibody (or fragment thereof) or indirectly, through an intermediate (such as, for example, a linker known in the art) using techniques known in the art. See, for example, U.S. Pat. No. 4,741,900 for metal ions which can be conjugated to antibodies for use as diagnostics according to the present invention. Examples of suitable enzymes include horseradish peroxidase, alkaline phosphatase, beta-galactosidase, or acetylcholinesterase; examples of suitable prosthetic group complexes include streptavidin/biotin and avidin/biotin; examples of suitable fluorescent materials include umbelliferone, fluorescein, fluorescein isothiocyanate, rhodamine, dichlorotriazinylamine fluorescein, dansyl chloride or phycoerythrin; an example of a luminescent material includes luminol; examples of bioluminescent materials include luciferase, luciferin, and aequorin; and examples of suitable radioactive material include 125I, 131I, 111In or 99Tc.

[0361] Further, an antibody or fragment thereof may be conjugated to a therapeutic moiety such as a cytotoxin, e.g., a cytostatic or cytocidal agent, a therapeutic agent or a radioactive metal ion, e.g., alpha-emitters such as, for example, 213Bi. A cytotoxin or cytotoxic agent includes any agent that is detrimental to cells. Examples include paclitaxol, cytochalasin B, gramicidin D, ethidium bromide, emetine, mitomycin, etoposide, tenoposide, vincristine, vinblastine, colchicin, doxorubicin, daunorubicin, dihydroxy anthracin dione, mitoxantrone, mithramycin, actinomycin D, 1-dehydrotestosterone, glucocorticoids, procaine, tetracaine, lidocaine, propranolol, and puromycin and analogs or homologs thereof. Therapeutic agents include, but are not limited to, antimetabolites (e.g., methotrexate, 6-mercaptopurine, 6-thioguanine, cytarabine, 5-fluorouracil decarbazine), alkylating agents (e.g., mechlorethamine, thioepa chlorambucil, melphalan, carmustine (BSNU) and lomustine (CCNU), cyclothosphamide, busulfan, dibromomannitol, streptozotocin, mitomycin C, and cis-dichlorodiamine platinum (II) (DDP) cisplatin), anthracyclines (e.g., daunorubicin (formerly daunomycin) and doxorubicin), antibiotics (e.g., dactinomycin (formerly actinomycin), bleomycin, mithramycin, and anthramycin (AMC)), and anti-mitotic agents (e.g., vincristine and vinblastine).

[0362] The conjugates of the invention can be used for modifying a given biological response, the therapeutic agent or drug moiety is not to be construed as limited to classical chemical therapeutic agents. For example, the drug moiety may be a protein or polypeptide possessing a desired biological activity. Such proteins may include, for example, a toxin such as abrin, ricin A, pseudomonas exotoxin, or diphtheria toxin; a protein such as tumor necrosis factor, a-interferon, β-interferon, nerve growth factor, platelet derived growth factor, tissue plasminogen activator, an apoptotic agent, e.g., TNF-alpha, TNF-beta, AIM I (See, International Publication No. WO 97/33899), AIM II (See, International Publication No. WO 97/34911), Fas Ligand (Takahashi et al., Int. Immunol., 6:1567-1574 (1994)), VEGI (See, International Publication No. WO 99/23105), a thrombotic agent or an anti-angiogenic agent, e.g., angiostatin or endostatin; or, biological response modifiers such as, for example, lymphokines, interleukin-1 (“IL-1”), interleukin-2 (“IL-2”), interleukin-6 (“IL-6”), granulocyte macrophage colony stimulating factor (“GM-CSF”), granulocyte colony stimulating factor (“G-CSF”), or other growth factors.

[0363] Antibodies may also be attached to solid supports, which are particularly useful for immunoassays or purification of the target antigen. Such solid supports include, but are not limited to, glass, cellulose, polyacrylamide, nylon, polystyrene, polyvinyl chloride or polypropylene.

[0364] Techniques for conjugating such therapeutic moiety to antibodies are well known. See, for example, Arnon et al., “Monoclonal Antibodies For Immunotargeting Of Drugs In Cancer Therapy”, in Monoclonal Antibodies And Cancer Therapy, Reisfeld et al. (eds.), pp. 243-56 (Alan R. Liss, Inc. 1985); Hellstrom et al., “Antibodies For Drug Delivery”, in Controlled Drug Delivery (2nd Ed.), Robinson et al. (eds.), pp. 623-53 (Marcel Dekker, Inc. 1987); Thorpe, “Antibody Carriers Of Cytotoxic Agents In Cancer Therapy: A Review”, in Monoclonal Antibodies '84: Biological And Clinical Applications, Pinchera et al. (eds.), pp. 475-506 (1985); “Analysis, Results, And Future Prospective Of The Therapeutic Use Of Radiolabeled Antibody In Cancer Therapy”, in Monoclonal Antibodies For Cancer Detection And Therapy, Baldwin et al. (eds.), pp. 303-16 (Academic Press 1985), and Thorpe et al., “The Preparation And Cytotoxic Properties Of Antibody-Toxin Conjugates”, Immunol. Rev. 62:119-58 (1982).

[0365] Alternatively, an antibody can be conjugated to a second antibody to form an antibody heteroconjugate as described by Segal in U.S. Pat. No. 4,676,980, which is incorporated herein by reference in its entirety.

[0366] An antibody, with or without a therapeutic moiety conjugated to it, administered alone or in combination with cytotoxic factor(s) and/or cytokine(s) can be used as a therapeutic.

[0367] Immunophenotyping

[0368] The antibodies of the invention may be utilized for immunophenotyping of cell lines and biological samples. Translation products of the gene of the present invention may be useful as cell-specific markers, or more specifically as cellular markers that are differentially expressed at various stages of differentiation and/or maturation of particular cell types. Monoclonal antibodies directed against a specific epitope, or combination of epitopes, will allow for the screening of cellular populations expressing the marker. Various techniques can be utilized using monoclonal antibodies to screen for cellular populations expressing the marker(s), and include magnetic separation using antibody-coated magnetic beads, “panning” with antibody attached to a solid matrix (i.e., plate), and flow cytometry (See, e.g., U.S. Pat. No. 5,985,660; and Morrison et al., Cell, 96:737-49 (1999)).

[0369] These techniques allow for the screening of particular populations of cells, such as might be found with hematological malignancies (i.e. minimal residual disease (MRD) in acute leukemic patients) and “non-self” cells in transplantations to prevent Graft-versus-Host Disease (GVHD). Alternatively, these techniques allow for the screening of hematopoietic stem and progenitor cells capable of undergoing proliferation and/or differentiation, as might be found in human umbilical cord blood.

[0370] Assays for Antibody Binding

[0371] The antibodies of the invention may be assayed for immunospecific binding by any method known in the art. The immunoassays which can be used include but are not limited to competitive and non-competitive assay systems using techniques such as western blots, radioimmunoassays, ELISA (enzyme linked immunosorbent assay), “sandwich” immunoassays, immunoprecipitation assays, precipitin reactions, gel diffusion precipitin reactions, immunodiffusion assays, agglutination assays, complement-fixation assays, immunoradiometric assays, fluorescent immunoassays, and protein A immunoassays, to name but a few. Such assays are routine and well known in the art (see, e.g., Ausubel et al, eds, 1994, Current Protocols in Molecular Biology, Vol. 1, John Wiley & Sons, Inc., New York, which is incorporated by reference herein in its entirety). Exemplary immunoassays are described briefly below (but are not intended by way of limitation).

[0372] Immunoprecipitation protocols generally comprise lysing a population of cells in a lysis buffer such as RIPA buffer (1% NP-40 or Triton X-100, 1% sodium deoxycholate, 0.1% SDS, 0.15 M NaCl, 0.01 M sodium phosphate at pH 7.2, 1% Trasylol) supplemented with protein phosphatase and/or protease inhibitors (e.g., EDTA, PMSF, aprotinin, sodium vanadate), adding the antibody of interest to the cell lysate, incubating for a period of time (e.g., 1-4 hours) at 4° C., adding protein A and/or protein G sepharose beads to the cell lysate, incubating for about an hour or more at 4° C., washing the beads in lysis buffer and resuspending the beads in SDS/sample buffer. The ability of the antibody of interest to immunoprecipitate a particular antigen can be assessed by, e.g., western blot analysis. One of skill in the art would be knowledgeable as to the parameters that can be modified to increase the binding of the antibody to an antigen and decrease the background (e.g., pre-clearing the cell lysate with sepharose beads). For further discussion regarding immunoprecipitation protocols see, e.g., Ausubel et al., eds., (1994), Current Protocols in Molecular Biology, Vol. 1, John Wiley & Sons, Inc., New York, section 10.16.1.

[0373] Western blot analysis generally comprises preparing protein samples, electrophoresis of the protein samples in a polyacrylamide gel (e.g., 8%-20% SDS-PAGE depending on the molecular weight of the antigen), transferring the protein sample from the polyacrylamide gel to a membrane such as nitrocellulose, PVDF or nylon, blocking the membrane in blocking solution (e.g., PBS with 3% BSA or non-fat milk), washing the membrane in washing buffer (e.g., PBS-Tween 20), blocking the membrane with primary antibody (the antibody of interest) diluted in blocking buffer, washing the membrane in washing buffer, blocking the membrane with a secondary antibody (which recognizes the primary antibody, e.g., an anti-human antibody) conjugated to an enzymatic substrate (e.g., horseradish peroxidase or alkaline phosphatase) or radioactive molecule (e.g., 32P or 125I) diluted in blocking buffer, washing the membrane in wash buffer, and detecting the presence of the antigen. One of skill in the art would be knowledgeable as to the parameters that can be modified to increase the signal detected and to reduce the background noise. For further discussion regarding western blot protocols see, e.g., Ausubel et al, eds, (1994), Current Protocols in Molecular Biology, Vol. 1, John Wiley & Sons, Inc., New York, section 10.8.1.

[0374] ELISAs comprise preparing antigen, coating the well of a 96 well microtiter plate with the antigen, adding the antibody of interest conjugated to a detectable compound such as an enzymatic substrate (e.g., horseradish peroxidase or alkaline phosphatase) to the well and incubating for a period of time, and detecting the presence of the antigen. In ELISAs the antibody of interest does not have to be conjugated to a detectable compound; instead, a second antibody (which recognizes the antibody of interest) conjugated to a detectable compound may be added to the well. Further, instead of coating the well with the antigen, the antibody may be coated to the well. In this case, a second antibody conjugated to a detectable compound may be added following the addition of the antigen of interest to the coated well. One of skill in the art would be knowledgeable as to the parameters that can be modified to increase the signal detected as well as other variations of ELISAs known in the art. For further discussion regarding ELISAs see, e.g., Ausubel et al, eds, (1994), Current Protocols in Molecular Biology, Vol. 1, John Wiley & Sons, Inc., New York, section 11.2.1.

[0375] The binding affinity of an antibody to an antigen and the off-rate of an antibody-antigen interaction can be determined by competitive binding assays. One example of a competitive binding assay is a radioimmunoassay comprising the incubation of labeled antigen (e.g., 3H or 125I) with the antibody of interest in the presence of increasing amounts of unlabeled antigen, and the detection of the antibody bound to the labeled antigen. The affinity of the antibody of interest for a particular antigen and the binding off-rates can be determined from the data by scatchard plot analysis. Competition with a second antibody can also be determined using radioimmunoassays. In this case, the antigen is incubated with antibody of interest conjugated to a labeled compound (e.g., 3H or 125I) in the presence of increasing amounts of an unlabeled second antibody.

[0376] Antibodies of the invention may be characterized using immunocytochemisty methods on cells (e.g., mammalian cells, such as CHO cells) transfected with a vector enabling the expression of an antigen or with vector alone using techniques commonly known in the art. Antibodies that bind antigen transfected cells, but not vector-only transfected cells, are antigen specific.

[0377] Therapeutic Uses

[0378] Table 1D also provides information regarding biological activities and preferred therapeutic uses (i.e. see, “Preferred Indications” column) for polynucleotides and polypeptides of the invention (including antibodies, agonists, and/or antagonists thereof). Table 1D also provides information regarding assays which may be used to test polynucleotides and polypeptides of the invention (including antibodies, agonists, and/or antagonists thereof) for the corresponding biological activities. The first column (“Gene No.”) provides the gene number in the application for each clone identifier. The second column (“cDNA ATCC Deposit No:Z”) provides the unique clone identifier for each clone as previously described and indicated in Table 1A, Table 1B, and Table 1C. The third column (“AA SEQ ID NO:Y”) indicates the Sequence Listing SEQ ID Number for polypeptide sequences encoded by the corresponding cDNA clones (also as indicated in Table 1A, Table 1B, and Table 2). The fourth column (“Biological Activity”) indicates a biological activity corresponding to the indicated polypeptides (or polynucleotides encoding said polypeptides). The fifth column (“Exemplary Activity Assay”) further describes the corresponding biological activity and also provides information pertaining to the various types of assays which may be performed to test, demonstrate, or quantify the corresponding biological activity.

[0379] The present invention is further directed to antibody-based therapies which involve administering antibodies of the invention to an animal, preferably a mammal, and most preferably a human, patient for treating one or more of the disclosed diseases, disorders, or conditions. Therapeutic compounds of the invention include, but are not limited to, antibodies of the invention (including fragments, analogs and derivatives thereof as described herein) and nucleic acids encoding antibodies of the invention (including fragments, analogs and derivatives thereof and anti-idiotypic antibodies as described herein). The antibodies of the invention can be used to detect, prevent, diagnose, prognosticate, treat, and/or ameliorate diseases, disorders or conditions associated with aberrant expression and/or activity of a polypeptide of the invention, including, but not limited to, cancer and other hyperproliferative diseases and disorders. The treatment and/or prevention of cancer and other hyperproliferative diseases and disorders associated with aberrant expression and/or activity of a polypeptide of the invention includes, but is not limited to, alleviating symptoms associated with cancer and other hyperproliferative diseases and disorders. Antibodies of the invention may be provided in pharmaceutically acceptable compositions as known in the art or as described herein.

[0380] In a specific and preferred embodiment, the present invention is directed to antibody-based therapies which involve administering antibodies of the invention to an animal, preferably a mammal, and most preferably a human, patient for treating cancer and other hyperproliferative diseases and disorders. Therapeutic compounds of the invention include, but are not limited to, antibodies of the invention (e.g., antibodies directed to the full length protein expressed on the cell surface of a mammalian cell; antibodies directed to an epitope of a polypeptide of the invention (such as, for example, a predicted linear epitope shown in column 7 of Table 1B.1; or a conformational epitope, including fragments, analogs and derivatives thereof as described herein) and nucleic acids encoding antibodies of the invention (including fragments, analogs and derivatives thereof and anti-idiotypic antibodies as described herein). The antibodies of the invention can be used to detect, diagnose, prevent, treat, prognosticate, and/or ameliorate cancer and other hyperproliferative diseases, disorders or conditions associated with aberrant expression and/or activity of a polypeptide of the invention. The treatment and/or prevention of cancer and other hyperproliferative diseases, disorders, or conditions associated with aberrant expression and/or activity of a polypeptide of the invention includes, but is not limited to, alleviating symptoms associated with those diseases, disorders or conditions. Antibodies of the invention may be provided in pharmaceutically acceptable compositions as known in the art or as described herein.

[0381] A summary of the ways in which the antibodies of the present invention may be used therapeutically includes binding polynucleotides or polypeptides of the present invention locally or systemically in the body or by direct cytotoxicity of the antibody, e.g. as mediated by complement (CDC) or by effector cells (ADCC). Some of these approaches are described in more detail below. Armed with the teachings provided herein, one of ordinary skill in the art will know how to use the antibodies of the present invention for diagnostic, monitoring or therapeutic purposes without undue experimentation.

[0382] The antibodies of this invention may be advantageously utilized in combination with other monoclonal or chimeric antibodies, or with lymphokines or hematopoietic growth factors (such as, e.g., IL-2, IL-3 and IL-7), for example, which serve to increase the number or activity of effector cells which interact with the antibodies.

[0383] The antibodies of the invention may be administered alone or in combination with other types of treatments (e.g., radiation therapy, chemotherapy, hormonal therapy, immunotherapy and anti-tumor agents). Generally, administration of products of a species origin or species reactivity (in the case of antibodies) that is the same species as that of the patient is preferred. Thus, in a preferred embodiment, human antibodies, fragments derivatives, analogs, or nucleic acids, are administered to a human patient for therapy or prophylaxis.

[0384] It is preferred to use high affinity and/or potent in vivo inhibiting and/or neutralizing antibodies against polypeptides or polynucleotides of the present invention, fragments or regions thereof, for both immunoassays directed to and therapy of cancer and other hyperproliferative diseases and disorders related to polynucleotides or polypeptides, including fragments thereof, of the present invention. Such antibodies, fragments, or regions, will preferably have an affinity for polynucleotides or polypeptides of the invention, including fragments thereof. Preferred binding affinities include those with a dissociation constant or Kd less than 5×10⁻² M, 10⁻² M, 5×10⁻³ M, 10⁻³ M, 5×10⁻⁴ M, 10⁻⁴ M, 5×10⁻⁵ M, 10⁻⁵ M, 5×10⁻⁶ M, 10⁻⁶ M, 5×10⁻⁷ M, 10⁻⁷ M, 5×10⁻⁸ M, 10⁻⁸ M, 5×10⁻⁹ M, 10⁻⁹ M, 5×10⁻¹⁰ M, 10⁻¹⁰ M, 5×10⁻¹¹ M, 10⁻¹¹ M, 5×10⁻¹² M, 10⁻¹² M, 5×10⁻¹³ M, 10⁻¹³ M, 5×10⁻¹⁴ M, 10⁻¹⁴ M, 5×10⁻¹⁵ M, and 10⁻¹⁵ M.

[0385] Gene Therapy

[0386] In a specific embodiment, nucleic acids comprising sequences encoding antibodies or functional derivatives thereof, are administered to treat, inhibit or prevent cancer and other hyperproliferative disease or disorder associated with aberrant expression and/or activity of a polypeptide of the invention, by way of gene therapy. Gene therapy refers to therapy performed by the administration to a subject of an expressed or expressible nucleic acid. In this embodiment of the invention, the nucleic acids produce their encoded protein that mediates a therapeutic effect.

[0387] Any of the methods for gene therapy available in the art can be used according to the present invention. Exemplary methods are described below.

[0388] For general reviews of the methods of gene therapy, see Goldspiel et al., Clinical Pharmacy 12:488-505 (1993); Wu and Wu, Biotherapy 3:87-95 (1991); Tolstoshev, Ann. Rev. Pharmacol. Toxicol. 32:573-596 (1993); Mulligan, Science 260:926-932 (1993); and Morgan and Anderson, Ann. Rev. Biochem. 62:191-217 (1993); May, TIBTECH 11(5):155-215 (1993). Methods commonly known in the art of recombinant DNA technology which can be used are described in Ausubel et al. (eds.), Current Protocols in Molecular Biology, John Wiley & Sons, NY (1993); and Kriegler, Gene Transfer and Expression, A Laboratory Manual, Stockton Press, NY (1990).

[0389] In a preferred embodiment, the compound comprises nucleic acid sequences encoding an antibody, said nucleic acid sequences being part of expression vectors that express the antibody or fragments or chimeric proteins or heavy or light chains thereof in a suitable host. In particular, such nucleic acid sequences have promoters operably linked to the antibody coding region, said promoter being inducible or constitutive, and, optionally, tissue-specific. In another particular embodiment, nucleic acid molecules are used in which the antibody coding sequences and any other desired sequences are flanked by regions that promote homologous recombination at a desired site in the genome, thus providing for intrachromosomal expression of the antibody encoding nucleic acids (Koller and Smithies, Proc. Natl. Acad. Sci. USA 86:8932-8935 (1989); Zijlstra et al., Nature 342:435-438 (1989). In specific embodiments, the expressed antibody molecule is a single chain antibody; alternatively, the nucleic acid sequences include sequences encoding both the heavy and light chains, or fragments thereof, of the antibody.

[0390] Delivery of the nucleic acids into a patient may be either direct, in which case the patient is directly exposed to the nucleic acid or nucleic acid-carrying vectors, or indirect, in which case, cells are first transformed with the nucleic acids in vitro, then transplanted into the patient. These two approaches are known, respectively, as in vivo or ex vivo gene therapy.

[0391] In a specific embodiment, the nucleic acid sequences are directly administered in vivo, where it is expressed to produce the encoded product. This can be accomplished by any of numerous methods known in the art, e.g., by constructing them as part of an appropriate nucleic acid expression vector and administering it so that they become intracellular, e.g., by infection using defective or attenuated retrovirals or other viral vectors (see U.S. Pat. No. 4,980,286), or by direct injection of naked DNA, or by use of microparticle bombardment (e.g., a gene gun; Biolistic, Dupont), or coating with lipids or cell-surface receptors or transfecting agents, encapsulation in liposomes, microparticies, or microcapsules, or by administering them in linkage to a peptide which is known to enter the nucleus, by administering it in linkage to a ligand subject to receptor-mediated endocytosis (see, e.g., Wu and Wu, J. Biol. Chem. 262:4429-4432 (1987)) (which can be used to target cell types specifically expressing the receptors), etc. In another embodiment, nucleic acid-ligand complexes can be formed in which the ligand comprises a fusogenic viral peptide to disrupt endosomes, allowing the nucleic acid to avoid lysosomal degradation. In yet another embodiment, the nucleic acid can be targeted in vivo for cell specific uptake and expression, by targeting a specific receptor (see, e.g., PCT Publications WO 92/06180; WO 92/22635; WO92/20316; WO93/14188, WO 93/20221). Alternatively, the nucleic acid can be introduced intracellularly and incorporated within host cell DNA for expression, by homologous recombination (Koller and Smithies, Proc. Natl. Acad. Sci. USA 86:8932-8935 (1989); Zijlstra et al., Nature 342:435-438 (1989)).

[0392] In a specific embodiment, viral vectors that contains nucleic acid sequences encoding an antibody of the invention are used. For example, a retroviral vector can be used (see Miller et al., Meth. Enzymol. 217:581-599 (1993)). These retroviral vectors contain the components necessary for the correct packaging of the viral genome and integration into the host cell DNA. The nucleic acid sequences encoding the antibody to be used in gene therapy are cloned into one or more vectors, which facilitates delivery of the gene into a patient. More detail about retroviral vectors can be found in Boesen et al., Biotherapy 6:291-302 (1994), which describes the use of a retroviral vector to deliver the mdr1 gene to hematopoietic stem cells in order to make the stem cells more resistant to chemotherapy. Other references illustrating the use of retroviral vectors in gene therapy are: Clowes et al., J. Clin. Invest. 93:644-651 (1994); Kiem et al., Blood 83:1467-1473 (1994); Salmons and Gunzberg, Human Gene Therapy 4:129-141 (1993); and Grossman and Wilson, Curr. Opin. in Genetics and Devel. 3:110-114 (1993).

[0393] Adenoviruses are other viral vectors that can be used in gene therapy. Adenoviruses are especially attractive vehicles for delivering genes to respiratory epithelia. Adenoviruses naturally infect respiratory epithelia where they cause a mild disease. Other targets for adenovirus-based delivery systems are liver, the central nervous system, endothelial cells, and muscle. Adenoviruses have the advantage of being capable of infecting non-dividing cells. Kozarsky and Wilson, Current Opinion in Genetics and Development 3:499-503 (1993) present a review of adenovirus-based gene therapy. Bout et al., Human Gene Therapy 5:3-10 (1994) demonstrated the use of adenovirus vectors to transfer genes to the respiratory epithelia of rhesus monkeys. Other instances of the use of adenoviruses in gene therapy can be found in Rosenfeld et al., Science 252:431-434 (1991); Rosenfeld et al., Cell 68:143-155 (1992); Mastrangeli et al., J. Clin. Invest. 91:225-234 (1993); PCT Publication WO94/12649; and Wang, et al., Gene Therapy 2:775-783 (1995). In a preferred embodiment, adenovirus vectors are used.

[0394] Adeno-associated virus (AAV) has also been proposed for use in gene therapy (Walsh et al., Proc. Soc. Exp. Biol. Med. 204:289-300 (1993); U.S. Pat. No. 5,436,146).

[0395] Another approach to gene therapy involves transferring a gene to cells in tissue culture by such methods as electroporation, lipofection, calcium phosphate mediated transfection, or viral infection. Usually, the method of transfer includes the transfer of a selectable marker to the cells. The cells are then placed under selection to isolate those cells that have taken up and are expressing the transferred gene. Those cells are then delivered to a patient.

[0396] In this embodiment, the nucleic acid is introduced into a cell prior to administration in vivo of the resulting recombinant cell. Such introduction can be carried out by any method known in the art, including but not limited to transfection, electroporation, microinjection, infection with a viral or bacteriophage vector containing the nucleic acid sequences, cell fusion, chromosome-mediated gene transfer, microcell-mediated gene transfer, spheroplast fusion, etc. Numerous techniques are known in the art for the introduction of foreign genes into cells (see, e.g., Loeffler and Behr, Meth. Enzymol. 217:599-618 (1993); Cohen et al., Meth. Enzymol. 217:618-644 (1993); Cline, Pharmac. Ther. 29:69-92m (1985) and may be used in accordance with the present invention, provided that the necessary developmental and physiological functions of the recipient cells are not disrupted. The technique should provide for the stable transfer of the nucleic acid to the cell, so that the nucleic acid is expressible by the cell and preferably heritable and expressible by its cell progeny.

[0397] The resulting recombinant cells can be delivered to a patient by various methods known in the art. Recombinant blood cells (e.g., hematopoietic stem or progenitor cells) are preferably administered intravenously. The amount of cells envisioned for use depends on the desired effect, patient state, etc., and can be determined by one skilled in the art.

[0398] Cells into which a nucleic acid can be introduced for purposes of gene therapy encompass any desired, available cell type, and include but are not limited to epithelial cells, endothelial cells, keratinocytes, fibroblasts, muscle cells, hepatocytes; blood cells such as T lymphocytes, B lymphocytes, monocytes, macrophages, neutrophils, eosinophils, megakaryocytes, granulocytes; various stem or progenitor cells, in particular hematopoietic stem or progenitor cells, e.g., as obtained from bone marrow, umbilical cord blood, peripheral blood, fetal liver, etc.

[0399] In a preferred embodiment, the cell used for gene therapy is autologous to the patient.

[0400] In an embodiment in which recombinant cells are used in gene therapy, nucleic acid sequences encoding an antibody are introduced into the cells such that they are expressible by the cells or their progeny, and the recombinant cells are then administered in vivo for therapeutic effect. In a specific embodiment, stem or progenitor cells are used. Any stem and/or progenitor cells which can be isolated and maintained in vitro can potentially be used in accordance with this embodiment of the present invention (see e.g. PCT Publication WO 94/08598; Stemple and Anderson, Cell 71:973-985 (1992); Rheinwald, Meth. Cell Bio. 21A:229 (1980); and Pittelkow and Scott, Mayo Clinic Proc. 61:771 (1986)).

[0401] In a specific embodiment, the nucleic acid to be introduced for purposes of gene therapy comprises an inducible promoter operably linked to the coding region, such that expression of the nucleic acid is controllable by the presence or absence of an appropriate inducer of transcription.

[0402] Demonstration of Therapeutic or Prophylactic Activity

[0403] The compounds or pharmaceutical compositions of the invention are preferably tested in vitro, and then in vivo for the desired therapeutic or prophylactic activity, prior to use in humans. For example, in vitro assays to demonstrate the therapeutic or prophylactic utility of a compound or pharmaceutical composition include, the effect of a compound on a cell line or a patient tissue sample. The effect of the compound or composition on the cell line and/or tissue sample can be determined utilizing techniques known to those of skill in the art including, but not limited to, rosette formation assays and cell lysis assays. In accordance with the invention, in vitro assays which can be used to determine whether administration of a specific compound is indicated, include in vitro cell culture assays in which a patient tissue sample is grown in culture, and exposed to or otherwise administered a compound, and the effect of such compound upon the tissue sample is observed.

[0404] Therapeutic/Prophylactic Administration and Composition

[0405] The invention provides methods of treatment, inhibition and prophylaxis by administration to a subject of an effective amount of a compound or pharmaceutical composition of the invention, preferably a polypeptide or antibody of the invention. In a preferred embodiment, the compound is substantially purified (e.g., substantially free from substances that limit its effect or produce undesired side-effects). The subject is preferably an animal, including but not limited to animals such as cows, pigs, horses, chickens, cats, dogs, etc., and is preferably a mammal, and most preferably human.

[0406] Formulations and methods of administration that can be employed when the compound comprises a nucleic acid or an immunoglobulin are described above; additional appropriate formulations and routes of administration can be selected from among those described herein below.

[0407] Various delivery systems are known and can be used to administer a compound of the invention, e.g., encapsulation in liposomes, microparticles, microcapsules, recombinant cells capable of expressing the compound, receptor-mediated endocytosis (see, e.g., Wu and Wu, J. Biol. Chem. 262:4429-4432 (1987)), construction of a nucleic acid as part of a retroviral or other vector, etc. Methods of introduction include but are not limited to intradermal, intramuscular, intraperitoneal, intravenous, subcutaneous, intranasal, epidural, and oral routes. The compounds or compositions may be administered by any convenient route, for example by infusion or bolus injection, by absorption through epithelial or mucocutaneous linings (e.g., oral mucosa, rectal and intestinal mucosa, etc.) and may be administered together with other biologically active agents. Administration can be systemic or local. In addition, it may be desirable to introduce the pharmaceutical compounds or compositions of the invention into the central nervous system by any suitable route, including intraventricular and intrathecal injection; intraventricular injection may be facilitated by an intraventricular catheter, for example, attached to a reservoir, such as an Ommaya reservoir. Pulmonary administration can also be employed, e.g., by use of an inhaler or nebulizer, and formulation with an aerosolizing agent.

[0408] In a specific embodiment, it may be desirable to administer the pharmaceutical compounds or compositions of the invention locally to the area in need of treatment; this may be achieved by, for example, and not by way of limitation, local infusion during surgery, topical application, e.g., in conjunction with a wound dressing after surgery, by injection, by means of a catheter, by means of a suppository, or by means of an implant, said implant being of a porous, non-porous, or gelatinous material, including membranes, such as sialastic membranes, or fibers. Preferably, when administering a protein, including an antibody, of the invention, care must be taken to use materials to which the protein does not absorb.

[0409] In another embodiment, the compound or composition can be delivered in a vesicle, in particular a liposome (see Langer, Science 249:1527-1533 (1990); Treat et al., in Liposomes in the Therapy of Infectious Disease and Cancer, Lopez-Berestein and Fidler (eds.), Liss, New York, pp. 353-365 (1989); Lopez-Berestein, ibid., pp. 317-327; see generally ibid.) In yet another embodiment, the compound or composition can be delivered in a controlled release system. In one embodiment, a pump may be used (see Langer, supra; Sefton, CRC Crit. Ref. Biomed. Eng. 14:201 (1987); Buchwald et al., Surgery 88:507 (1980); Saudek et al., N. Engl. J. Med. 321:574 (1989)). In another embodiment, polymeric materials can be used (see Medical Applications of Controlled Release, Langer and Wise (eds.), CRC Pres., Boca Raton, Fla. (1974); Controlled Drug Bioavailability, Drug Product Design and Performance, Smolen and Ball (eds.), Wiley, New York (1984); Ranger and Peppas, J., Macromol. Sci. Rev. Macromol. Chem. 23:61 (1983); see also Levy et al., Science 228:190 (1985); During et al., Ann. Neurol. 25:351 (1989); Howard et al., J. Neurosurg. 71:105 (1989)). In yet another embodiment, a controlled release system can be placed in proximity of the therapeutic target, e.g., the brain, thus requiring only a fraction of the systemic dose (see, e.g., Goodson, in Medical Applications of Controlled Release, supra, vol. 2, pp. 115-138 (1984)).

[0410] Other controlled release systems are discussed in the review by Langer (Science 249:1527-1533 (1990)).

[0411] In a specific embodiment where the compound of the invention is a nucleic acid encoding a protein, the nucleic acid can be administered in vivo to promote expression of its encoded protein, by constructing it as part of an appropriate nucleic acid expression vector and administering it so that it becomes intracellular, e.g., by use of a retroviral vector (see U.S. Pat. No. 4,980,286), or by direct injection, or by use of microparticle bombardment (e.g., a gene gun; Biolistic, Dupont), or coating with lipids or cell-surface receptors or transfecting agents, or by administering it in linkage to a homeobox-like peptide which is known to enter the nucleus (see e.g., Joliot et al., Proc. Natl. Acad. Sci. USA 88:1864-1868 (1991)), etc. Alternatively, a nucleic acid can be introduced intracellularly and incorporated within host cell DNA for expression, by homologous recombination.

[0412] The present invention also provides pharmaceutical compositions. Such compositions comprise a therapeutically effective amount of a compound, and a pharmaceutically acceptable carrier. In a specific embodiment, the term “pharmaceutically acceptable” means approved by a regulatory agency of the Federal or a state government or listed in the U.S. Pharmacopeia or other generally recognized pharmacopeia for use in animals, and more particularly in humans. The term “carrier” refers to a diluent, adjuvant, excipient, or vehicle with which the therapeutic is administered. Such pharmaceutical carriers can be sterile liquids, such as water and oils, including those of petroleum, animal, vegetable or synthetic origin, such as peanut oil, soybean oil, mineral oil, sesame oil and the like. Water is a preferred carrier when the pharmaceutical composition is administered intravenously. Saline solutions and aqueous dextrose and glycerol solutions can also be employed as liquid carriers, particularly for injectable solutions. Suitable pharmaceutical excipients include starch, glucose, lactose, sucrose, gelatin, malt, rice, flour, chalk, silica gel, sodium stearate, glycerol monostearate, talc, sodium chloride, dried skim milk, glycerol, propylene, glycol, water, ethanol and the like. The composition, if desired, can also contain minor amounts of wetting or emulsifying agents, or pH buffering agents. These compositions can take the form of solutions, suspensions, emulsion, tablets, pills, capsules, powders, sustained-release formulations and the like. The composition can be formulated as a suppository, with traditional binders and carriers such as triglycerides. Oral formulation can include standard carriers such as pharmaceutical grades of mannitol, lactose, starch, magnesium stearate, sodium saccharine, cellulose, magnesium carbonate, etc. Examples of suitable pharmaceutical carriers are described in “Remington's Pharmaceutical Sciences” by E. W. Martin. Such compositions will contain a therapeutically effective amount of the compound, preferably in purified form, together with a suitable amount of carrier so as to provide the form for proper administration to the patient. The formulation should suit the mode of administration.

[0413] In a preferred embodiment, the composition is formulated in accordance with routine procedures as a pharmaceutical composition adapted for intravenous administration to human beings. Typically, compositions for intravenous administration are solutions in sterile isotonic aqueous buffer. Where necessary, the composition may also include a solubilizing agent and a local anesthetic such as lignocaine to ease pain at the site of the injection. Generally, the ingredients are supplied either separately or mixed together in unit dosage form, for example, as a dry lyophilized powder or water free concentrate in a hermetically sealed container such as an ampoule or sachette indicating the quantity of active agent. Where the composition is to be administered by infusion, it can be dispensed with an infusion bottle containing sterile pharmaceutical grade water or saline. Where the composition is administered by injection, an ampoule of sterile water for injection or saline can be provided so that the ingredients may be mixed prior to administration.

[0414] The compounds of the invention can be formulated as neutral or salt forms. Pharmaceutically acceptable salts include those formed with anions such as those derived from hydrochloric, phosphoric, acetic, oxalic, tartaric acids, etc., and those formed with cations such as those derived from sodium, potassium, ammonium, calcium, ferric hydroxides, isopropylamine, triethylamine, 2-ethylamino ethanol, histidine, procaine, etc.

[0415] The amount of the compound of the invention which will be effective in the treatment, inhibition and prevention of a disease or disorder associated with aberrant expression and/or activity of a polypeptide of the invention can be determined by standard clinical techniques. In addition, in vitro assays may optionally be employed to help identify optimal dosage ranges. The precise dose to be employed in the formulation will also depend on the route of administration, and the seriousness of the disease or disorder, and should be decided according to the judgment of the practitioner and each patient's circumstances. Effective doses may be extrapolated from dose-response curves derived from in vitro or animal model test systems.

[0416] For antibodies, the dosage administered to a patient is typically 0.1 mg/kg to 100 mg/kg of the patient's body weight. Preferably, the dosage administered to a patient is between 0.1 mg/kg and 20 mg/kg of the patient's body weight, more preferably 1 mg/kg to 10 mg/kg of the patient's body weight. Generally, human antibodies have a longer half-life within the human body than antibodies from other species due to the immune response to the foreign polypeptides. Thus, lower dosages of human antibodies and less frequent administration is often possible. Further, the dosage and frequency of administration of antibodies of the invention may be reduced by enhancing uptake and tissue penetration (e.g., into the brain) of the antibodies by modifications such as, for example, lipidation.

[0417] The invention also provides a pharmaceutical pack or kit comprising one or more containers filled with one or more of the ingredients of the pharmaceutical compositions of the invention. Optionally associated with such container(s) can be a notice in the form prescribed by a governmental agency regulating the manufacture, use or sale of pharmaceuticals or biological products, which notice reflects approval by the agency of manufacture, use or sale for human administration.

[0418] Diagnosis and Imaging

[0419] Labeled antibodies, and derivatives and analogs thereof, which specifically bind to a polypeptide of interest can be used for diagnostic purposes to detect, diagnose, prognosticate, or monitor cancer and other hyperproliferative diseases, disorders, and/or conditions associated with the aberrant expression and/or activity of a polypeptide of the invention. The invention provides for the detection of aberrant expression of a polypeptide of interest, comprising (a) assaying the expression of the polypeptide of interest in cells or body fluid of an individual using one or more antibodies specific to the polypeptide interest and (b) comparing the level of gene expression with a standard gene expression level, whereby an increase or decrease in the assayed polypeptide gene expression level compared to the standard expression level is indicative of aberrant expression.

[0420] The invention provides a diagnostic assay for diagnosing cancer and other hyperproliferative disease or disorder, comprising (a) assaying the expression of the polypeptide of interest in cells or body fluid of an individual using one or more antibodies specific to the polypeptide interest and (b) comparing the level of gene expression with a standard gene expression level, whereby an increase or decrease in the assayed polypeptide gene expression level compared to the standard expression level is indicative of a particular cancer or other hyperproliferative disease or disorder. With respect to cancer and other hyperproliferative diseases and disorders, the presence of a relatively high amount of transcript in biopsied tissue from an individual may indicate a predisposition for the development of the disease, or may provide a means for detecting the disease prior to the appearance of actual clinical symptoms. A more definitive diagnosis of this type may allow health professionals to employ preventative measures or aggressive treatment earlier thereby preventing the development or further progression of the cancer or other hyperproliferative disease.

[0421] Antibodies of the invention can be used to assay protein levels in a biological sample using classical immunohistological methods known to those of skill in the art (e.g., see Jalkanen et al., J. Cell. Biol. 101:976-985 (1985); Jalkanen et al., J. Cell. Biol. 105:3087-3096 (1987)). Other antibody-based methods useful for detecting protein gene expression include immunoassays, such as the enzyme linked immunosorbent assay (ELISA) and the radioimmunoassay (RIA). Suitable antibody assay labels are known in the art and include enzyme labels, such as, glucose oxidase; radioisotopes, such as iodine (125I, 121I), carbon (14C), sulfur (35S), tritium (3H), indium (112In), and technetium (99Tc); luminescent labels, such as luminol; and fluorescent labels, such as fluorescein and rhodamine, and biotin.

[0422] One facet of the invention is the detection and diagnosis of a disease or disorder associated with aberrant expression of a polypeptide of interest in an animal, preferably a mammal and most preferably a human. In one embodiment, diagnosis comprises: a) administering (for example, parenterally, subcutaneously, or intraperitoneally) to a subject an effective amount of a labeled molecule which specifically binds to the polypeptide of interest; b) waiting for a time interval following the administering for permitting the labeled molecule to preferentially concentrate at sites in the subject where the polypeptide is expressed (and for unbound labeled molecule to be cleared to background level); c) determining background level; and d) detecting the labeled molecule in the subject, such that detection of labeled molecule above the background level indicates that the subject has a particular disease or disorder associated with aberrant expression of the polypeptide of interest. Background level can be determined by various methods including, comparing the amount of labeled molecule detected to a standard value previously determined for a particular system.

[0423] It will be understood in the art that the size of the subject and the imaging system used will determine the quantity of imaging moiety needed to produce diagnostic images. In the case of a radioisotope moiety, for a human subject, the quantity of radioactivity injected will normally range from about 5 to 20 millicuries of 99mTc. The labeled antibody or antibody fragment will then preferentially accumulate at the location of cells which contain the specific protein. In vivo tumor imaging is described in S. W. Burchiel et al., “Immunopharmacokinetics of Radiolabeled Antibodies and Their Fragments.” (Chapter 13 in Tumor Imaging: The Radiochemical Detection of Cancer, S. W. Burchiel and B. A. Rhodes, eds., Masson Publishing Inc. (1982)).

[0424] Depending on several variables, including the type of label used and the mode of administration, the time interval following the administration for permitting the labeled molecule to preferentially concentrate at sites in the subject and for unbound labeled molecule to be cleared to background level is 6 to 48 hours or 6 to 24 hours or 6 to 12 hours. In another embodiment the time interval following administration is 5 to 20 days or 5 to 10 days.

[0425] In an embodiment, monitoring of the disease or disorder is carried out by repeating the method for diagnosing the disease or disease, for example, one month after initial diagnosis, six months after initial diagnosis, one year after initial diagnosis, etc.

[0426] Presence of the labeled molecule can be detected in the patient using methods known in the art for in vivo scanning. These methods depend upon the type of label used. Skilled artisans will be able to determine the appropriate method for detecting a particular label. Methods and devices that may be used in the diagnostic methods of the invention include, but are not limited to, computed tomography (CT), whole body scan such as position emission tomography (PET), magnetic resonance imaging (MRI), and sonography.

[0427] In a specific embodiment, the molecule is labeled with a radioisotope and is detected in the patient using a radiation responsive surgical instrument (Thurston et al., U.S. Pat. No. 5,441,050). In another embodiment, the molecule is labeled with a fluorescent compound and is detected in the patient using a fluorescence responsive scanning instrument. In another embodiment, the molecule is labeled with a positron emitting metal and is detected in the patent using positron emission-tomography. In yet another embodiment, the molecule is labeled with a paramagnetic label and is detected in a patient using magnetic resonance imaging (MRI).

[0428] Kits

[0429] The present invention provides kits that can be used in the above methods. In one embodiment, a kit comprises an antibody of the invention, preferably a purified antibody, in one or more containers. In a specific embodiment, the kits of the present invention contain a substantially isolated polypeptide comprising an epitope which is specifically immunoreactive with an antibody included in the kit. Preferably, the kits of the present invention further comprise a control antibody which does not react with the polypeptide of interest. In another specific embodiment, the kits of the present invention contain a means for detecting the binding of an antibody to a polypeptide of interest (e.g., the antibody may be conjugated to a detectable substrate such as a fluorescent compound, an enzymatic substrate, a radioactive compound or a luminescent compound, or a second antibody which recognizes the first antibody may be conjugated to a detectable substrate).

[0430] In another specific embodiment of the present invention, the kit is a diagnostic kit for use in screening serum containing antibodies specific against proliferative and/or cancerous polynucleotides and polypeptides. Such a kit may include a control antibody that does not react with the polypeptide of interest. Such a kit may include a substantially isolated polypeptide antigen comprising an epitope which is specifically immunoreactive with at least one anti-polypeptide antigen antibody. Further, such a kit includes means for detecting the binding of said antibody to the antigen (e.g., the antibody may be conjugated to a fluorescent compound such as fluorescein or rhodamine which can be detected by flow cytometry). In specific embodiments, the kit may include a recombinantly produced or chemically synthesized polypeptide antigen. The polypeptide antigen of the kit may also be attached to a solid support.

[0431] In a more specific embodiment the detecting means of the above-described kit includes a solid support to which said polypeptide antigen is attached. Such a kit may also include a non-attached reporter-labeled anti-human antibody. In this embodiment, binding of the antibody to the polypeptide antigen can be detected by binding of the said reporter-labeled antibody.

[0432] In an additional embodiment, the invention includes a diagnostic kit for use in screening serum containing antigens of the polypeptide of the invention. The diagnostic kit includes a substantially isolated antibody specifically immunoreactive with polypeptide or polynucleotide antigens, and means for detecting the binding of the polynucleotide or polypeptide antigen to the antibody. In one embodiment, the antibody is attached to a solid support. In a specific embodiment, the antibody may be a monoclonal antibody. The detecting means of the kit may include a second, labeled monoclonal antibody. Alternatively, or in addition, the detecting means may include a labeled, competing antigen.

[0433] In one diagnostic configuration, test serum is reacted with a solid phase reagent having a surface-bound antigen obtained by the methods of the present invention. After binding with specific antigen antibody to the reagent and removing unbound serum components by washing, the reagent is reacted with reporter-labeled anti-human antibody to bind reporter to the reagent in proportion to the amount of bound anti-antigen antibody on the solid support. The reagent is again washed to remove unbound labeled antibody, and the amount of reporter associated with the reagent is determined. Typically, the reporter is an enzyme which is detected by incubating the solid phase in the presence of a suitable fluorometric, luminescent or calorimetric substrate (Sigma, St. Louis, Mo.).

[0434] The solid surface reagent in the above assay is prepared by known techniques for attaching protein material to solid support material, such as polymeric beads, dip sticks, 96-well plate or filter material. These attachment methods generally include non-specific adsorption of the protein to the support or covalent attachment of the protein, typically through a free amine group, to a chemically reactive group on the solid support, such as an activated carboxyl, hydroxyl, or aldehyde group. Alternatively, streptavidin coated plates can be used in conjunction with biotinylated antigen(s).

[0435] Thus, the invention provides an assay system or kit for carrying out this diagnostic method. The kit generally includes a support with surface-bound recombinant antigens, and a reporter-labeled anti-human antibody for detecting surface-bound anti-antigen antibody.

[0436] Uses of the Polynucleotides

[0437] Each of the polynucleotides identified herein can be used in numerous ways as reagents. The following description should be considered exemplary and utilizes known techniques.

[0438] The polynucleotides of the present invention are useful for chromosome identification. There exists an ongoing need to identify new chromosome markers, since few chromosome marking reagents, based on actual sequence data (repeat polymorphisms), are presently available. Each sequence is specifically targeted to and can hybridize with a particular location on an individual human chromosome, thus each polynucleotide of the present invention can routinely be used as a chromosome marker using techniques known in the art. Table 1B.1, column 8 provides the chromosome location of some of the polynucleotides of the invention.

[0439] Briefly, sequences can be mapped to chromosomes by preparing PCR primers (preferably at least 15 bp (e.g., 15-25 bp) from the sequences shown in SEQ ID NO:X. Primers can optionally be selected using computer analysis so that primers do not span more than one predicted exon in the genomic DNA. These primers are then used for PCR screening of somatic cell hybrids containing individual human chromosomes. Only those hybrids containing the human gene corresponding to SEQ ID NO:X will yield an amplified fragment.

[0440] Similarly, somatic hybrids provide a rapid method of PCR mapping the polynucleotides to particular chromosomes. Three or more clones can be assigned per day using a single thermal cycler. Moreover, sublocalization of the polynucleotides can be achieved with panels of specific chromosome fragments. Other gene mapping strategies that can be used include in situ hybridization, prescreening with labeled flow-sorted chromosomes, preselection by hybridization to construct chromosome specific-cDNA libraries, and computer mapping techniques (See, e.g., Shuler, Trends Biotechnol 16:456-459 (1998) which is hereby incorporated by reference in its entirety).

[0441] Precise chromosomal location of the polynucleotides can also be achieved using fluorescence in situ hybridization (FISH) of a metaphase chromosomal spread. This technique uses polynucleotides as short as 500 or 600 bases; however, polynucleotides 2,000 bp are preferred. For a review of this technique, see Verma et al., “Human Chromosomes: a Manual of Basic Techniques,” Pergamon Press, New York (1988).

[0442] For chromosome mapping, the polynucleotides can be used individually (to mark a single chromosome or a single site on that chromosome) or in panels (for marking multiple sites and/or multiple chromosomes).

[0443] Thus, the present invention also provides a method for chromosomal localization which involves (a) preparing PCR primers from the polynucleotide sequences in Table 1B and/or Table 2 and SEQ ID NO:X and (b) screening somatic cell hybrids containing individual chromosomes.

[0444] The polynucleotides of the present invention would likewise be useful for radiation hybrid mapping, HAPPY mapping, and long range restriction mapping. For a review of these techniques and others known in the art, see, e.g. Dear, “Genome Mapping: A Practical Approach,” IRL Press at Oxford University Press, London (1997); Aydin, J. Mol. Med. 77:691-694 (1999); Hacia et al., Mol. Psychiatry 3:483-492 (1998); Herrick et al., Chromosome Res. 7:409-423 (1999); Hamilton et al., Methods Cell Biol. 62:265-280 (2000); and/or Ott, J. Hered. 90:68-70 (1999) each of which is hereby incorporated by reference in its entirety.

[0445] Once a polynucleotide has been mapped to a precise chromosomal location, the physical position of the polynucleotide can be used in linkage analysis. Linkage analysis establishes coinheritance between a chromosomal location and presentation of a particular disease. (Disease mapping data are found, for example, in V. McKusick, Mendelian Inheritance in Man (available on line through Johns Hopkins University Welch Medical Library)). Column 9 of Table 1B.1 provides an OMIM reference identification number of diseases associated with the cytologic band disclosed in column 8 of Table 1B.1, as determined using techniques described herein and by reference to Table 5. Assuming 1 megabase mapping resolution and one gene per 20 kb, a cDNA precisely localized to a chromosomal region associated with the disease could be one of 50-500 potential causative genes.

[0446] Thus, once coinheritance is established, differences in a polynucleotide of the invention and the corresponding gene between affected and unaffected individuals can be examined. First, visible structural alterations in the chromosomes, such as deletions or translocations, are examined in chromosome spreads or by PCR. If no structural alterations exist, the presence of point mutations are ascertained. Mutations observed in some or all affected individuals, but not in normal individuals, indicates that the mutation may cause the disease. However, complete sequencing of the polypeptide and the corresponding gene from several normal individuals is required to distinguish the mutation from a polymorphism. If a new polymorphism is identified, this polymorphic polypeptide can be used for further linkage analysis.

[0447] Furthermore, increased or decreased expression of the gene in affected individuals as compared to unaffected individuals can be assessed using the polynucleotides of the invention. Any of these alterations (altered expression, chromosomal rearrangement, or mutation) can be used as a diagnostic or prognostic marker. Diagnostic and prognostic methods, kits and reagents encompassed by the present invention are briefly described below and more thoroughly elsewhere herein (see e.g., the sections labeled “Antibodies”, “Diagnostic Assays”, and “Methods for Detecting Diseases”).

[0448] Thus, the invention also provides a diagnostic method useful during diagnosis of a disorder, involving measuring the expression level of polynucleotides of the present invention in cells or body fluid from an individual and comparing the measured gene expression level with a standard level of polynucleotide expression level, whereby an increase or decrease in the gene expression level compared to the standard is indicative of a disorder. Additional non-limiting examples of diagnostic methods encompassed by the present invention are more thoroughly described elsewhere herein (see, e.g., Example 12).

[0449] In still another embodiment, the invention includes a kit for analyzing samples for the presence of proliferative and/or cancerous polynucleotides derived from a test subject. In a general embodiment, the kit includes at least one polynucleotide probe containing a nucleotide sequence that will specifically hybridize with a polynucleotide of the invention and a suitable container. In a specific embodiment, the kit includes two polynucleotide probes defining an internal region of the polynucleotide of the invention, where each probe has one strand containing a 31′mer-end internal to the region. In a further embodiment, the probes may be useful as primers for polymerase chain reaction amplification.

[0450] Where a diagnosis of a related disorder, including, for example, diagnosis of a tumor, has already been made according to conventional methods, the present invention is useful as a prognostic indicator, whereby patients exhibiting enhanced or depressed polynucleotide of the invention expression will experience a worse clinical outcome relative to patients expressing the gene at a level nearer the standard level.

[0451] By “measuring the expression level of polynucleotides of the invention” is intended qualitatively or quantitatively measuring or estimating the level of the polypeptide of the invention or the level of the mRNA encoding the polypeptide of the invention in a first biological sample either directly (e.g., by determining or estimating absolute protein level or mRNA level) or relatively (e.g., by comparing to the polypeptide level or mRNA level in a second biological sample). Preferably, the polypeptide level or mRNA level in the first biological sample is measured or estimated and compared to a standard polypeptide level or mRNA level, the standard being taken from a second biological sample obtained from an individual not having the related disorder or being determined by averaging levels from a population of individuals not having a related disorder. As will be appreciated in the art, once a standard polypeptide level or mRNA level is known, it can be used repeatedly as a standard for comparison.

[0452] By “biological sample” is intended any biological sample obtained from an individual, body fluid, cell line, tissue culture, or other source which contains polypeptide of the present invention or the corresponding mRNA. As indicated, biological samples include body fluids (such as semen, lymph, vaginal pool, sera, plasma, urine, synovial fluid and spinal fluid) which contain the polypeptide of the present invention, and tissue sources found to express the polypeptide of the present invention. Methods for obtaining tissue biopsies and body fluids from mammals are well known in the art. Where the biological sample is to include mRNA, a tissue biopsy is the preferred source.

[0453] The method(s) provided above may preferably be applied in a diagnostic method and/or kits in which polynucleotides and/or polypeptides of the invention are attached to a solid support. In one exemplary method, the support may be a “gene chip” or a “biological chip” as described in U.S. Pat. Nos. 5,837,832, 5,874,219, and 5,856,174. Further, such a gene chip with polynucleotides of the invention attached may be used to identify polymorphisms between the isolated polynucleotide sequences of the invention, with polynucleotides isolated from a test subject. The knowledge of such polymorphisms (i.e. their location, as well as, their existence) would be beneficial in identifying disease loci for many disorders, such as for example, in neural disorders, immune system disorders, muscular disorders, reproductive disorders, gastrointestinal disorders, pulmonary disorders, digestive disorders, metabolic disorders, cardiovascular disorders, renal disorders, proliferative disorders, and/or cancerous diseases and conditions. Such a method is described in U.S. Pat. Nos. 5,858,659 and 5,856,104. The US patents referenced supra are hereby incorporated by reference in their entirety herein.

[0454] The present invention encompasses polynucleotides of the present invention that are chemically synthesized, or reproduced as peptide nucleic acids (PNA), or according to other methods known in the art. The use of PNAs would serve as the preferred form if the polynucleotides of the invention are incorporated onto a solid support, or gene chip. For the purposes of the present invention, a peptide nucleic acid (PNA) is a polyamide type of DNA analog and the monomeric units for adenine, guanine, thymine and cytosine are available commercially (Perceptive Biosystems). Certain components of DNA, such as phosphorus, phosphorus oxides, or deoxyribose derivatives, are not present in PNAs. As disclosed by Nielsen et al., Science 254, 1497 (1991); and Egholm et al., Nature 365, 666 (1993), PNAs bind specifically and tightly to complementary DNA strands and are not degraded by nucleases. In fact, PNA binds more strongly to DNA than DNA itself does. This is probably because there is no electrostatic repulsion between the two strands, and also the polyamide backbone is more flexible. Because of this, PNA/DNA duplexes bind under a wider range of stringency conditions than DNA/DNA duplexes, making it easier to perform multiplex hybridization. Smaller probes can be used than with DNA due to the strong binding. In addition, it is more likely that single base mismatches can be determined with PNA/DNA hybridization because a single mismatch in a PNA/DNA 15-mer lowers the melting point (T.sub.m) by 8°-20° C., vs. 4°-16° C. for the DNA/DNA 15-mer duplex. Also, the absence of charge groups in PNA means that hybridization can be done at low ionic strengths and reduce possible interference by salt during the analysis.

[0455] The compounds of the present invention have uses which include, but are not limited to, detecting cancer in mammals. In particular the invention is useful during diagnosis of pathological cell proliferative neoplasias which include, but are not limited to: acute myelogenous leukemias including acute monocytic leukemia, acute myeloblastic leukemia, acute promyelocytic leukemia, acute myelomonocytic leukemia, acute erythroleukemia, acute megakaryocytic leukemia, and acute undifferentiated leukemia, etc.; and chronic myelogenous leukemias including chronic myelomonocytic leukemia, chronic granulocytic leukemia, etc. Preferred mammals include monkeys, apes, cats, dogs, cows, pigs, horses, rabbits and humans. Particularly preferred are humans.

[0456] Pathological cell proliferative disorders are often associated with inappropriate activation of proto-oncogenes. (Gelmann, E. P. et al., “The Etiology of Acute Leukemia: Molecular Genetics and Viral Oncology,” in Neoplastic Diseases of the Blood, Vol 1., Wiernik, P. H. et al. eds., 161-182 (1985)). Neoplasias are now believed to result from the qualitative alteration of a normal cellular gene product, or from the quantitative modification of gene expression by insertion into the chromosome of a viral sequence, by chromosomal translocation of a gene to a more actively transcribed region, or by some other mechanism. (Gelmann et al., supra) It is likely that mutated or altered expression of specific genes is involved in the pathogenesis of some leukemias, among other tissues and cell types. (Gelmann et al., supra) Indeed, the human counterparts of the oncogenes involved in some animal neoplasias have been amplified or translocated in some cases of human leukemia and carcinoma. (Gelmann et al., supra)

[0457] For example, c-myc expression is highly amplified in the non-lymphocytic leukemia cell line HL-60. When HL-60 cells are chemically induced to stop proliferation, the level of c-myc is found to be downregulated. (International Publication Number WO 91/15580). However, it has been shown that exposure of HL-60 cells to a DNA construct that is complementary to the 5′ end of c-myc or c-myb blocks translation of the corresponding mRNAs which down-regulates expression of the c-myc or c-myb proteins and causes arrest of cell proliferation and differentiation of the treated cells. (International Publication Number WO 91/15580; Wickstrom et al., Proc. Natl. Acad. Sci. 85:1028 (1988); Anfossi et al., Proc. Natl. Acad. Sci. 86:3379 (1989)). However, the skilled artisan would appreciate the present invention's usefulness is not be limited to treatment, prevention, and/or prognosis of proliferative disorders of cells and tissues of hematopoietic origin, in light of the numerous cells and cell types of varying origins which are known to exhibit proliferative phenotypes.

[0458] In addition to the foregoing, a polynucleotide of the present invention can be used to control gene expression through triple helix formation or through antisense DNA or RNA. Antisense techniques are discussed, for example, in Okano, J. Neurochem. 56: 560 (1991); “Oligodeoxynucleotides as Antisense Inhibitors of Gene Expression, CRC Press, Boca Raton, Fla. (1988). Triple helix formation is discussed in, for instance Lee et al., Nucleic Acids Research 6: 3073 (1979); Cooney et al., Science 241: 456 (1988); and Dervan et al., Science 251: 1360 (1991). Both methods rely on binding of the polynucleotide to a complementary DNA or RNA. For these techniques, preferred polynucleotides are usually oligonucleotides 20 to 40 bases in length and complementary to either the region of the gene involved in transcription (triple helix—see Lee et al., Nucl. Acids Res. 6:3073 (1979); Cooney et al., Science 241:456 (1988); and Dervan et al., Science 251:1360 (1991)) or to the mRNA itself (antisense—Okano, J. Neurochem. 56:560 (1991); Oligodeoxy-nucleotides as Antisense Inhibitors of Gene Expression, CRC Press, Boca Raton, Fla. (1988)). Triple helix formation optimally results in a shut-off of RNA transcription from DNA, while antisense RNA hybridization blocks translation of an mRNA molecule into polypeptide. The oligonucleotide described above can also be delivered to cells such that the antisense RNA or DNA may be expressed in vivo to inhibit production of polypeptide of the present invention antigens. Both techniques are effective in model systems, and the information disclosed herein can be used to design antisense or triple helix polynucleotides in an effort to treat disease, and in particular, for the treatment of proliferative diseases and/or conditions. Non-limiting antisense and triple helix methods encompassed by the present invention are more thoroughly described elsewhere herein (see, e.g., the section labeled “Antisense and Ribozyme (Antagonists)”).

[0459] Polynucleotides of the present invention are also useful in gene therapy. One goal of gene therapy is to insert a normal gene into an organism having a defective gene, in an effort to correct the genetic defect. The polynucleotides disclosed in the present invention offer a means of targeting such genetic defects in a highly accurate manner. Another goal is to insert a new gene that was not present in the host genome, thereby producing a new trait in the host cell. Additional non-limiting examples of gene therapy methods encompassed by the present invention are more thoroughly described elsewhere herein (see, e.g., the sections labeled “Gene Therapy Methods”, and Examples 16, 17 and 18).

[0460] The polynucleotides are also useful for identifying individuals from minute biological samples. The United States military, for example, is considering the use of restriction fragment length polymorphism (RFLP) for identification of its personnel. In this technique, an individual's genomic DNA is digested with one or more restriction enzymes, and probed on a Southern blot to yield unique bands for identifying personnel. This method does not suffer from the current limitations of “Dog Tags” which can be lost, switched, or stolen, making positive identification difficult. The polynucleotides of the present invention can be used as additional DNA markers for RFLP.

[0461] The polynucleotides of the present invention can also be used as an alternative to RFLP, by determining the actual base-by-base DNA sequence of selected portions of an individual's genome. These sequences can be used to prepare PCR primers for amplifying and isolating such selected DNA, which can then be sequenced. Using this technique, individuals can be identified because each individual will have a unique set of DNA sequences. Once an unique ID database is established for an individual, positive identification of that individual, living or dead, can be made from extremely small tissue samples.

[0462] Forensic biology also benefits from using DNA-based identification techniques as disclosed herein. DNA sequences taken from very small biological samples such as tissues, e.g., hair or skin, or body fluids, e.g., blood, saliva, semen, synovial fluid, amniotic fluid, breast milk, lymph, pulmonary sputum or surfactant, urine, fecal matter, etc., can be amplified using PCR. In one prior art technique, gene sequences amplified from polymorphic loci, such as DQa class II HLA gene, are used in forensic biology to identify individuals. (Erlich, H., PCR Technology, Freeman and Co. (1992)). Once these specific polymorphic loci are amplified, they are digested with one or more restriction enzymes, yielding an identifying set of bands on a Southern blot probed with DNA corresponding to the DQa class II HLA gene. Similarly, polynucleotides of the present invention can be used as polymorphic markers for forensic purposes.

[0463] There is also a need for reagents capable of identifying the source of a particular tissue. Such need arises, for example, in forensics when presented with tissue of unknown origin. Appropriate reagents can comprise, for example, DNA probes or primers prepared from the sequences of the present invention, specific to tissues, including but not limited to those shown in Table 1B. Panels of such reagents can identify tissue by species and/or by organ type. In a similar fashion, these reagents can be used to screen tissue cultures for contamination. Additional non-limiting examples of such uses are further described herein.

[0464] The polynucleotides of the present invention are also useful as hybridization probes for differential identification of the tissue(s) or cell type(s) present in a biological sample. Similarly, polypeptides and antibodies directed to polypeptides of the present invention are useful to provide immunological probes for differential identification of the tissue(s) (e.g., immunohistochemistry assays) or cell type(s) (e.g., immunocytochemistry assays). In addition, for a number of disorders of the above tissues or cells, significantly higher or lower levels of gene expression of the polynucleotides/polypeptides of the present invention may be detected in certain tissues (e.g., tissues expressing polypeptides and/or polynucleotides of the present invention, for example, those disclosed in Table 1B, and/or cancerous and/or wounded tissues) or bodily fluids (e.g., semen, lymph, vaginal pool, serum, plasma, urine, synovial fluid or spinal fluid) taken from an individual having such a disorder, relative to a “standard” gene expression level, i.e., the expression level in healthy tissue from an individual not having the disorder.

[0465] Thus, the invention provides a diagnostic method of a disorder, which involves: (a) assaying gene expression level in cells or body fluid of an individual; (b) comparing the gene expression level with a standard gene expression level, whereby an increase or decrease in the assayed gene expression level compared to the standard expression level is indicative of a disorder.

[0466] In the very least, the polynucleotides of the present invention can be used as molecular weight markers on Southern gels, as diagnostic probes for the presence of a specific mRNA in a particular cell type, as a probe to “subtract-out” known sequences in the process of discovering novel polynucleotides, for selecting and making oligomers for attachment to a “gene chip” or other support, to raise anti-DNA antibodies using DNA immunization techniques, and as an antigen to elicit an immune response.

[0467] Uses of the Polypeptides

[0468] Each of the polypeptides identified herein can be used in numerous ways. The following description should be considered exemplary and utilizes known techniques.

[0469] Polypeptides and antibodies directed to polypeptides of the present invention are useful to provide immunological probes for differential identification of the tissue(s) (e.g., immunohistochemistry assays such as, for example, ABC immunoperoxidase (Hsu et al., J. Histochem. Cytochem. 29:577-580 (1981)) or cell type(s) (e.g., immunocytochemistry assays).

[0470] Antibodies can be used to assay levels of polypeptides encoded by polynucleotides of the invention in a biological sample using classical immunohistological methods known to those of skill in the art (e.g., see Jalkanen, et al., J. Cell. Biol. 101:976-985 (1985); Jalkanen, et al., J. Cell. Biol. 105:3087-3096 (1987)). Other antibody-based methods useful for detecting protein gene expression include immunoassays, such as the enzyme linked immunosorbent assay (ELISA) and the radioimmunoassay (RIA). Suitable antibody assay labels are known in the art and include enzyme labels, such as, glucose oxidase; radioisotopes, such as iodine (¹³¹I, ¹²⁵I, ¹²³I, ¹²¹I), carbon (¹⁴C), sulfur (³⁵S), tritium (³H), indium (^{115m}In, ^{113m}In, ¹¹²In, ¹¹¹In), and technetium (⁹⁹Tc, ^{99m}Tc), thallium (²⁰¹Ti), gallium (⁶⁸Ga, ⁶⁷Ga), palladium (¹⁰³Pd), molybdenum (⁹⁹Mo), xenon (¹³³Xe), fluorine (¹⁸F), ¹⁵³Sm, ¹⁷⁷Lu ¹⁵⁹Gd, ¹⁴⁹Pm, ¹⁴⁰La, ¹⁷⁵Yb, ¹⁶⁶Ho, ⁹⁰Y, ⁴⁷Sc, ¹⁸⁶Re, ¹⁸⁸Re, ¹⁴²Pr, ¹⁰⁵Rh, ⁹⁷Ru; luminescent labels, such as luminol; and fluorescent labels, such as fluorescein and rhodamine, and biotin.

[0471] In addition to assaying levels of polypeptide of the present invention in a biological sample, proteins can also be detected in vivo by imaging. Antibody labels or markers for in vivo imaging of protein include those detectable by X-radiography, NMR or ESR. For X-radiography, suitable labels include radioisotopes such as barium or cesium, which emit detectable radiation but are not overtly harmful to the subject. Suitable markers for NMR and ESR include those with a detectable characteristic spin, such as deuterium, which may be incorporated into the antibody by labeling of nutrients for the relevant hybridoma.

[0472] A protein-specific antibody or antibody fragment which has been labeled with an appropriate detectable imaging moiety, such as a radioisotope (for example, ¹³¹I, ¹¹²In, ^{99m}Tc, (¹³¹I, ¹²⁵I, ¹²³I, ¹²¹I), carbon (¹⁴C), sulfur (³⁵S), tritium (³H), indium (^{115m}In, ^{113m}In, ¹¹²In, ¹¹¹In), and technetium (⁹⁹Tc, ^{99m}Tc), thallium (²⁰¹Ti), gallium (⁶⁸Ga, ⁶⁷Ga), palladium (¹⁰³Pd), molybdenum (⁹⁹Mo), xenon (¹³³Xe), fluorine (¹⁸F, ¹⁵³Sm, ¹⁷⁷Lu, ¹⁵⁹Gd, ¹⁴⁹Pm, ¹⁴⁰La, ¹⁷⁵Yb, ¹⁶⁶Ho, ⁹⁰Y, ⁴⁷Sc, ¹⁸⁶Re, ¹⁸⁸Re, ¹⁴²Pr, ¹⁰⁵Rh, ⁹⁷Ru), a radio-opaque substance, or a material detectable by nuclear magnetic resonance, is introduced (for example, parenterally, subcutaneously or intraperitoneally) into the mammal to be examined for immune system disorder. It will be understood in the art that the size of the subject and the imaging system used will determine the quantity of imaging moiety needed to produce diagnostic images. In the case of a radioisotope moiety, for a human subject, the quantity of radioactivity injected will normally range from about 5 to 20 millicuries of ^{99m}Tc. The labeled antibody or antibody fragment will then preferentially accumulate at the location of cells which express the polypeptide encoded by a polynucleotide of the invention. In vivo tumor imaging is described in S. W. Burchiel et al., “Immunopharmacokinetics of Radiolabeled Antibodies and Their Fragments” (Chapter 13 in Tumor Imaging: The Radiochemical Detection of Cancer, S. W. Burchiel and B. A. Rhodes, eds., Masson Publishing Inc. (1982)).

[0473] In one embodiment, the invention provides a method for the specific delivery of compositions of the invention to cells by administering polypeptides of the invention (e.g., polypeptides encoded by polynucleotides of the invention and/or antibodies) that are associated with heterologous polypeptides or nucleic acids. In one example, the invention provides a method for delivering a therapeutic protein into the targeted cell. In another example, the invention provides a method for delivering a single stranded nucleic acid (e.g., antisense or ribozymes) or double stranded nucleic acid (e.g., DNA that can integrate into the cell's genome or replicate episomally and that can be transcribed) into the targeted cell.

[0474] In another embodiment, the invention provides a method for the specific destruction of cells (e.g., the destruction of tumor cells) by administering polypeptides of the invention in association with toxins or cytotoxic prodrugs.

[0475] By “toxin” is meant one or more compounds that bind and activate endogenous cytotoxic effector systems, radioisotopes, holotoxins, modified toxins, catalytic subunits of toxins, or any molecules or enzymes not normally present in or on the surface of a cell that under defined conditions cause the cell's death. Toxins that may be used according to the methods of the invention include, but are not limited to, radioisotopes known in the art, compounds such as, for example, antibodies (or complement fixing containing portions thereof) that bind an inherent or induced endogenous cytotoxic effector system, thymidine kinase, endonuclease, RNAse, alpha toxin, ricin, abrin, Pseudomonas exotoxin A, diphtheria toxin, saporin, momordin, gelonin, pokeweed antiviral protein, alpha-sarcin and cholera toxin. “Toxin” also includes a cytostatic or cytocidal agent, a therapeutic agent or a radioactive metal ion, e.g., alpha-emitters such as, for example, ²¹³Bi, or other radioisotopes such as, for example, ¹⁰³Pd, ¹³³Xe, ¹³¹I, ⁶⁸Ge, ⁵⁷Co, ⁶⁵Zn, ⁸⁵Sr, ³²P, ³⁵S, ⁹⁰Y, ¹⁵³Sm, ¹⁵³Gd, ¹⁶⁹Yb, ⁵¹Cr, ⁵⁴Mn, ⁷⁵Se, ¹¹³Sn, ⁹⁰Yttrium, ¹¹⁷Tin, ¹⁸⁶Rhenium, ¹⁶⁶Holmium, and ¹⁸⁸Rhenium; luminescent labels, such as luminol; and fluorescent labels, such as fluorescein and rhodamine, and biotin. In a specific embodiment, the invention provides a method for the specific destruction of cells (e.g., the destruction of tumor cells) by administering polypeptides of the invention or antibodies of the invention in association with the radioisotope ⁹⁰Y. In another specific embodiment, the invention provides a method for the specific destruction of cells (e.g., the destruction of tumor cells) by administering polypeptides of the invention or antibodies of the invention in association with the radioisotope ¹¹¹In. In a further specific embodiment, the invention provides a method for the specific destruction of cells (e.g., the destruction of tumor cells) by administering polypeptides of the invention or antibodies of the invention in association with the radioisotope ¹³¹I.

[0476] Techniques known in the art may be applied to label polypeptides of the invention (including antibodies). Such techniques include, but are not limited to, the use of bifunctional conjugating agents (see e.g., U.S. Pat. Nos. 5,756,065; 5,714,631; 5,696,239; 5,652,361; 5,505,931; 5,489,425; 5,435,990; 5,428,139; 5,342,604; 5,274,119; 4,994,560; and 5,808,003; the contents of each of which are hereby incorporated by reference in its entirety).

[0477] Thus, the invention provides a diagnostic method of a disorder, which involves (a) assaying the expression level of a polypeptide of the present invention in cells or body fluid of an individual; and (b) comparing the assayed polypeptide expression level with a standard polypeptide expression level, whereby an increase or decrease in the assayed polypeptide expression level compared to the standard expression level is indicative of a disorder. With respect to cancer, the presence of a relatively high amount of transcript in biopsied tissue from an individual may indicate a predisposition for the development of the disease, or may provide a means for detecting the disease prior to the appearance of actual clinical symptoms. A more definitive diagnosis of this type may allow health professionals to employ preventative measures or aggressive treatment earlier thereby preventing the development or further progression of the cancer.

[0478] Moreover, polypeptides of the present invention can be used to treat or prevent diseases or conditions such as, for example, neural disorders, immune system disorders, muscular disorders, reproductive disorders, gastrointestinal disorders, pulmonary disorders, cardiovascular disorders, renal disorders, proliferative disorders, and/or cancerous diseases and conditions. For example, patients can be administered a polypeptide of the present invention in an effort to replace absent or decreased levels of the polypeptide (e.g., insulin), to supplement absent or decreased levels of a different polypeptide (e.g., hemoglobin S for hemoglobin B, SOD, catalase, DNA repair proteins), to inhibit the activity of a polypeptide (e.g., an oncogene or tumor supressor), to activate the activity of a polypeptide (e.g., by binding to a receptor), to reduce the activity of a membrane bound receptor by competing with it for free ligand (e.g., soluble TNF receptors used in reducing inflammation), or to bring about a desired response (e.g., blood vessel growth inhibition, enhancement of the immune response to proliferative cells or tissues).

[0479] Similarly, antibodies directed to a polypeptide of the present invention can also be used to treat disease (as described supra, and elsewhere herein). For example, administration of an antibody directed to a polypeptide of the present invention can bind, and/or neutralize the polypeptide, and/or reduce overproduction of the polypeptide. Similarly, administration of an antibody can activate the polypeptide, such as by binding to a polypeptide bound to a membrane (receptor).

[0480] At the very least, the polypeptides of the present invention can be used as molecular weight markers on SDS-PAGE gels or on molecular sieve gel filtration columns using methods well known to those of skill in the art. Polypeptides can also be used to raise antibodies, which in turn are used to measure protein expression from a recombinant cell, as a way of assessing transformation of the host cell. Moreover, the polypeptides of the present invention can be used to test the biological activities described herein.

[0481] Diagnostic Assays

[0482] The compounds of the present invention are useful for diagnosis, treatment, prevention and/or prognosis of various disorders in mammals, preferably humans. Such disorders include, but are not limited to, those related to biological activities described in Table 1D and, also as described herein under the section heading “Biological Activities”.

[0483] For a number of disorders, substantially altered (increased or decreased) levels of gene expression can be detected in tissues, cells or bodily fluids (e.g., sera, plasma, urine, semen, synovial fluid or spinal fluid) taken from an individual having such a disorder, relative to a “standard” gene expression level, that is, the expression level in tissues or bodily fluids from an individual not having the disorder. Thus, the invention provides a diagnostic method useful during diagnosis of a disorder, which involves measuring the expression level of the gene encoding the polypeptide in tissues, cells or body fluid from an individual and comparing the measured gene expression level with a standard gene expression level, whereby an increase or decrease in the gene expression level(s) compared to the standard is indicative of a disorder. These diagnostic assays may be performed in vivo or in vitro, such as, for example, on blood samples, biopsy tissue or autopsy tissue.

[0484] The present invention is also useful as a prognostic indicator, whereby patients exhibiting enhanced or depressed gene expression will experience a worse clinical outcome relative to patients expressing the gene at a level nearer the standard level.

[0485] In certain embodiments, a polypeptide of the invention, or polynucleotides, antibodies, agonists, or antagonists corresponding to that polypeptide, may be used to diagnose and/or prognosticate diseases and/or disorders associated with the tissue(s) in which the polypeptide of the invention is expressed, including one, two, three, four, five, or more tissues disclosed in Table 1B.2, column 5 (Tissue Distribution Library Code).

[0486] By “assaying the expression level of the gene encoding the polypeptide” is intended qualitatively or quantitatively measuring or estimating the level of the polypeptide of the invention or the level of the mRNA encoding the polypeptide of the invention in a first biological sample either directly (e.g., by determining or estimating absolute protein level or mRNA level) or relatively (e.g., by comparing to the polypeptide level or mRNA level in a second biological sample). Preferably, the polypeptide expression level or mRNA level in the first biological sample is measured or estimated and compared to a standard polypeptide level or mRNA level, the standard being taken from a second biological sample obtained from an individual not having the disorder or being determined by averaging levels from a population of individuals not having the disorder. As will be appreciated in the art, once a standard polypeptide level or mRNA level is known, it can be used repeatedly as a standard for comparison.

[0487] By “biological sample” is intended any biological sample obtained from an individual, cell line, tissue culture, or other source containing polypeptides of the invention (including portions thereof) or mRNA. As indicated, biological samples include body fluids (such as sera, plasma, urine, synovial fluid and spinal fluid) and tissue sources found to express the full length or fragments thereof of a polypeptide or mRNA. Methods for obtaining tissue biopsies and body fluids from mammals are well known in the art. Where the biological sample is to include mRNA, a tissue biopsy is the preferred source.

[0488] Total cellular RNA can be isolated from a biological sample using any suitable technique such as the single-step guanidinium-thiocyanate-phenol-chloroform method described in Chomczynski and Sacchi, Anal. Biochem. 162:156-159 (1987). Levels of mRNA encoding the polypeptides of the invention are then assayed using any appropriate method. These include Northern blot analysis, S1 nuclease mapping, the polymerase chain reaction (PCR), reverse transcription in combination with the polymerase chain reaction (RT-PCR), and reverse transcription in combination with the ligase chain reaction (RT-LCR).

[0489] The present invention also relates to diagnostic assays such as quantitative and diagnostic assays for detecting levels of polypeptides of the invention, in a biological sample (e.g., cells and tissues), including determination of normal and abnormal levels of polypeptides. Thus, for instance, a diagnostic assay in accordance with the invention for detecting over-expression of polypeptides of the invention compared to normal control tissue samples may be used to detect the presence of tumors. Assay techniques that can be used to determine levels of a polypeptide, such as a polypeptide of the present invention in a sample derived from a host are well-known to those of skill in the art. Such assay methods include radioimmunoassays, competitive-binding assays, Western Blot analysis and ELISA assays. Assaying polypeptide levels in a biological sample can occur using any art-known method.

[0490] Assaying polypeptide levels in a biological sample can occur using antibody-based techniques. For example, polypeptide expression in tissues can be studied with classical immunohistological methods (Jalkanen et al., J. Cell. Biol. 101:976-985 (1985); Jalkanen, M., et al., J. Cell. Biol. 105:3087-3096 (1987)). Other antibody-based methods useful for detecting polypeptide gene expression include immunoassays, such as the enzyme linked immunosorbent assay (ELISA) and the radioimmunoassay (RIA). Suitable antibody assay labels are known in the art and include enzyme labels, such as, glucose oxidase, and radioisotopes, such as iodine (¹²⁵I, ¹²¹I), carbon (¹⁴C), sulfur (³⁵S), tritium (³H), indium (¹¹²In), and technetium (^{99m}Tc), and fluorescent labels, such as fluorescein and rhodamine, and biotin.

[0491] The tissue or cell type to be analyzed will generally include those which are known, or suspected, to express the gene of inteest (such as, for example, cancer). The protein isolation methods employed herein may, for example, be such as those described in Harlow and Lane (Harlow, E. and Lane, D., 1988, “Antibodies: A Laboratory Manual”, Cold Spring Harbor Laboratory Press, Cold Spring Harbor, N.Y.), which is incorporated herein by reference in its entirety. The isolated cells can be derived from cell culture or from a patient. The analysis of cells taken from culture may be a necessary step in the assessment of cells that could be used as part of a cell-based gene therapy technique or, alternatively, to test the effect of compounds on the expression of the gene.

[0492] For example, antibodies, or fragments of antibodies, such as those described herein, may be used to quantitatively or qualitatively detect the presence of gene products or conserved variants or peptide fragments thereof. This can be accomplished, for example, by immunofluorescence techniques employing a fluorescently labeled antibody coupled with light microscopic, flow cytometric, or fluorimetric detection.

[0493] In a preferred embodiment, antibodies, or fragments of antibodies directed to any one or all of the predicted epitope domains of the polypeptides of the invention (shown in column 7 of Table 1B.1) may be used to quantitatively or qualitatively detect the presence of gene products or conserved variants or peptide fragments thereof. This can be accomplished, for example, by immunofluorescence techniques employing a fluorescently labeled antibody coupled with light microscopic, flow cytometric, or fluorimetric detection.

[0494] In an additional preferred embodiment, antibodies, or fragments of antibodies directed to a conformational epitope of a polypeptide of the invention may be used to quantitatively or qualitatively detect the presence of gene products or conserved variants or peptide fragments thereof. This can be accomplished, for example, by immunofluorescence techniques employing a fluorescently labeled antibody coupled with light microscopic, flow cytometric, or fluorimetric detection.

[0495] The antibodies (or fragments thereof), and/or polypeptides of the present invention may, additionally, be employed histologically, as in immunofluorescence, immunoelectron microscopy or non-immunological assays, for in situ detection of gene products or conserved variants or peptide fragments thereof. In situ detection may be accomplished by removing a histological specimen from a patient, and applying thereto a labeled antibody or polypeptide of the present invention. The antibody (or fragment thereof) or polypeptide is preferably applied by overlaying the labeled antibody (or fragment) onto a biological sample. Through the use of such a procedure, it is possible to determine not only the presence of the gene product, or conserved variants or peptide fragments, or polypeptide binding, but also its distribution in the examined tissue. Using the present invention, those of ordinary skill will readily perceive that any of a wide variety of histological methods (such as staining procedures) can be modified in order to achieve such in situ detection.

[0496] Immunoassays and non-immunoassays for gene products or conserved variants or peptide fragments thereof will typically comprise incubating a sample, such as a biological fluid, a tissue extract, freshly harvested cells, or lysates of cells which have been incubated in cell culture, in the presence of a detectably labeled antibody capable of binding gene products or conserved variants or peptide fragments thereof, and detecting the bound antibody by any of a number of techniques well-known in the art.

[0497] The biological sample may be brought in contact with and immobilized onto a solid phase support or carrier such as nitrocellulose, or other solid support which is capable of immobilizing cells, cell particles or soluble proteins. The support may then be washed with suitable buffers followed by treatment with the detectably labeled antibody or detectable polypeptide of the invention. The solid phase support may then be washed with the buffer a second time to remove unbound antibody or polypeptide. Optionally the antibody is subsequently labeled. The amount of bound label on solid support may then be detected by conventional means.

[0498] By “solid phase support or carrier” is intended any support capable of binding an antigen or an antibody. Well-known supports or carriers include glass, polystyrene, polypropylene, polyethylene, dextran, nylon, amylases, natural and modified celluloses, polyacrylamides, gabbros, and magnetite. The nature of the carrier can be either soluble to some extent or insoluble for the purposes of the present invention. The support material may have virtually any possible structural configuration so long as the coupled molecule is capable of binding to an antigen or antibody. Thus, the support configuration may be spherical, as in a bead, or cylindrical, as in the inside surface of a test tube, or the external surface of a rod. Alternatively, the surface may be flat such as a sheet, test strip, etc. Preferred supports include polystyrene beads. Those skilled in the art will know many other suitable carriers for binding antibody or antigen, or will be able to ascertain the same by use of routine experimentation.

[0499] The binding activity of a given lot of antibody or antigen polypeptide may be determined according to well known methods. Those skilled in the art will be able to determine operative and optimal assay conditions for each determination by employing routine experimentation.

[0500] In addition to assaying polypeptide levels or polynucleotide levels in a biological sample obtained from an individual, polypeptide or polynucleotide can also be detected in vivo by imaging. For example, in one embodiment of the invention, polypeptides and/or antibodies of the invention are used to image diseased cells, such as neoplasms. In another embodiment, polynucleotides of the invention (e.g., polynucleotides complementary to all or a portion of an mRNA) and/or antibodies (e.g., antibodies directed to any one or a combination of the epitopes of a polypeptide of the invention, antibodies directed to a conformational epitope of a polypeptide of the invention, or antibodies directed to the full length polypeptide expressed on the cell surface of a mammalian cell) are used to image diseased or neoplastic cells.

[0501] Antibody labels or markers for in vivo imaging of polypeptides of the invention include those detectable by X-radiography, NMR, MRI, CAT-scans or ESR. For X-radiography, suitable labels include radioisotopes such as barium or cesium, which emit detectable radiation but are not overtly harmful to the subject. Suitable markers for NMR and ESR include those with a detectable characteristic spin, such as deuterium, which may be incorporated into the antibody by labeling of nutrients for the relevant hybridoma. Where in vivo imaging is used to detect enhanced levels of polypeptides for diagnosis in humans, it may be preferable to use human antibodies or “humanized” chimeric monoclonal antibodies. Such antibodies can be produced using techniques described herein or otherwise known in the art. For example methods for producing chimeric antibodies are known in the art. See, for review, Morrison, Science 229:1202 (1985); Oi et al., BioTechniques 4:214 (1986); Cabilly et al., U.S. Pat. No. 4,816,567; Taniguchi et al., EP 171496; Morrison et al., EP 173494; Neuberger et al., WO 8601533; Robinson et al., WO 8702671; Boulianne et al., Nature 312:643 (1984); Neuberger et al., Nature 314:268 (1985).

[0502] Additionally, any polypeptides of the invention whose presence can be detected, can be administered. For example, polypeptides of the invention labeled with a radio-opaque or other appropriate compound can be administered and visualized in vivo, as discussed, above for labeled antibodies. Further, such polypeptides can be utilized for in vitro diagnostic procedures.

[0503] A polypeptide-specific antibody or antibody fragment which has been labeled with an appropriate detectable imaging moiety, such as a radioisotope (for example, ¹³¹I, ¹¹²In, ^{99m}Tc), a radio-opaque substance, or a material detectable by nuclear magnetic resonance, is introduced (for example, parenterally, subcutaneously or intraperitoneally) into the mammal to be examined for a disorder. It will be understood in the art that the size of the subject and the imaging system used will determine the quantity of imaging moiety needed to produce diagnostic images. In the case of a radioisotope moiety, for a human subject, the quantity of radioactivity injected will normally range from about 5 to 20 millicuries of ^{99m}Tc. The labeled antibody or antibody fragment will then preferentially accumulate at the location of cells which contain the antigenic protein. In vivo tumor imaging is described in S. W. Burchiel et al., “Immunopharmacokinetics of Radiolabeled Antibodies and Their Fragments” (Chapter 13 in Tumor Imaging: The Radiochemical Detection of Cancer, S. W. Burchiel and B. A. Rhodes, eds., Masson Publishing Inc. (1982)).

[0504] With respect to antibodies, one of the ways in which an antibody of the present invention can be detectably labeled is by linking the same to a reporter enzyme and using the linked product in an enzyme immunoassay (EIA) (Voller, A., “The Enzyme Linked Immunosorbent Assay (ELISA)”, 1978, Diagnostic Horizons 2:1-7, Microbiological Associates Quarterly Publication, Walkersville, Md.); Voller et al., J. Clin. Pathol. 31:507-520 (1978); Butler, J. E., Meth. Enzymol. 73:482-523 (1981); Maggio, E. (ed.), 1980, Enzyme Immunoassay, CRC Press, Boca Raton, Fla.; Ishikawa, E. et al., (eds.), 1981, Enzyme Immunoassay, Kgaku Shoin, Tokyo). The reporter enzyme which is bound to the antibody will react with an appropriate substrate, preferably a chromogenic substrate, in such a manner as to produce a chemical moiety which can be detected, for example, by spectrophotometric, fluorimetric or by visual means. Reporter enzymes which can be used to detectably label the antibody include, but are not limited to, malate dehydrogenase, staphylococcal nuclease, delta-5-steroid isomerase, yeast alcohol dehydrogenase, alpha-glycerophosphate, dehydrogenase, triose phosphate isomerase, horseradish peroxidase, alkaline phosphatase, asparaginase, glucose oxidase, beta-galactosidase, ribonuclease, urease, catalase, glucose-6-phosphate dehydrogenase, glucoamylase and acetylcholinesterase. Additionally, the detection can be accomplished by colorimetric methods which employ a chromogenic substrate for the reporter enzyme. Detection may also be accomplished by visual comparison of the extent of enzymatic reaction of a substrate in comparison with similarly prepared standards.

[0505] Detection may also be accomplished using any of a variety of other immunoassays. For example, by radioactively labeling the antibodies or antibody fragments, it is possible to detect polypeptides through the use of a radioimmunoassay (RIA) (see, for example, Weintraub, B., Principles of Radioimmunoassays, Seventh Training Course on Radioligand Assay Techniques, The Endocrine Society, March, 1986, which is incorporated by reference herein). The radioactive isotope can be detected by means including, but not limited to, a gamma counter, a scintillation counter, or autoradiography.

[0506] It is also possible to label the antibody with a fluorescent compound. When the fluorescently labeled antibody is exposed to light of the proper wave length, its presence can then be detected due to fluorescence. Among the most commonly used fluorescent labeling compounds are fluorescein isothiocyanate, rhodamine, phycoerythrin, phycocyanin, allophycocyanin, ophthaldehyde and fluorescamine.

[0507] The antibody can also be detectably labeled using fluorescence emitting metals such as ¹⁵²Eu, or others of the lanthanide series. These metals can be attached to the antibody using such metal chelating groups as diethylenetriaminepentacetic acid (DTPA) or ethylenediaminetetraacetic acid (EDTA).

[0508] The antibody also can be detectably labeled by coupling it to a chemiluminescent compound. The presence of the chemiluminescent-tagged antibody is then determined by detecting the presence of luminescence that arises during the course of a chemical reaction. Examples of particularly useful chemiluminescent labeling compounds are luminol, isoluminol, theromatic acridinium ester, imidazole, acridinium salt and oxalate ester.

[0509] Likewise, a bioluminescent compound may be used to label the antibody of the present invention. Bioluminescence is a type of chemiluminescence found in biological systems in, which a catalytic protein increases the efficiency of the chemiluminescent reaction. The presence of a bioluminescent protein is determined by detecting the presence of luminescence. Important bioluminescent compounds for purposes of labeling are luciferin, luciferase and aequorin.

[0510] Methods for Detecting Diseases

[0511] In general, a disease may be detected in a patient based on the presence of one or more proteins of the invention and/or polynucleotides encoding such proteins in a biological sample (for example, blood, sera, urine, and/or tumor biopsies) obtained from the patient. In other words, such proteins may be used as markers to indicate the presence or absence of a disease or disorder, including cancer and/or as described elsewhere herein. In addition, such proteins may be useful for the detection of other diseases and cancers. The binding agents provided herein generally permit detection of the level of antigen that binds to the agent in the biological sample. Polynucleotide primers and probes may be used to detect the level of mRNA encoding polypeptides of the invention, which is also indicative of the presence or absence of a disease or disorder, including cancer. In general, polypeptides of the invention should be present at a level that is at least three fold higher in diseased tissue than in normal tissue.

[0512] There are a variety of assay formats known to those of ordinary skill in the art for using a binding agent to detect polypeptide markers in a sample. See, e.g., Harlow and Lane, supra. In general, the presence or absence of a disease in a patient may be determined by (a) contacting a biological sample obtained from a patient with a binding agent; (b) detecting in the sample a level of polypeptide that binds to the binding agent; and (c) comparing the level of polypeptide with a predetermined cut-off value.

[0513] In a preferred embodiment, the assay involves the use of a binding agent(s) immobilized on a solid support to bind to and remove the polypeptide of the invention from the remainder of the sample. The bound polypeptide may then be detected using a detection reagent that contains a reporter group and specifically binds to the binding agent/polypeptide complex. Such detection reagents may comprise, for example, a binding agent that specifically binds to the polypeptide or an antibody or other agent that specifically binds to the binding agent, such as an anti-immunoglobulin, protein G, protein A or a lectin. Alternatively, a competitive assay may be utilized, in which a polypeptide is labeled with a reporter group and allowed to bind to the immobilized binding agent after incubation of the binding agent with the sample. The extent to which components of the sample inhibit the binding of the labeled polypeptide to the binding agent is indicative of the reactivity of the sample with the immobilized binding agent. Suitable polypeptides for use within such assays include polypeptides of the invention and portions thereof, or antibodies, to which the binding agent binds, as described above.

[0514] The solid support may be any material known to those of skill in the art to which polypeptides of the invention may be attached. For example, the solid support may be a test well in a microtiter plate or a nitrocellulose or other suitable membrane. Alternatively, the support may be a bead or disc, such as glass fiberglass, latex or a plastic material such as polystyrene or polyvinylchloride. The support may also be a magnetic particle or a fiber optic sensor, such as those disclosed, for example, in U.S. Pat. No. 5,359,681. The binding agent may be immobilized on the solid support using a variety of techniques known to those of skill in the art, which are amply described in the patent and scientific literature. In the context of the present invention, the term “immobilization” refers to both noncovalent association, such as adsorption, and covalent attachment (which may be a direct linkage between the agent and functional groups on the support or may be a linkage by way of a cross-linking agent). Immobilization by adsorption to a well in a microtiter plate or to a membrane is preferred. In such cases, adsorption may be achieved by contacting the binding agent, in a suitable buffer, with the solid support for the suitable amount of time. The contact time varies with temperature, but is typically between about 1 hour and about 1 day. In general, contacting a well of plastic microtiter plate (such as polystyrene or polyvinylchloride) with an amount of binding agent ranging from about 10 ng to about 10 ug, and preferably about 100 ng to about 1 ug, is sufficient to immobilize an adequate amount of binding agent.

[0515] Covalent attachment of binding agent to a solid support may generally be achieved by first reacting the support with a bifunctional reagent that will react with both the support and a functional group, such as a hydroxyl or amino group, on the binding agent. For example, the binding agent may be covalently attached to supports having an appropriate polymer coating using benzoquinone or by condensation of an aldehyde group on the support with an amine and an active hydrogen on the binding partner (see, e.g., Pierce Immunotechnology Catalog and Handbook, 1991, at A12-A13).

[0516] Gene Therapy Methods

[0517] Also encompassed by the invention are gene therapy methods for treating or preventing disorders, diseases and conditions. The gene therapy methods relate to the introduction of nucleic acid (DNA, RNA and antisense DNA or RNA) sequences into an animal to achieve expression of the polypeptide of the present invention. This method requires a polynucleotide which codes for a polypeptide of the present invention operatively linked to a promoter and any other genetic elements necessary for the expression of the polypeptide by the target tissue. Such gene therapy and delivery techniques are known in the art, see, for example, WO90/11092, which is herein incorporated by reference.

[0518] Thus, for example, cells from a patient may be engineered with a polynucleotide (DNA or RNA) comprising a promoter operably linked to a polynucleotide of the present invention ex vivo, with the engineered cells then being provided to a patient to be treated with the polypeptide of the present invention. Such methods are well-known in the art. For example, see Belldegrun, A., et al., J. Natl. Cancer Inst. 85: 207-216 (1993); Ferrantini, M. et al., Cancer Research 53: 1107-1112 (1993); Ferrantini, M. et al., J. Immunology 153: 4604-4615 (1994); Kaido, T., et al., Int. J. Cancer 60: 221-229 (1995); Ogura, H., et al., Cancer Research 50: 5102-5106 (1990); Santodonato, L., et al., Human Gene Therapy 7:1-10 (1996); Santodonato, L., et al., Gene Therapy 4:1246-1255 (1997); and Zhang, J.-F. et al., Cancer Gene Therapy 3: 31-38 (1996)), which are herein incorporated by reference. In one embodiment, the cells which are engineered are arterial cells. The arterial cells may be reintroduced into the patient through direct injection to the artery, the tissues surrounding the artery, or through catheter injection.

[0519] As discussed in more detail below, the polynucleotide constructs can be delivered by any method that delivers injectable materials to the cells of an animal, such as, injection into the interstitial space of tissues (heart, muscle, skin, lung, liver, and the like). The polynucleotide constructs may be delivered in a pharmaceutically acceptable liquid or aqueous carrier.

[0520] In one embodiment, the polynucleotide of the present invention is delivered as a naked polynucleotide. The term “naked” polynucleotide, DNA or RNA refers to sequences that are free from any delivery vehicle that acts to assist, promote or facilitate entry into the cell, including viral sequences, viral particles, liposome formulations, lipofectin or precipitating agents and the like. However, the polynucleotide of the present invention can also be delivered in liposome formulations and lipofectin formulations and the like can be prepared by methods well known to those skilled in the art. Such methods are described, for example, in U.S. Pat. Nos. 5,593,972, 5,589,466, and 5,580,859, which are herein incorporated by reference.

[0521] The polynucleotide vector constructs used in the gene therapy method are preferably constructs that will not integrate into the host genome nor will they contain sequences that allow for replication. Appropriate vectors include pWLNEO, pSV2CAT, pOG44, pXT1 and pSG available from Stratagene; pSVK3, pBPV, pMSG and pSVL available from Pharmacia; and pEF1/V5, pcDNA3.1, and pRc/CMV2 available from Invitrogen. Other suitable vectors will be readily apparent to the skilled artisan.

[0522] Any strong promoter known to those skilled in the art can be used for driving the expression of the polynucleotide sequence. Suitable promoters include adenoviral promoters, such as the adenoviral major late promoter; or heterologous promoters, such as the cytomegalovirus (CMV) promoter; the respiratory syncytial virus (RSV) promoter; inducible promoters, such as the MMT promoter, the metallothionein promoter; heat shock promoters; the albumin promoter; the ApoAI promoter; human globin promoters; viral thymidine kinase promoters, such as the Herpes Simplex thymidine kinase promoter; retroviral LTRs; the b-actin promoter; and human growth hormone promoters. The promoter also may be the native promoter for the polynucleotide of the present invention.

[0523] Unlike other gene therapy techniques, one major advantage of introducing naked nucleic acid sequences into target cells is the transitory nature of the polynucleotide synthesis in the cells. Studies have shown that non-replicating DNA sequences can be introduced into cells to provide production of the desired polypeptide for periods of up to six months.

[0524] The polynucleotide construct can be delivered to the interstitial space of tissues within the an animal, including of muscle, skin, brain, lung, liver, spleen, bone marrow, thymus, heart, lymph, blood, bone, cartilage, pancreas, kidney, gall bladder, stomach, intestine, testis, ovary, uterus, rectum, nervous system, eye, gland, and connective tissue. Interstitial space of the tissues comprises the intercellular, fluid, mucopolysaccharide matrix among the reticular fibers of organ tissues, elastic fibers in the walls of vessels or chambers, collagen fibers of fibrous tissues, or that same matrix within connective tissue ensheathing muscle cells or in the lacunae of bone. It is similarly the space occupied by the plasma of the circulation and the lymph fluid of the lymphatic channels. Delivery to the interstitial space of muscle tissue is preferred for the reasons discussed below. They may be conveniently delivered by injection into the tissues comprising these cells. They are preferably delivered to and expressed in persistent, non-dividing cells which are differentiated, although delivery and expression may be achieved in non-differentiated or less completely differentiated cells, such as, for example, stem cells of blood or skin fibroblasts. In vivo muscle cells are particularly competent in their ability to take up and express polynucleotides.

[0525] For the naked nucleic acid sequence injection, an effective dosage amount of DNA or RNA will be in the range of from about 0.05 mg/kg body weight to about 50 mg/kg body weight. Preferably the dosage will be from about 0.005 mg/kg to about 20 mg/kg and more preferably from about 0.05 mg/kg to about 5 mg/kg. Of course, as the artisan of ordinary skill will appreciate, this dosage will vary according to the tissue site of injection. The appropriate and effective dosage of nucleic acid sequence can readily be determined by those of ordinary skill in the art and may depend on the condition being treated and the route of administration.

[0526] The preferred route of administration is by the parenteral route of injection into the interstitial space of tissues. However, other parenteral routes may also be used, such as, inhalation of an aerosol formulation particularly for delivery to lungs or bronchial tissues, throat or mucous membranes of the nose. In addition, naked DNA constructs can be delivered to arteries during angioplasty by the catheter used in the procedure.

[0527] The naked polynucleotides are delivered by any method known in the art, including, but not limited to, direct needle injection at the delivery site, intravenous injection, topical administration, catheter infusion, and so-called “gene guns”. These delivery methods are known in the art.

[0528] The constructs may also be delivered with delivery vehicles such as viral sequences, viral particles, liposome formulations, lipofectin, precipitating agents, etc. Such methods of delivery are known in the art.

[0529] In certain embodiments, the polynucleotide constructs are complexed in a liposome preparation. Liposomal preparations for use in the instant invention include cationic (positively charged), anionic (negatively charged) and neutral preparations. However, cationic liposomes are particularly preferred because a tight charge complex can be formed between the cationic liposome and the polyanionic nucleic acid. Cationic liposomes have been shown to mediate intracellular delivery of plasmid DNA (Feigner et al., Proc. Natl. Acad. Sci. USA (1987) 84:7413-7416, which is herein incorporated by reference); mRNA (Malone et al., Proc. Natl. Acad. Sci. USA (1989) 86:6077-6081, which is herein incorporated by reference); and purified transcription factors (Debs et al., J. Biol. Chem. (1990) 265:10189-10192, which is herein incorporated by reference), in functional form.

[0530] Cationic liposomes are readily available. For example, N[1-2,3-dioleyloxy)propyl]-N,N,N-triethylammonium (DOTMA) liposomes are particularly useful and are available under the trademark Lipofectin, from GIBCO BRL, Grand Island, N.Y. (See, also, Felgner et al., Proc. Natl Acad. Sci. USA (1987) 84:7413-7416, which is herein incorporated by reference). Other commercially available liposomes include transfectace (DDAB/DOPE) and DOTAP/DOPE (Boehringer).

[0531] Other cationic liposomes can be prepared from readily available materials using techniques well known in the art. See, e.g. PCT Publication No. WO 90/11092 (which is herein incorporated by reference) for a description of the synthesis of DOTAP (1,2-bis(oleoyloxy)-3-(trimethylammonio)propane) liposomes. Preparation of DOTMA liposomes is explained in the literature, see, e.g., P. Felgner et al., Proc. Natl. Acad. Sci. USA 84:7413-7417, which is herein incorporated by reference. Similar methods can be used to prepare liposomes from other cationic lipid materials.

[0532] Similarly, anionic and neutral liposomes are readily available, such as from Avanti Polar Lipids (Birmingham, Ala.), or can be easily prepared using readily available materials. Such materials include phosphatidyl, choline, cholesterol, phosphatidyl ethanolamine, dioleoylphosphatidyl choline (DOPC), dioleoylphosphatidyl glycerol (DOPG), dioleoylphoshatidyl ethanolamine (DOPE), among others. These materials can also be mixed with the DOTMA and DOTAP starting materials in appropriate ratios. Methods for making liposomes using these materials are well known in the art.

[0533] For example, commercially dioleoylphosphatidyl choline (DOPC), dioleoylphosphatidyl glycerol (DOPG), and dioleoylphosphatidyl ethanolamine (DOPE) can be used in various combinations to make conventional liposomes, with or without the addition of cholesterol. Thus, for example, DOPG/DOPC vesicles can be prepared by drying 50 mg each of DOPG and DOPC under a stream of nitrogen gas into a sonication vial. The sample is placed under a vacuum pump overnight and is hydrated the following day with deionized water. The sample is then sonicated for 2 hours in a capped vial, using a Heat Systems model 350 sonicator equipped with an inverted cup (bath type) probe at the maximum setting while the bath is circulated at 15 EC. Alternatively, negatively charged vesicles can be prepared without sonication to produce multilamellar vesicles or by extrusion through nucleopore membranes to produce unilamellar vesicles of discrete size. Other methods are known and available to those of skill in the art.

[0534] The liposomes can comprise multilamellar vesicles (MLVs), small unilamellar vesicles (SUVs), or large unilamellar vesicles (LUVs), with SUVs being preferred. The various liposome-nucleic acid complexes are prepared using methods well known in the art. See, e.g., Straubinger et al., Methods of Immunology (1983), 101:512-527, which is herein incorporated by reference. For example, MLVs containing nucleic acid can be prepared by depositing a thin film of phospholipid on the walls of a glass tube and subsequently hydrating with a solution of the material to be encapsulated. SUVs are prepared by extended sonication of MLVs to produce a homogeneous population of unilamellar liposomes. The material to be entrapped is added to a suspension of preformed MLVs and then sonicated. When using liposomes containing cationic lipids, the dried lipid film is resuspended in an appropriate solution such as sterile water or an isotonic buffer solution such as 10 mM Tris/NaCl, sonicated, and then the preformed liposomes are mixed directly with the DNA. The liposome and DNA form a very stable complex due to binding of the positively charged liposomes to the cationic DNA. SUvs find use with small nucleic acid fragments. LUVs are prepared by a number of methods, well known in the art. Commonly used methods include Ca2+-EDTA chelation (Papahadjopoulos et al., Biochim. Biophys. Acta (1975) 394:483; Wilson et al., Cell 17:77 (1979)); ether injection (Deamer, D. and Bangham, A., Biochim. Biophys. Acta 443:629 (1976); Ostro et al., Biochem. Biophys. Res. Commun. 76:836 (1977); Fraley et al., Proc. Natl. Acad. Sci. USA 76:3348 (1979)); detergent dialysis (Enoch, H. and Strittmatter, P., Proc. Natl. Acad. Sci. USA 76:145 (1979)); and reverse-phase evaporation (REV) (Fraley et al., J. Biol. Chem. 255:10431 (1980); Szoka, F. and Papahadjopoulos, D., Proc. Natl. Acad. Sci. USA 75:145 (1978); Schaefer-Ridder et al., Science 215:166 (1982)), which are herein incorporated by reference.

[0535] Generally, the ratio of DNA to liposomes will be from about 10:1 to about 1:10. Preferably, the ration will be from about 5:1 to about 1:5. More preferably, the ration will be about 3:1 to about 1:3. Still more preferably, the ratio will be about 1:1.

[0536] U.S. Pat. No. 5,676,954 (which is herein incorporated by reference) reports on the injection of genetic material, complexed with cationic liposomes carriers, into mice. U.S. Pat. Nos. 4,897,355, 4,946,787, 5,049,386, 5,459,127, 5,589,466, 5,693,622, 5,580,859, 5,703,055, and international publication no. WO 94/9469 (which are herein incorporated by reference) provide cationic lipids for use in transfecting DNA into cells and mammals. U.S. Pat. Nos. 5,589,466, 5,693,622, 5,580,859, 5,703,055, and international publication no. WO 94/9469 provide methods for delivering DNA-cationic lipid complexes to mammals.

[0537] In certain embodiments, cells are engineered, ex vivo or in vivo, using a retroviral particle containing RNA which comprises a sequence encoding a polypeptide of the present invention. Retroviruses from which the retroviral plasmid vectors may be derived include, but are not limited to, Moloney Murine Leukemia Virus, spleen necrosis virus, Rous sarcoma Virus, Harvey Sarcoma Virus, avian leukosis virus, gibbon ape leukemia virus, human immunodeficiency virus, Myeloproliferative Sarcoma Virus, and mammary tumor virus.

[0538] The retroviral plasmid vector is employed to transduce packaging cell lines to form producer cell lines. Examples of packaging cells which may be transfected include, but are not limited to, the PE501, PA317, R-2, R-AM, PA12, T19-14X, VT-19-17-H2, RCRE, RCRIP, GP+E-86, GP+envAm12, and DAN cell lines as described in Miller, Human Gene Therapy 1:5-14 (1990), which is incorporated herein by reference in its entirety. The vector may transduce the packaging cells through any means known in the art. Such means include, but are not limited to, electroporation, the use of liposomes, and CaPO₄ precipitation. In one alternative, the retroviral plasmid vector may be encapsulated into a liposome, or coupled to a lipid, and then administered to a host.

[0539] The producer cell line generates infectious retroviral vector particles which include polynucleotide encoding a polypeptide of the present invention. Such retroviral vector particles then may be employed, to transduce eukaryotic cells, either in vitro or in vivo. The transduced eukaryotic cells will express a polypeptide of the present invention.

[0540] In certain other embodiments, cells are engineered, ex vivo or in vivo, with polynucleotide contained in an adenovirus vector. Adenovirus can be manipulated such that it encodes and expresses a polypeptide of the present invention, and at the same time is inactivated in terms of its ability to replicate in a normal lytic viral life cycle. Adenovirus expression is achieved without integration of the viral DNA into the host cell chromosome, thereby alleviating concerns about insertional mutagenesis. Furthermore, adenoviruses have been used as live enteric vaccines for many years with an excellent safety profile (Schwartz et al. Am. Rev. Respir. Dis. 109:233-238 (1974)). Finally, adenovirus mediated gene transfer has been demonstrated in a number of instances including transfer of alpha-1-antitrypsin and CFTR to the lungs of cotton rats (Rosenfeld, M. A. et al. (1991) Science 252:431-434; Rosenfeld et al., (1992) Cell 68:143-155). Furthermore, extensive studies to attempt to establish adenovirus as a causative agent in human cancer were uniformly negative (Green, M. et al. (1979) Proc. Natl. Acad. Sci. USA 76:6606).

[0541] Suitable adenoviral vectors useful in the present invention are described, for example, in Kozarsky and Wilson, Curr. Opin. Genet. Devel. 3:499-503 (1993); Rosenfeld et al., Cell 68:143-155 (1992); Engelhardt et al., Human Genet. Ther. 4:759-769 (1993); Yang et al., Nature Genet. 7:362-369 (1994); Wilson et al., Nature 365:691-692 (1993); and U.S. Pat. No. 5,652,224, which are herein incorporated by reference. For example, the adenovirus vector Ad2 is useful and can be grown in human 293 cells. These cells contain the E1 region of adenovirus and constitutively express E1a and E1b, which complement the defective adenoviruses by providing the products of the genes deleted from the vector. In addition to Ad2, other varieties of adenovirus (e.g., Ad3, Ad5, and Ad7) are also useful in the present invention.

[0542] Preferably, the adenoviruses used in the present invention are replication deficient. Replication deficient adenoviruses require the aid of a helper virus and/or packaging cell line to form infectious particles. The resulting virus is capable of infecting cells and can express a polynucleotide of interest which is operably linked to a promoter, but cannot replicate in most cells. Replication deficient adenoviruses may be deleted in one or more of all or a portion of the following genes: E1a, E1b, E3, E4, E2a, or L1 through L5.

[0543] In certain other embodiments, the cells are engineered, ex vivo or in vivo, using an adeno-associated virus (AAV). AAVs are naturally occurring defective viruses that require helper viruses to produce infectious particles (Muzyczka, N., Curr. Topics in Microbiol. Immunol. 158:97 (1992)). It is also one of the few viruses that may integrate its DNA into non-dividing cells. Vectors containing as little as 300 base pairs of AAV can be packaged and can integrate, but space for exogenous DNA is limited to about 4.5 kb. Methods for producing and using such AAVs are known in the art. See, for example, U.S. Pat. Nos. 5,139,941, 5,173,414, 5,354,678, 5,436,146, 5,474,935, 5,478,745, and 5,589,377.

[0544] For example, an appropriate AAV vector for use in the present invention will include all the sequences necessary for DNA replication, encapsidation, and host-cell integration. The polynucleotide construct is inserted into the AAV vector using standard cloning methods, such as those found in Sambrook et al., Molecular Cloning: A Laboratory Manual, Cold Spring Harbor Press (1989). The recombinant AAV vector is then transfected into packaging cells which are infected with a helper virus, using any standard technique, including lipofection, electroporation, calcium phosphate precipitation, etc. Appropriate helper viruses include adenoviruses, cytomegaloviruses, vaccinia viruses, or herpes viruses. Once the packaging cells are transfected and infected, they will produce infectious AAV viral particles which contain the polynucleotide construct. These viral particles are then used to transduce eukaryotic cells, either ex vivo or in vivo. The transduced cells will contain the polynucleotide construct integrated into its genome, and will express a polypeptide of the invention.

[0545] Another method of gene therapy involves operably associating heterologous control regions and endogenous polynucleotide sequences (e.g. encoding a polypeptide of the present invention) via homologous recombination (see, e.g., U.S. Pat. No. 5,641,670, issued Jun. 24, 1997; International Publication No. WO 96/29411, published Sep. 26, 1996; International Publication No. WO 94/12650, published Aug. 4, 1994; Koller et al., Proc. Natl. Acad. Sci. USA 86:8932-8935 (1989); and Zijlstra et al., Nature 342:435-438 (1989), which are herein encorporated by reference. This method involves the activation of a gene which is present in the target cells, but which is not normally expressed in the cells, or is expressed at a lower level than desired.

[0546] Polynucleotide constructs are made, using standard techniques known in the art, which contain the promoter with targeting sequences flanking the promoter. Suitable promoters are described herein. The targeting sequence is sufficiently complementary to an endogenous sequence to permit homologous recombination of the promoter-targeting sequence with the endogenous sequence. The targeting sequence will be sufficiently near the 5′ end of the desired endogenous polynucleotide sequence so the promoter will be operably linked to the endogenous sequence upon homologous recombination.

[0547] The promoter and the targeting sequences can be amplified using PCR. Preferably, the amplified promoter contains distinct restriction enzyme sites on the 5′ and 3′ ends. Preferably, the 3′ end of the first targeting sequence contains the same restriction enzyme site as the 5′ end of the amplified promoter and the 5′ end of the second targeting sequence contains the same restriction site as the 3′ end of the amplified promoter. The amplified promoter and targeting sequences are digested and ligated together.

[0548] The promoter-targeting sequence construct is delivered to the cells, either as naked polynucleotide, or in conjunction with transfection-facilitating agents, such as liposomes, viral sequences, viral particles, whole viruses, lipofection, precipitating agents, etc., described in more detail above. The P promoter-targeting sequence can be delivered by any method, included direct needle injection, intravenous injection, topical administration, catheter infusion, particle accelerators, etc. The methods are described in more detail below.

[0549] The promoter-targeting sequence construct is taken up by cells. Homologous recombination between the construct and the endogenous sequence takes place, such that an endogenous sequence is placed under the control of the promoter. The promoter then drives the expression of the endogenous sequence.

[0550] The polynucleotide encoding a polypeptide of the present invention may contain a secretory signal sequence that facilitates secretion of the protein. Typically, the signal sequence is positioned in the coding region of the polynucleotide to be expressed towards or at the 5′ end of the coding region. The signal sequence may be homologous or heterologous to the polynucleotide of interest and may be homologous or heterologous to the cells to be transfected. Additionally, the signal sequence may be chemically synthesized using methods known in the art.

[0551] Any mode of administration of any of the above-described polynucleotides constructs can be used so long as the mode results in the expression of one or more molecules in an amount sufficient to provide a therapeutic effect. This includes direct needle injection, systemic injection, catheter infusion, biolistic injectors, particle accelerators (i.e., “gene guns”), gelfoam sponge depots, other commercially available depot materials, osmotic pumps (e.g., Alza minipumps), oral or suppositorial solid (tablet or pill) pharmaceutical formulations, and decanting or topical applications during surgery. For example, direct injection of naked calcium phosphate-precipitated plasmid into rat liver and rat spleen or a protein-coated plasmid into the portal vein has resulted in gene expression of the foreign gene in the rat livers (Kaneda et al., Science 243:375 (1989)).

[0552] A preferred method of local administration is by direct injection. Preferably, a recombinant molecule of the present invention complexed with a delivery vehicle is administered by direct injection into or locally within the area of arteries. Administration of a composition locally within the area of arteries refers to injecting the composition centimeters and preferably, millimeters within arteries.

[0553] Another method of local administration is to contact a polynucleotide construct of the present invention in or around a surgical wound. For example, a patient can undergo surgery and the polynucleotide construct can be coated on the surface of tissue inside the wound or the construct can be injected into areas of tissue inside the wound.

[0554] Therapeutic compositions useful in systemic administration, include recombinant molecules of the present invention complexed to a targeted delivery vehicle of the present invention. Suitable delivery vehicles for use with systemic administration comprise liposomes comprising ligands for targeting the vehicle to a particular site. In specific embodiments, suitable delivery vehicles for use with systemic administration comprise liposomes comprising polypeptides of the invention for targeting the vehicle to a particular site.

[0555] Preferred methods of systemic administration, include intravenous injection, aerosol, oral and percutaneous (topical) delivery. Intravenous injections can be performed using methods standard in the art. Aerosol delivery can also be performed using methods standard in the art (see, for example, Stribling et al., Proc. Natl. Acad. Sci. USA 189:11277-11281, 1992, which is incorporated herein by reference). Oral delivery can be performed by complexing a polynucleotide construct of the present invention to a carrier capable of withstanding degradation by digestive enzymes in the gut of an animal. Examples of such carriers, include plastic capsules or tablets, such as those known in the art. Topical delivery can be performed by mixing a polynucleotide construct of the present invention with a lipophilic reagent (e.g., DMSO) that is capable of passing into the skin.

[0556] Determining an effective amount of substance to be delivered can depend upon a number of factors including, for example, the chemical structure and biological activity of the substance, the age and weight of the animal, the precise condition requiring treatment and its severity, and the route of administration. The frequency of treatments depends upon a number of factors, such as the amount of polynucleotide constructs administered per dose, as well as the health and history of the subject. The precise amount, number of doses, and timing of doses will be determined by the attending physician or veterinarian.

[0557] Therapeutic compositions of the present invention can be administered to any animal, preferably to mammals and birds. Preferred mammals include humans, dogs, cats, mice, rats, rabbits sheep, cattle, horses and pigs, with humans being particularly preferred.

[0558] Biological Activities

[0559] Polynucleotides or polypeptides, or agonists or antagonists of the present invention, can be used in assays to test for one or more biological activities. If these polynucleotides or polypeptides, or agonists or antagonists of the present invention, do exhibit activity in a particular assay, it is likely that these molecules may be involved in the diseases associated with the biological activity. Thus, the polynucleotides and polypeptides, and agonists or antagonists could be used to treat the associated disease.

[0560] Members of the secreted family of proteins are believed to be involved in biological activities associated with, for example, cellular signaling. Accordingly, compositions of the invention (including polynucleotides, polypeptides and antibodies of the invention, and fragments and variants thereof) may be used in diagnosis, prognosis, prevention and/or treatment of diseases and/or disorders associated with aberrant activity of secreted polypeptides.

[0561] In preferred embodiments, compositions of the invention (including polynucleotides, polypeptides and antibodies of the invention, and fragments and variants thereof) may be used in the diagnosis, prognosis, prevention, treatment, and/or amelioration of cancer and other hyperproliferative diseases and/or disorders (e.g., as described in the “Hyperproliferative Disorders”). In certain embodiments, a polypeptide of the invention, or polynucleotides, antibodies, agonists, or antagonists corresponding to that polypeptide, may be used to diagnose and/or prognosticate diseases and/or disorders associated with the tissue(s) in which the polypeptide of the invention is expressed including one, two, three, four, five, or more tissues disclosed in Table 1B.2, column 5 (Tissue Distribution Library Code).

[0562] Thus, polynucleotides, translation products and antibodies of the invention are useful in the diagnosis, detection, prevention, prognistication, and/or treatment of diseases and/or disorders associated with activities that include, but are not limited to, prohormone activation, neurotransmitter activity, cellular signaling, cellular proliferation, cellular differentiation, and cell migration.

[0563] More generally, polynucleotides, translation products and antibodies corresponding to this gene may be useful for the diagnosis, prognosis, prevention, treatment and/or amelioration of diseases and/or disorders associated with the following system or systems.

[0564] Immune Activity

[0565] Polynucleotides, polypeptides, antibodies, and/or agonists or antagonists of the present invention may be useful in preventing, diagnosing, prognosticating, treating, and/or ameliorating diseases, disorders, and/or conditions of the immune system, by, for example, activating or inhibiting the proliferation, differentiation, or mobilization (chemotaxis) of immune cells. Immune cells develop through a process called hematopoiesis, producing myeloid (platelets, red blood cells, neutrophils, and macrophages) and lymphoid (B and T lymphocytes) cells from pluripotent stem cells. The etiology of these immune diseases, disorders, and/or conditions may be genetic, somatic, such as cancer and some autoimmune diseases, acquired (e.g., by chemotherapy or toxins), or infectious. Moreover, polynucleotides, polypeptides, antibodies, and/or agonists or antagonists of the present invention can be used as a marker or detector of a particular immune system disease or disorder.

[0566] In another embodiment, a polypeptide of the invention, or polynucleotides, antibodies, agonists, or antagonists corresponding to that polypeptide, may be used to treat diseases and disorders of the immune system and/or to inhibit or enhance an immune response generated by cells associated with the tissue(s) in which the polypeptide of the invention is expressed, including one, two, three, four, five, or more tissues disclosed in Table 1B.2, column 5 (Tissue Distribution Library Code).

[0567] Polynucleotides, polypeptides, antibodies, and/or agonists or antagonists of the present invention may be useful in preventing, diagnosing, prognosticating, treating and/or ameliorating immunodeficiencies, including both congenital and acquired immunodeficiencies. Examples of B cell immunodeficiencies in which immunoglobulin levels B cell function and/or B cell numbers are decreased include: X-linked agammaglobulinemia (Bruton's disease), X-linked infantile agammaglobulinemia, X-linked immunodeficiency with hyper IgM, non X-linked immunodeficiency with hyper IgM, X-linked lymphoproliferative syndrome (XLP), agammaglobulinemia including congenital and acquired agammaglobulinemia, adult onset agammaglobulinemia, late-onset agammaglobulinemia, dysgammaglobulinemia, hypogammaglobulinemia, unspecified hypogammaglobulinemia, recessive agammaglobulinemia (Swiss type), Selective IgM deficiency, selective IgA deficiency, selective IgG subclass deficiencies, IgG subclass deficiency (with or without IgA deficiency), Ig deficiency with increased IgM, IgG and IgA deficiency with increased IgM, antibody deficiency with normal or elevated Igs, Ig heavy chain deletions, kappa chain deficiency, B cell lymphoproliferative disorder (BLPD), common variable immunodeficiency (CVID), common variable immunodeficiency (CVI) (acquired), and transient hypogammaglobulinemia of infancy.

[0568] In specific embodiments, ataxia-telangiectasia or conditions associated with ataxia-telangiectasia are detected, prevented, diagnosed, prognosticated, treated, and/or ameliorated using the polypeptides or polynucleotides of the invention, and/or agonists or antagonists thereof.

[0569] Examples of congenital immunodeficiencies in which T cell and/or B cell function and/or number is decreased include, but are not limited to: DiGeorge anomaly, severe combined immunodeficiencies (SCID) (including, but not limited to, X-linked SCID, autosomal recessive SCID, adenosine deaminase deficiency, purine nucleoside phosphorylase (PNP) deficiency, Class II MHC deficiency (Bare lymphocyte syndrome), Wiskott-Aldrich syndrome, and ataxia telangiectasia), thymic hypoplasia, third and fourth pharyngeal pouch syndrome, 22q11.2 deletion, chronic mucocutaneous candidiasis, natural killer cell deficiency (NK), idiopathic CD4+ T-lymphocytopenia, immunodeficiency with predominant T cell defect (unspecified), and unspecified immunodeficiency of cell mediated immunity.

[0570] In specific embodiments, DiGeorge anomaly or conditions associated with DiGeorge anomaly are prevented, detected, diagnosed, prognosticated, treated and/or ameliorated using polypeptides or polynucleotides of the invention, or antagonists or agonists thereof.

[0571] Other immunodeficiencies that may be prevented, detected, diagnosed, prognosticated, treated and/or ameliorated using polypeptides or polynucleotides of the invention, and/or agonists or antagonists thereof, include, but are not limited to, chronic granulomatous disease, Chediak-Higashi syndrome, myeloperoxidase deficiency, leukocyte glucose-6-phosphate debydrogenase deficiency, X-linked lymphoproliferative syndrome (XLP), leukocyte adhesion deficiency, complement component deficiencies (including C1, C2, C3, C4, C5, C6, C7, C8 and/or C9 deficiencies), reticular dysgenesis, thymic alymphoplasia-aplasia, immunodeficiency with thymoma, severe congenital leukopenia, dysplasia with immunodeficiency, neonatal neutropenia, short limbed dwarfism, and Nezelof syndrome-combined immunodeficiency with Igs.

[0572] In a preferred embodiment, the immunodeficiencies and/or conditions associated with the immunodeficiencies recited above are prevented, detected, diagnosed, prognosticated, treated and/or ameliorated using polynucleotides, polypeptides, antibodies, and/or agonists or antagonists of the present invention.

[0573] In a preferred embodiment polynucleotides, polypeptides, antibodies, and/or agonists or antagonists of the present invention could be used as an agent to boost immunoresponsiveness among immunodeficient individuals. In specific embodiments, polynucleotides, polypeptides, antibodies, and/or agonists or antagonists of the present invention could be used as an agent to boost immunoresponsiveness among B cell and/or T cell immunodeficient individuals.

[0574] The polynucleotides, polypeptides, antibodies, and/or agonists or antagonists of the present invention may be useful in preventing, detecting, diagnosing, prognosticating, treating and/or ameliorating autoimmune disorders. Many autoimmune disorders result from inappropriate recognition of self as foreign material by immune cells. This inappropriate recognition results in an immune response leading to the destruction of the host tissue. Therefore, the administration of polynucleotides and polypeptides of the invention that can inhibit an immune response, particularly the proliferation, differentiation, or chemotaxis of T-cells, may be an effective therapy in preventing autoimmune disorders.

[0575] Autoimmune diseases or disorders that may be prevented, detected, diagnosed, prognosticated, treated, and/or ameliorated by polynucleotides, polypeptides, antibodies, and/or agonists or antagonists of the present invention include, but are not limited to, one or more of the following: systemic lupus erythematosus, rheumatoid arthritis, ankylosing spondylitis, multiple sclerosis, autoimmune thyroiditis, Hashimoto's thyroiditis, autoimmune hemolytic anemia, hemolytic anemia, thrombocytopenia, autoimmune thrombocytopenia purpura, autoimmune neonatal thrombocytopenia, idiopathic thrombocytopenia purpura, purpura (e.g., Henloch-Scoenlein purpura), autoimmunocytopenia, Goodpasture's syndrome, Pemphigus vulgaris, myasthenia gravis, Grave's disease (hyperthyroidism), and insulin-resistant diabetes mellitus.

[0576] Additional disorders that are likely to have an autoimmune component that may be prevented, detected, diagnosed, prognosticated, treated and/or ameliorated with the compositions of the invention include, but are not limited to, type II collagen-induced arthritis, antiphospholipid syndrome, dermatitis, allergic encephalomyelitis, myocarditis, relapsing polychondritis, rheumatic heart disease, neuritis, uveitis ophthalmia, polyendocrinopathies, Reiter's Disease, Stiff-Man Syndrome, autoimmune pulmonary inflammation, autism, Guillain-Barre Syndrome, insulin dependent diabetes mellitus, and autoimmune inflammatory eye disorders.

[0577] Additional disorders that are likely to have an autoimmune component that may be prevented, detected, diagnosed, prognosticated, treated and/or ameliorated with the compositions of the invention include, but are not limited to, scleroderma with anti-collagen antibodies (often characterized, e.g., by nucleolar and other nuclear antibodies), mixed connective tissue disease (often characterized, e.g., by antibodies to extractable nuclear antigens (e.g., ribonucleoprotein)), polymyositis (often characterized, e.g., by nonhistone ANA), pernicious anemia (often characterized, e.g., by antiparietal cell, microsomes, and intrinsic factor antibodies), idiopathic Addison's disease (often characterized, e.g., by humoral and cell-mediated adrenal cytotoxicity, infertility (often characterized, e.g., by antispermatozoal antibodies), glomerulonephritis (often characterized, e.g., by glomerular basement membrane antibodies or immune complexes), bullous pemphigoid (often characterized, e.g., by IgG and complement in basement membrane), Sjogren's syndrome (often characterized, e.g., by multiple tissue antibodies, and/or a specific nonhistone ANA (SS-B)), diabetes mellitus (often characterized, e.g., by cell-mediated and humoral islet cell antibodies), and adrenergic drug resistance (including adrenergic drug resistance with asthma or cystic fibrosis) (often characterized, e.g., by beta-adrenergic receptor antibodies).

[0578] Additional disorders that may have an autoimmune component that may be prevented, detected, diagnosed, prognosticated, treated and/or ameliorated with the compositions of the invention include, but are not limited to, chronic active hepatitis (often characterized, e.g., by smooth muscle antibodies), primary biliary cirrhosis (often characterized, e.g., by mitochondria antibodies), other endocrine gland failure (often characterized, e.g., by specific tissue antibodies in some cases), vitiligo (often characterized, e.g., by melanocyte antibodies), vasculitis (often characterized, e.g., by Ig and complement in vessel walls and/or low serum complement), post-MI (often characterized, e.g., by myocardial antibodies), cardiotomy syndrome (often characterized, e.g., by myocardial antibodies), urticaria (often characterized, e.g., by IgG and IgM antibodies to IgE), atopic dermatitis (often characterized, e.g., by IgG and IgM antibodies to IgE), asthma (often characterized, e.g., by IgG and IgM antibodies to IgE), and many other inflammatory, granulomatous, degenerative, and atrophic disorders.

[0579] In a preferred embodiment, the autoimmune diseases and disorders and/or conditions associated with the diseases and disorders recited above are prevented, detected, diagnosed, prognosticated, treated and/or ameliorated using for example, antagonists or agonists, polypeptides or polynucleotides, or antibodies of the present invention. In a specific preferred embodiment, rheumatoid arthritis is prevented, detected, diagnosed, prognosticated, treated and/or ameliorated using polynucleotides, polypeptides, antibodies, and/or agonists or antagonists of the present invention.

[0580] In another specific preferred embodiment, systemic lupus erythematosus is prevented, detected, diagnosed, prognosticated, treated and/or ameliorated using polynucleotides, polypeptides, antibodies, and/or agonists or antagonists of the present invention. In another specific preferred embodiment, idiopathic thrombocytopenia purpura is prevented, detected, diagnosed, prognosticated, treated and/or ameliorated using polynucleotides, polypeptides, antibodies, and/or agonists or antagonists of the present invention.

[0581] In another specific preferred embodiment IgA nephropathy is prevented, detected, diagnosed, prognosticated, treated and/or ameliorated using polynucleotides, polypeptides, antibodies, and/or agonists or antagonists of the present invention.

[0582] In a preferred embodiment, the autoimmune diseases and disorders and/or conditions associated with the diseases and disorders recited above are prevented, detected, diagnosed, prognosticated, treated and/or ameliorated using polynucleotides, polypeptides, antibodies, and/or agonists or antagonists of the present invention

[0583] In preferred embodiments, polypeptides, antibodies, polynucleotides and/or agonists or antagonists of the present invention are used as a immunosuppressive agent(s).

[0584] Polynucleotides, polypeptides, antibodies, and/or agonists or antagonists of the present invention may be useful in detecting, preventing, diagnosing, prognosticating, treating, and/or ameliorating diseases, disorders, and/or conditions of hematopoietic cells. Polynucleotides, polypeptides, antibodies, and/or agonists or antagonists of the present invention could be used to increase differentiation and proliferation of hematopoietic cells, including the pluripotent stem cells, in an effort to treat or prevent those diseases, disorders, and/or conditions associated with a decrease in certain (or many) types hematopoietic cells, including but not limited to, leukopenia, neutropenia, anemia, and thrombocytopenia. Alternatively, Polynucleotides, polypeptides, antibodies, and/or agonists or antagonists of the present invention could be used to increase differentiation and proliferation of hematopoietic cells, including the pluripotent stem cells, in an effort to treat or prevent those diseases, disorders, and/or conditions associated with an increase in certain (or many) types of hematopoietic cells, including but not limited to, histiocytosis.

[0585] Allergic reactions and conditions, such as asthma (particularly allergic asthma) or other respiratory problems, may also be detected, prevented, diagnosed, prognosticated, treated, and/or ameliorated using polypeptides, antibodies, or polynucleotides of the invention, and/or agonists or antagonists thereof. Moreover, these molecules can be used to treat, prevent, prognose, and/or diagnose anaphylaxis, hypersensitivity to an antigenic molecule, or blood group incompatibility.

[0586] Additionally, polypeptides or polynucleotides of the invention, and/or agonists or antagonists thereof, may be used to detect, prevent, diagnose, prognosticate, treat, and/or ameliorate IgE-mediated allergic reactions. Such allergic reactions include, but are not limited to, asthma, rhinitis, and eczema. In specific embodiments, polynucleotides, polypeptides, antibodies, and/or agonists or antagonists of the present invention may be used to modulate IgE concentrations in vitro or in vivo.

[0587] Moreover, polynucleotides, polypeptides, antibodies, and/or agonists or antagonists of the present invention have uses in the detection, prevention, diagnosis, prognostication, treatment, and/or amelioration of inflammatory conditions. For example, since polypeptides, antibodies, or polynucleotides of the invention, and/or agonists or antagonists of the invention may inhibit the activation, proliferation and/or differentiation of cells involved in an inflammatory response, these molecules can be used to prevent and/or treat chronic and acute inflammatory conditions. Such inflammatory conditions include, but are not limited to, for example, inflammation associated with infection (e.g., septic shock, sepsis, or systemic inflammatory response syndrome), ischemia-reperfusion injury, endotoxin lethality, complement-mediated hyperacute rejection, nephritis, cytokine or chemokine induced lung injury, inflammatory bowel disease, Crohn's disease, over production of cytokines (e.g., TNF or IL-1.), respiratory disorders (e.g., asthma and allergy); gastrointestinal disorders (e.g., inflammatory bowel disease); cancers (e.g., gastric, ovarian, lung, bladder, liver, and breast); CNS disorders (e.g., multiple sclerosis; ischemic brain injury and/or stroke, traumatic brain injury, neurodegenerative disorders (e.g., Parkinson's disease and Alzheimer's disease); AIDS-related dementia; and prion disease); cardiovascular disorders (e.g., atherosclerosis, myocarditis, cardiovascular disease, and cardiopulmonary bypass complications); as well as many additional diseases, conditions, and disorders that are characterized by inflammation (e.g., hepatitis, rheumatoid arthritis, gout, trauma, pancreatitis, sarcoidosis, dermatitis, renal ischemia-reperfusion injury, Grave's disease, systemic lupus erythematosus, diabetes mellitus, and allogenic transplant rejection).

[0588] Because inflammation is a fundamental defense mechanism, inflammatory disorders can effect virtually any tissue of the body. Accordingly, polynucleotides, polypeptides, and antibodies of the invention, as well as agonists or antagonists thereof, have uses in the treatment of tissue-specific inflammatory disorders, including, but not limited to, adrenalitis, alveolitis, angiocholecystitis, appendicitis, balanitis, blepharitis, bronchitis, bursitis, carditis, cellulitis, cervicitis, cholecystitis, chorditis, cochlitis, colitis, conjunctivitis, cystitis, dermatitis, diverticulitis, encephalitis, endocarditis, esophagitis, eustachitis, fibrositis, folliculitis, gastritis, gastroenteritis, gingivitis, glossitis, hepatosplenitis, keratitis, labyrinthitis, laryngitis, lymphangitis, mastitis, media otitis, meningitis, metritis, mucitis, myocarditis, myosititis, myringitis, nephritis, neuritis, orchitis, osteochondritis, otitis, pericarditis, peritendonitis, peritonitis, pharyngitis, phlebitis, poliomyelitis, prostatitis, pulpitis, retinitis, rhinitis, salpingitis, scleritis, sclerochoroiditis, scrotitis, sinusitis, spondylitis, steatitis, stomatitis, synovitis, syringitis, tendonitis, tonsillitis, urethritis, and vaginitis.

[0589] In specific embodiments, polypeptides, antibodies, or polynucleotides of the invention, and/or agonists or antagonists thereof, are useful to detect, prevent, diagnose, prognosticate, treat, and/or ameliorate organ transplant rejections and graft-versus-host disease. Organ rejection occurs by host immune cell destruction of the transplanted tissue through an immune response. Similarly, an immune response is also involved in GVHD, but, in this case, the foreign transplanted immune cells destroy the host tissues. Polypeptides, antibodies, or polynucleotides of the invention, and/or agonists or antagonists thereof, that inhibit an immune response, particularly the activation, proliferation, differentiation, or chemotaxis of T-cells, may be an effective therapy in preventing organ rejection or GVHD. In specific embodiments, polypeptides, antibodies, or polynucleotides of the invention, and/or agonists or antagonists thereof, that inhibit an immune response, particularly the activation, proliferation, differentiation, or chemotaxis of T-cells, may be an effective therapy in preventing experimental allergic and hyperacute xenograft rejection.

[0590] In other embodiments, polypeptides, antibodies, or polynucleotides of the invention, and/or agonists or antagonists thereof, are useful to detect, prevent, diagnose, prognosticate, treat, and/or ameliorate immune complex diseases, including, but not limited to, serum sickness, post streptococcal glomerulonephritis, polyarteritis nodosa, and immune complex-induced vasculitis.

[0591] Polypeptides, antibodies, polynucleotides and/or agonists or antagonists of the invention can be used to treat, detect, and/or prevent infectious agents. For example, by increasing the immune response, particularly increasing the proliferation activation and/or differentiation of B and/or T cells, infectious diseases may be treated, detected, and/or prevented. The immune response may be increased by either enhancing an existing immune response, or by initiating a new immune response. Alternatively, polynucleotides, polypeptides, antibodies, and/or agonists or antagonists of the present invention may also directly inhibit the infectious agent (refer to section of application listing infectious agents, etc), without necessarily eliciting an immune response.

[0592] In another embodiment, polypeptides, antibodies, polynucleotides and/or agonists or antagonists of the present invention are used as a vaccine adjuvant that enhances immune responsiveness to an antigen. In a specific embodiment, polypeptides, antibodies, polynucleotides and/or agonists or antagonists of the present invention are used as an adjuvant to enhance tumor-specific immune responses.

[0593] In another specific embodiment, polypeptides, antibodies, polynucleotides and/or agonists or antagonists of the present invention are used as an adjuvant to enhance anti-viral immune responses. Anti-viral immune responses that may be enhanced using the compositions of the invention as an adjuvant, include virus and virus associated diseases or symptoms described herein or otherwise known in the art. In specific embodiments, the compositions of the invention are used as an adjuvant to enhance an immune response to a virus, disease, or symptom selected from the group consisting of: AIDS, meningitis, Dengue, EBV, and hepatitis (e.g., hepatitis B). In another specific embodiment, the compositions of the invention are used as an adjuvant to enhance an immune response to a virus, disease, or symptom selected from the group consisting of: HIV/AIDS, respiratory syncytial virus, Dengue, rotavirus, Japanese B encephalitis, influenza A and B, parainfluenza, measles, cytomegalovirus, rabies, Junin, Chikungunya, Rift Valley Fever, herpes simplex, and yellow fever.

[0594] In another specific embodiment, polypeptides, antibodies, polynucleotides and/or agonists or antagonists of the present invention are used as an adjuvant to enhance anti-bacterial or anti-fungal immune responses. Anti-bacterial or anti-fungal immune responses that may be enhanced using the compositions of the invention as an adjuvant, include bacteria or fungus and bacteria or fungus associated diseases or symptoms described herein or otherwise known in the art. In specific embodiments, the compositions of the invention are used as an adjuvant to enhance an immune response to a bacteria or fungus, disease, or symptom selected from the group consisting of: tetanus, Diphtheria, botulism, and meningitis type B.

[0595] In another specific embodiment, the compositions of the invention are used as an adjuvant to enhance an immune response to a bacteria or fungus, disease, or symptom selected from the group consisting of: Vibrio cholerae, Mycobacterium leprae, Salmonella typhi, Salmonella paratyphi, Meisseria meningitidis, Streptococcus pneumoniae, Group B streptococcus, Shigella spp., Enterotoxigenic Escherichia coli, Enterohemorrhagic E. coli, and Borrelia burgdorferi.

[0596] In another specific embodiment, polypeptides, antibodies, polynucleotides and/or agonists or antagonists of the present invention are used as an adjuvant to enhance anti-parasitic immune responses. Anti-parasitic immune responses that may be enhanced using the compositions of the invention as an adjuvant, include parasite and parasite associated diseases or symptoms described herein or otherwise known in the art. In specific embodiments, the compositions of the invention are used as an adjuvant to enhance an immune response to a parasite. In another specific embodiment, the compositions of the invention are used as an adjuvant to enhance an immune response to Plasmodium (malaria) or Leishmania.

[0597] In another specific embodiment, polypeptides, antibodies, polynucleotides and/or agonists or antagonists of the present invention may also be employed to treat infectious diseases including silicosis, sarcoidosis, and idiopathic pulmonary fibrosis; for example, by preventing the recruitment and activation of mononuclear phagocytes.

[0598] In another specific embodiment, polypeptides, antibodies, polynucleotides and/or agonists or antagonists of the present invention are used as an antigen for the generation of antibodies to inhibit or enhance immune mediated responses against polypeptides of the invention.

[0599] In one embodiment, polypeptides, antibodies, polynucleotides and/or agonists or antagonists of the present invention are administered to an animal (e.g., mouse, rat, rabbit, hamster, guinea pig, pigs, micro-pig, chicken, camel, goat, horse, cow, sheep, dog, cat, non-human primate, and human, most preferably human) to boost the immune system to produce increased quantities of one or more antibodies (e.g., IgG, IgA, IgM, and IgE), to induce higher affinity antibody production and immunoglobulin class switching (e.g., IgG, IgA, IgM, and IgE), and/or to increase an immune response.

[0600] In another specific embodiment, polypeptides, antibodies, polynucleotides and/or agonists or antagonists of the present invention are used as a stimulator of B cell responsiveness to pathogens.

[0601] In another specific embodiment, polypeptides, antibodies, polynucleotides and/or agonists or antagonists of the present invention are used as an activator of T cells.

[0602] In another specific embodiment, polypeptides, antibodies, polynucleotides and/or agonists or antagonists of the present invention are used as an agent that elevates the immune status of an individual prior to their receipt of immunosuppressive therapies.

[0603] In another specific embodiment, polypeptides, antibodies, polynucleotides and/or agonists or antagonists of the present invention are used as an agent to induce higher affinity antibodies.

[0604] In another specific embodiment, polypeptides, antibodies, polynucleotides and/or agonists or antagonists of the present invention are used as an agent to increase serum immunoglobulin concentrations.

[0605] In another specific embodiment, polypeptides, antibodies, polynucleotides and/or agonists or antagonists of the present invention are used as an agent to accelerate recovery of immunocompromised individuals.

[0606] In another specific embodiment, polypeptides, antibodies, polynucleotides and/or agonists or antagonists of the present invention are used as an agent to boost immunoresponsiveness among aged populations and/or neonates.

[0607] In another specific embodiment, polypeptides, antibodies, polynucleotides and/or agonists or antagonists of the present invention are used as an immune system enhancer prior to, during, or after bone marrow transplant and/or other transplants (e.g., allogeneic or xenogeneic organ transplantation). With respect to transplantation, compositions of the invention may be administered prior to, concomitant with, and/or after transplantation. In a specific embodiment, compositions of the invention are administered after transplantation, prior to the beginning of recovery of T-cell populations. In another specific embodiment, compositions of the invention are first administered after transplantation after the beginning of recovery of T cell populations, but prior to full recovery of B cell populations.

[0608] In another specific embodiment, polypeptides, antibodies, polynucleotides and/or agonists or antagonists of the present invention are used as an agent to boost immunoresponsiveness among individuals having an acquired loss of B cell function. Conditions resulting in an acquired loss of B cell function that may be ameliorated or treated by administering the polypeptides, antibodies, polynucleotides and/or agonists or antagonists thereof, include, but are not limited to, HIV Infection, AIDS, bone marrow transplant, and B cell chronic lymphocytic leukemia (CLL).

[0609] In another specific embodiment, polypeptides, antibodies, polynucleotides and/or agonists or antagonists of the present invention are used as an agent to boost immunoresponsiveness among individuals having a temporary immune deficiency. Conditions resulting in a temporary immune deficiency that may be ameliorated or treated by administering the polypeptides, antibodies, polynucleotides and/or agonists or antagonists thereof, include, but are not limited to, recovery from viral infections (e.g., influenza), conditions associated with malnutrition, recovery from infectious mononucleosis, or conditions associated with stress, recovery from measles, recovery from blood transfusion, and recovery from surgery.

[0610] In another specific embodiment, polypeptides, antibodies, polynucleotides and/or agonists or antagonists of the present invention are used as a regulator of antigen presentation by monocytes, dendritic cells, and/or B-cells. In one embodiment, polynucleotides, polypeptides, antibodies, and/or agonists or antagonists of the present invention enhance antigen presentation or antagonizes antigen presentation in vitro or in vivo. Moreover, in related embodiments, said enhancement or antagonism of antigen presentation may be useful as an anti-tumor treatment or to modulate the immune system.

[0611] In another specific embodiment, polypeptides, antibodies, polynucleotides and/or agonists or antagonists of the present invention are used as an agent to direct an individual's immune system towards development of a humoral response (i.e. TH2) as opposed to a TH1 cellular response.

[0612] In another specific embodiment, polypeptides, antibodies, polynucleotides and/or agonists or antagonists of the present invention are used as a means to induce tumor proliferation and thus make it more susceptible to anti-neoplastic agents. For example, multiple myeloma is a slowly dividing disease and is thus refractory to virtually all anti-neoplastic regimens. If these cells were forced to proliferate more rapidly their susceptibility profile would likely change.

[0613] In another specific embodiment, polypeptides, antibodies, polynucleotides and/or agonists or antagonists of the present invention are used as a stimulator of B cell production in pathologies such as AIDS, chronic lymphocyte disorder and/or Common Variable Immunodificiency.

[0614] In another specific embodiment, polypeptides, antibodies, polynucleotides and/or agonists or antagonists of the present invention are used as a therapy for generation and/or regeneration of lymphoid tissues following surgery, trauma or genetic defect. In another specific embodiment, polypeptides, antibodies, polynucleotides and/or agonists or antagonists of the present invention are used in the pretreatment of bone marrow samples prior to transplant.

[0615] In another specific embodiment, polypeptides, antibodies, polynucleotides and/or agonists or antagonists of the present invention are used as a gene-based therapy for genetically inherited disorders resulting in immuno-incompetence/immunodeficiency such as observed among SCID patients.

[0616] In another specific embodiment, polypeptides, antibodies, polynucleotides and/or agonists or antagonists of the present invention are used as a means of activating monocytes/macrophages to defend against parasitic diseases that effect monocytes such as Leishmania.

[0617] In another specific embodiment, polypeptides, antibodies, polynucleotides and/or agonists or antagonists of the present invention are used as a means of regulating secreted cytokines that are elicited by polypeptides of the invention.

[0618] In another embodiment, polypeptides, antibodies, polynucleotides and/or agonists or antagonists of the present invention are used in one or more of the applications decribed herein, as they may apply to veterinary medicine.

[0619] In another specific embodiment, polypeptides, antibodies, polynucleotides and/or agonists or antagonists of the present invention are used as a means of blocking various aspects of immune responses to foreign agents or self. Examples of diseases or conditions in which blocking of certain aspects of immune responses may be desired include autoimmune disorders such as lupus, and arthritis, as well as immunoresponsiveness to skin allergies, inflammation, bowel disease, injury and diseases/disorders associated with pathogens.

[0620] In another specific embodiment, polypeptides, antibodies, polynucleotides and/or agonists or antagonists of the present invention are used as a therapy for preventing the B cell proliferation and Ig secretion associated with autoimmune diseases such as idiopathic thrombocytopenic purpura, systemic lupus erythematosus and multiple sclerosis.

[0621] In another specific embodiment, polypeptides, antibodies, polynucleotides and/or agonists or antagonists of the present invention are used as a inhibitor of B and/or T cell migration in endothelial cells. This activity disrupts tissue architecture or cognate responses and is useful, for example in disrupting immune responses, and blocking sepsis.

[0622] In another specific embodiment, polypeptides, antibodies, polynucleotides and/or agonists or antagonists of the present invention are used as a therapy for chronic hypergammaglobulinemia evident in such diseases as monoclonal gammopathy of undetermined significance (MGUS), Waldenstrom's disease, related idiopathic monoclonal gammopathies, and plasmacytomas.

[0623] In another specific embodiment, polypeptides, antibodies, polynucleotides and/or agonists or antagonists of the present invention may be employed for instance to inhibit polypeptide chemotaxis and activation of macrophages and their precursors, and of neutrophils, basophils, B lymphocytes and some T-cell subsets, e.g., activated and CD8 cytotoxic T cells and natural killer cells, in certain autoimmune and chronic inflammatory and infective diseases. Examples of autoimmune diseases are described herein and include multiple sclerosis, and insulin-dependent diabetes.

[0624] The polypeptides, antibodies, polynucleotides and/or agonists or antagonists of the present invention may also be employed to treat idiopathic hyper-eosinophilic syndrome by, for example, preventing eosinophil production and migration.

[0625] In another specific embodiment, polypeptides, antibodies, polynucleotides and/or agonists or antagonists of the present invention are used to enhance or inhibit complement mediated cell lysis.

[0626] In another specific embodiment, polypeptides, antibodies, polynucleotides and/or agonists or antagonists of the present invention are used to enhance or inhibit antibody dependent cellular cytotoxicity.

[0627] In another specific embodiment, polypeptides, antibodies, polynucleotides and/or agonists or antagonists of the present invention may also be employed for treating atherosclerosis, for example, by preventing monocyte infiltration in the artery wall.

[0628] In another specific embodiment, polypeptides, antibodies, polynucleotides and/or agonists or antagonists of the present invention may be employed to treat adult respiratory distress syndrome (ARDS).

[0629] In another specific embodiment, polypeptides, antibodies, polynucleotides and/or agonists or antagonists of the present invention may be useful for stimulating wound and tissue repair, stimulating angiogenesis, and/or stimulating the repair of vascular or lymphatic diseases or disorders. Additionally, agonists and antagonists of the invention may be used to stimulate the regeneration of mucosal surfaces.

[0630] In a specific embodiment, polynucleotides or polypeptides, and/or agonists thereof are used to detect, prevent, diagnose, prognosticate, treat, and/or ameliorate a disorder characterized by primary or acquired immunodeficiency, deficient serum immunoglobulin production, recurrent infections, and/or immune system dysfunction. Moreover, polynucleotides or polypeptides, and/or agonists thereof may be used to treat or prevent infections of the joints, bones, skin, and/or parotid glands, blood-borne infections (e.g., sepsis, meningitis, septic arthritis, and/or osteomyelitis), autoimmune diseases (e.g., those disclosed herein), inflammatory disorders, and malignancies, and/or any disease or disorder or condition associated with these infections, diseases, disorders and/or malignancies) including, but not limited to, CVID, other primary immune deficiencies, HIV disease, CLL, recurrent bronchitis, sinusitis, otitis media, conjunctivitis, pneumonia, hepatitis, meningitis, herpes zoster (e.g., severe herpes zoster), and/or pneumocystis carnii. Other diseases and disorders that may be detected, prevented, diagnosed, prognosticated, treated, and/or ameliorated with polynucleotides or polypeptides, and/or agonists of the present invention include, but are not limited to, HIV infection, HTLV-BLV infection, lymphopenia, phagocyte bactericidal dysfunction anemia, thrombocytopenia, and hemoglobinuria.

[0631] In another embodiment, polynucleotides, polypeptides, antibodies, and/or agonists or antagonists of the present invention are used to treat, and/or diagnose an individual having common variable immunodeficiency disease (“CVID”; also known as “acquired agammaglobulinemia” and “acquired hypogammaglobulinemia”) or a subset of this disease.

[0632] In a specific embodiment, polynucleotides, polypeptides, antibodies, and/or agonists or antagonists of the present invention may be used to detect, prevent, diagnose, prognosticate, treat, and/or ameliorate cancers or neoplasms including immune cell or immune tissue-related cancers or neoplasms. Examples of cancers or neoplasms that may be detected, prevented, diagnosed, prognosticated, treated, and/or ameliorated by polynucleotides, polypeptides, antibodies, and/or agonists or antagonists of the present invention include, but are not limited to, acute myelogenous leukemia, chronic myelogenous leukemia, Hodgkin's disease, non-Hodgkin's lymphoma, acute lymphocytic anemia (ALL) Chronic lymphocyte leukemia, plasmacytomas, multiple myeloma, Burkitt's lymphoma, EBV-transformed diseases, and/or diseases and disorders described in the section entitled “Hyperproliferative Disorders” elsewhere herein.

[0633] In another specific embodiment, polypeptides, antibodies, polynucleotides and/or agonists or antagonists of the present invention are used as a therapy for decreasing cellular proliferation of Large B-cell Lymphomas.

[0634] In another specific embodiment, polypeptides, antibodies, polynucleotides and/or agonists or antagonists of the present invention are used as a means of decreasing the involvement of B cells and Ig associated with Chronic Myelogenous Leukemia.

[0635] In specific embodiments, the compositions of the invention are used as an agent to boost immunoresponsiveness among B cell immunodeficient individuals, such as, for example, an individual who has undergone a partial or complete splenectomy.

[0636] Antagonists of the invention include, for example, binding and/or inhibitory antibodies, antisense nucleic acids, ribozymes or soluble forms of the polypeptides of the present invention (e.g., Fc fusion protein; see, e.g., Example 9). Agonists of the invention include, for example, binding or stimulatory antibodies, and soluble forms of the polypeptides (e.g., Fc fusion proteins; see, e.g., Example 9). polypeptides, antibodies, polynucleotides and/or agonists or antagonists of the present invention may be employed in a composition with a pharmaceutically acceptable carrier, e.g., as described herein.

[0637] In another embodiment, polypeptides, antibodies, polynucleotides and/or agonists or antagonists of the present invention are administered to an animal (including, but not limited to, those listed above, and also including transgenic animals) incapable of producing functional endogenous antibody molecules or having an otherwise compromised endogenous immune system, but which is capable of producing human immunoglobulin molecules by means of a reconstituted or partially reconstituted immune system from another animal (see, e.g., published PCT Application Nos. WO98/24893, WO/9634096, WO/9633735, and WO/9110741). Administration of polypeptides, antibodies, polynucleotides and/or agonists or antagonists of the present invention to such animals is useful for the generation of monoclonal antibodies against the polypeptides, antibodies, polynucleotides and/or agonists or antagonists of the present invention.

[0638] Hyperproliferative Disorders

[0639] In certain embodiments, polynucleotides or polypeptides, or agonists or antagonists of the present invention can be used to treat or detect hyperproliferative disorders, including neoplasms. Polynucleotides or polypeptides, or agonists or antagonists of the present invention may inhibit the proliferation of the disorder through direct or indirect interactions. Alternatively, Polynucleotides or polypeptides, or agonists or antagonists of the present invention may proliferate other cells which can inhibit the hyperproliferative disorder.

[0640] For example, by increasing an immune response, particularly increasing antigenic qualities of the hyperproliferative disorder or by proliferating, differentiating, or mobilizing T-cells, hyperproliferative disorders can be treated. This immune response may be increased by either enhancing an existing immune response, or by initiating a new immune response. Alternatively, decreasing an immune response may also be a method of treating hyperproliferative disorders, such as a chemotherapeutic agent.

[0641] Examples of hyperproliferative disorders that can be treated or detected by polynucleotides or polypeptides, or agonists or antagonists of the present invention include, but are not limited to neoplasms located in the: colon, abdomen, bone, breast, digestive system, liver, pancreas, peritoneum, endocrine glands (adrenal, parathyroid, pituitary, testicles, ovary, thymus, thyroid), eye, head and neck, nervous (central and peripheral), lymphatic system, pelvis, skin, soft tissue, spleen, thorax, and urogenital tract.

[0642] Similarly, other hyperproliferative disorders can also be treated or detected by polynucleotides or polypeptides, or agonists or antagonists of the present invention. Examples of such hyperproliferative disorders include, but are not limited to: Acute Childhood Lymphoblastic Leukemia, Acute Lymphoblastic Leukemia, Acute Lymphocytic Leukemia, Acute Myeloid Leukemia, Adrenocortical Carcinoma, Adult (Primary) Hepatocellular Cancer, Adult (Primary) Liver Cancer, Adult Acute Lymphocytic Leukemia, Adult Acute Myeloid Leukemia, Adult Hodgkin's Disease, Adult Hodgkin's Lymphoma, Adult Lymphocytic Leukemia, Adult Non-Hodgkin's Lymphoma, Adult Primary Liver Cancer, Adult Soft Tissue Sarcoma, AIDS-Related Lymphoma, AIDS-Related Malignancies, Anal Cancer, Astrocytoma, Bile Duct Cancer, Bladder Cancer, Bone Cancer, Brain Stem Glioma, Brain Tumors, Breast Cancer, Cancer of the Renal Pelvis and Ureter, Central Nervous System (Primary) Lymphoma, Central Nervous System Lymphoma, Cerebellar Astrocytoma, Cerebral Astrocytoma, Cervical Cancer, Childhood (Primary) Hepatocellular Cancer, Childhood (Primary) Liver Cancer, Childhood Acute Lymphoblastic Leukemia, Childhood Acute Myeloid Leukemia, Childhood Brain Stem Glioma, Childhood Cerebellar Astrocytoma, Childhood Cerebral Astrocytoma, Childhood Extracranial Germ Cell Tumors, Childhood Hodgkin's Disease, Childhood Hodgkin's Lymphoma, Childhood Hypothalamic and Visual Pathway Glioma, Childhood Lymphoblastic Leukemia, Childhood Medulloblastoma, Childhood Non-Hodgkin's Lymphoma, Childhood Pineal and Supratentorial Primitive Neuroectodermal Tumors, Childhood Primary Liver Cancer, Childhood Rhabdomyosarcoma, Childhood Soft Tissue Sarcoma, Childhood Visual Pathway and Hypothalamic Glioma, Chronic Lymphocytic Leukemia, Chronic Myelogenous Leukemia, Colon Cancer, Cutaneous T-Cell Lymphoma, Endocrine Pancreas Islet Cell Carcinoma, Endometrial Cancer, Ependymoma, Epithelial Cancer, Esophageal Cancer, Ewing's Sarcoma and Related Tumors, Exocrine Pancreatic Cancer, Extracranial Germ Cell Tumor, Extragonadal Germ Cell Tumor, Extrahepatic Bile Duct Cancer, Eye Cancer, Female Breast Cancer, Gaucher's Disease, Gallbladder Cancer, Gastric Cancer, Gastrointestinal Carcinoid Tumor, Gastrointestinal Tumors, Germ Cell Tumors, Gestational Trophoblastic Tumor, Hairy Cell Leukemia, Head and Neck Cancer, Hepatocellular Cancer, Hodgkin's Disease, Hodgkin's Lymphoma, Hypergammaglobulinemia, Hypopharyngeal Cancer, Intestinal Cancers, Intraocular Melanoma, Islet Cell Carcinoma, Islet Cell Pancreatic Cancer, Kaposi's Sarcoma, Kidney Cancer, Laryngeal Cancer, Lip and Oral Cavity Cancer, Liver Cancer, Lung Cancer, Lymphoproliferative Disorders, Macroglobulinemia, Male Breast Cancer, Malignant Mesothelioma, Malignant Thymoma, Medulloblastoma, Melanoma, Mesothelioma, Metastatic Occult Primary Squamous Neck Cancer, Metastatic Primary Squamous Neck Cancer, Metastatic Squamous Neck Cancer, Multiple Myeloma, Multiple Myeloma/Plasma Cell Neoplasm, Myelodysplastic Syndrome, Myelogenous Leukemia, Myeloid Leukemia, Myeloproliferative Disorders, Nasal Cavity and Paranasal Sinus Cancer, Nasopharyngeal Cancer, Neuroblastoma, Non-Hodgkin's Lymphoma During Pregnancy, Nonmelanoma Skin Cancer, Non-Small Cell Lung Cancer, Occult Primary Metastatic Squamous Neck Cancer, Oropharyngeal Cancer, Osteo-/Malignant Fibrous Sarcoma, Osteosarcoma/Malignant Fibrous Histiocytoma, Osteosarcoma/Malignant Fibrous Histiocytoma of Bone, Ovarian Epithelial Cancer, Ovarian Germ Cell Tumor, Ovarian Low Malignant Potential Tumor, Pancreatic Cancer, Paraproteinemias, Purpura, Parathyroid Cancer, Penile Cancer, Pheochromocytoma, Pituitary Tumor, Plasma Cell Neoplasm/Multiple Myeloma, Primary Central Nervous System Lymphoma, Primary Liver Cancer, Prostate Cancer, Rectal Cancer, Renal Cell Cancer, Renal Pelvis and Ureter Cancer, Retinoblastoma, Rhabdomyosarcoma, Salivary Gland Cancer, Sarcoidosis Sarcomas, Sezary Syndrome, Skin Cancer, Small Cell Lung Cancer, Small Intestine Cancer, Soft Tissue Sarcoma, Squamous Neck Cancer, Stomach Cancer, Supratentorial Primitive Neuroectodermal and Pineal Tumors, T-Cell Lymphoma, Testicular Cancer, Thymoma, Thyroid Cancer, Transitional Cell Cancer of the Renal Pelvis and Ureter, Transitional Renal Pelvis and Ureter Cancer, Trophoblastic Tumors, Ureter and Renal Pelvis Cell Cancer, Urethral Cancer, Uterine Cancer, Uterine Sarcoma, Vaginal Cancer, Visual Pathway and Hypothalamic Glioma, Vulvar Cancer, Waldenstrom's Macroglobulinemia, Wilms' Tumor, and any other hyperproliferative disease, besides neoplasia, located in an organ system listed above.

[0643] In another preferred embodiment, polynucleotides or polypeptides, or agonists or antagonists of the present invention are used to detect, prevent, diagnose, prognosticate, treat, and/or ameliorate premalignant conditions and to prevent progression to a neoplastic or malignant state, including but not limited to those disorders described above. Such uses are indicated in conditions known or suspected of preceding progression to neoplasia or cancer, in particular, where non-neoplastic cell growth consisting of hyperplasia, metaplasia, or most particularly, dysplasia has occurred (for review of such abnormal growth conditions, see Robbins and Angell, 1976, Basic Pathology, 2d Ed., W. B. Saunders Co., Philadelphia, pp. 68-79.)

[0644] Hyperplasia is a form of controlled cell proliferation, involving an increase in cell number in a tissue or organ, without significant alteration in structure or function. Hyperplastic disorders which can be detected, prevented, diagnosed, prognosticated, treated, and/or ameliorated with compositions of the invention (including polynucleotides, polypeptides, agonists or antagonists) include, but are not limited to, angiofollicular mediastinal lymph node hyperplasia, angiolymphoid hyperplasia with eosinophilia, atypical melanocytic hyperplasia, basal cell hyperplasia, benign giant lymph node hyperplasia, cementum hyperplasia, congenital adrenal hyperplasia, congenital sebaceous hyperplasia, cystic hyperplasia, cystic hyperplasia of the breast, denture hyperplasia, ductal hyperplasia, endometrial hyperplasia, fibromuscular hyperplasia, focal epithelial hyperplasia, gingival hyperplasia, inflammatory fibrous hyperplasia, inflammatory papillary hyperplasia, intravascular papillary endothelial hyperplasia, nodular hyperplasia of prostate, nodular regenerative hyperplasia, pseudoepitheliomatous hyperplasia, senile sebaceous hyperplasia, and verrucous hyperplasia.

[0645] Metaplasia is a form of controlled cell growth in which one type of adult or fully differentiated cell substitutes for another type of adult cell. Metaplastic disorders which can be detected, prevented, diagnosed, prognosticated, treated, and/or ameliorated with compositions of the invention (including polynucleotides, polypeptides, agonists or antagonists) include, but are not limited to, agnogenic myeloid metaplasia, apocrine metaplasia, atypical metaplasia, autoparenchymatous metaplasia, connective tissue metaplasia, epithelial metaplasia, intestinal metaplasia, metaplastic anemia, metaplastic ossification, metaplastic polyps, myeloid metaplasia, primary myeloid metaplasia, secondary myeloid metaplasia, squamous metaplasia, squamous metaplasia of amnion, and symptomatic myeloid metaplasia.

[0646] Dysplasia is frequently a forerunner of cancer, and is found mainly in the epithelia; it is the most disorderly form of non-neoplastic cell growth, involving a loss in individual cell uniformity and in the architectural orientation of cells. Dysplastic cells often have abnormally large, deeply stained nuclei, and exhibit pleomorphism. Dysplasia characteristically occurs where there exists chronic irritation or inflammation. Dysplastic disorders which can be detected, prevented, diagnosed, prognosticated, treated, and/or ameliorated with compositions of the invention (including polynucleotides, polypeptides, agonists or antagonists) include, but are not limited to, anhidrotic ectodermal dysplasia, anterofacial dysplasia, asphyxiating thoracic dysplasia, atriodigital dysplasia, bronchopulmonary dysplasia, cerebral dysplasia, cervical dysplasia, chondroectodermal dysplasia, cleidocranial dysplasia, congenital ectodermal dysplasia, craniodiaphysial dysplasia, craniocarpotarsal dysplasia, craniometaphysial dysplasia, dentin dysplasia, diaphysial dysplasia, ectodermal dysplasia, enamel dysplasia, encephalo-ophthalmic dysplasia, dysplasia epiphysialis hemimelia, dysplasia epiphysialis multiplex, dysplasia epiphysialis punctata, epithelial dysplasia, faciodigitogenital dysplasia, familial fibrous dysplasia of jaws, familial white folded dysplasia, fibromuscular dysplasia, fibrous dysplasia of bone, florid osseous dysplasia, hereditary renal-retinal dysplasia, hidrotic ectodermal dysplasia, hypohidrotic ectodermal dysplasia, lymphopenic thymic dysplasia, mammary dysplasia, mandibulofacial dysplasia, metaphysial dysplasia, Mondini dysplasia, monostotic fibrous dysplasia, mucoepithelial dysplasia, multiple epiphysial dysplasia, oculoauriculovertebral dysplasia, oculodentodigital dysplasia, oculovertebral dysplasia, odontogenic dysplasia, ophthalmomandibulomelic dysplasia, periapical cemental dysplasia, polyostotic fibrous dysplasia, pseudoachondroplastic spondyloepiphysial dysplasia, retinal dysplasia, septo-optic dysplasia, spondyloepiphysial dysplasia, and ventriculoradial dysplasia.

[0647] Additional pre-neoplastic disorders which can be detected, prevented, diagnosed, prognosticated, treated, and/or ameliorated with compositions of the invention (including polynucleotides, polypeptides, agonists or antagonists) include, but are not limited to, benign dysproliferative disorders (e.g., benign tumors, fibrocystic conditions, tissue hypertrophy, intestinal polyps, colon polyps, and esophageal dysplasia), leukoplakia, keratoses, Bowen's disease, Farmer's Skin, solar cheilitis, and solar keratosis.

[0648] In another embodiment, a polypeptide of the invention, or polynucleotides, antibodies, agonists, or antagonists corresponding to that polypeptide, may be used to diagnose and/or prognosticate disorders associated with the tissue(s) in which the polypeptide of the invention is expressed, including one, two, three, four, five, or more tissues disclosed in Table 1B.2, column 5 (Tissue Distribution Library Code).

[0649] In another embodiment, polynucleotides, polypeptides, antibodies, and/or agonists or antagonists of the present invention conjugated to a toxin or a radioactive isotope, as described herein, may be used to treat cancers and neoplasms, including, but not limited to those described herein. In a further preferred embodiment, polynucleotides, polypeptides, antibodies, and/or agonists or antagonists of the present invention conjugated to a toxin or a radioactive isotope, as described herein, may be used to treat acute myelogenous leukemia.

[0650] Additionally, polynucleotides, polypeptides, and/or agonists or antagonists of the invention may affect apoptosis, and therefore, would be useful in treating a number of diseases associated with increased cell survival or the inhibition of apoptosis. For example, diseases associated with increased cell survival or the inhibition of apoptosis that could be detected, prevented, diagnosed, prognosticated, treated, and/or ameliorated by polynucleotides, polypeptides, and/or agonists or antagonists of the invention, include cancers (such as follicular lymphomas, carcinomas with p53 mutations, and hormone-dependent tumors, including, but not limited to colon cancer, cardiac tumors, pancreatic cancer, melanoma, retinoblastoma, glioblastoma, lung cancer, intestinal cancer, testicular cancer, stomach cancer, neuroblastoma, myxoma, myoma, lymphoma, endothelioma, osteoblastoma, osteoclastoma, osteosarcoma, chondrosarcoma, adenoma, breast cancer, prostate cancer, Kaposi's sarcoma and ovarian cancer); autoimmune disorders such as, multiple sclerosis, Sjogren's syndrome, Hashimoto's thyroiditis, biliary cirrhosis, Behcet's disease, Crohn's disease, polymyositis, systemic lupus erythematosus and immune-related glomerulonephritis and rheumatoid arthritis) and viral infections (such as herpes viruses, pox viruses and adenoviruses), inflammation, graft v. host disease, acute graft rejection, and chronic graft rejection.

[0651] In preferred embodiments, polynucleotides, polypeptides, and/or agonists or antagonists of the invention are used to inhibit growth, progression, and/or metastasis of cancers, in particular those listed above.

[0652] Additional diseases or conditions associated with increased cell survival that could be detected, prevented, diagnosed, prognosticated, treated, and/or ameliorated by polynucleotides, polypeptides, and/or agonists or antagonists of the invention, include, but are not limited to, progression, and/or metastases of malignancies and related disorders such as leukemia (including acute leukemias (e.g., acute lymphocytic leukemia, acute myelocytic leukemia (including myeloblastic, promyelocytic, myelomonocytic, monocytic, and erythroleukemia)) and chronic leukemias (e.g., chronic myelocytic (granulocytic) leukemia and chronic lymphocytic leukemia)), polycythemia vera, lymphomas (e.g., Hodgkin's disease and non-Hodgkin's disease), multiple myeloma, Waldenstrom's macroglobulinemia, heavy chain disease, and solid tumors including, but not limited to, sarcomas and carcinomas such as fibrosarcoma, myxosarcoma, liposarcoma, chondrosarcoma, osteogenic sarcoma, chordoma, angiosarcoma, endotheliosarcoma, lymphangiosarcoma, lymphangioendotheliosarcoma, synovioma, mesothelioma, Ewing's tumor, leiomyosarcoma, rhabdomyosarcoma, colon carcinoma, pancreatic cancer, breast cancer, ovarian cancer, prostate cancer, squamous cell carcinoma, basal cell carcinoma, adenocarcinoma, sweat gland carcinoma, sebaceous gland carcinoma, papillary carcinoma, papillary adenocarcinomas, cystadenocarcinoma, medullary carcinoma, bronchogenic carcinoma, renal cell carcinoma, hepatoma, bile duct carcinoma, choriocarcinoma, seminoma, embryonal carcinoma, Wilm's tumor, cervical cancer, testicular tumor, lung carcinoma, small cell lung carcinoma, bladder carcinoma, epithelial carcinoma, glioma, astrocytoma, medulloblastoma, craniopharyngioma, ependymoma, pinealoma, emangioblastoma, acoustic neuroma, oligodendroglioma, menangioma, melanoma, neuroblastoma, and retinoblastoma.

[0653] Diseases associated with increased apoptosis that could be detected, prevented, diagnosed, prognosticated, treated, and/or ameliorated by polynucleotides, polypeptides, and/or agonists or antagonists of the invention, include AIDS; neurodegenerative disorders (such as Alzheimer's disease, Parkinson's disease, amyotrophic lateral sclerosis, retinitis pigmentosa, cerebellar degeneration and brain tumor or prior associated disease); autoimmune disorders (such as, multiple sclerosis, Sjogren's syndrome, Hashimoto's thyroiditis, biliary cirrhosis, Behcet's disease, Crohn's disease, polymyositis, systemic lupus erythematosus and immune-related glomerulonephritis and rheumatoid arthritis) myelodysplastic syndromes (such as aplastic anemia), graft v. host disease, ischemic injury (such as that caused by myocardial infarction, stroke and reperfusion injury), liver injury (e.g., hepatitis related liver injury, ischemia/reperfusion injury, cholestosis (bile duct injury) and liver cancer); toxin-induced liver disease (such as that caused by alcohol), septic shock, cachexia and anorexia.

[0654] Hyperproliferative diseases and/or disorders that could be detected, prevented, diagnosed, prognosticated, treated, and/or ameliorated by polynucleotides, polypeptides, and/or agonists or antagonists of the invention, include, but are not limited to, neoplasms located in the liver, abdomen, bone, breast, digestive system, pancreas, peritoneum, endocrine glands (adrenal, parathyroid, pituitary, testicles, ovary, thymus, thyroid), eye, head and neck, nervous system (central and peripheral), lymphatic system, pelvis, skin, soft tissue, spleen, thorax, and urogenital tract.

[0655] Similarly, other hyperproliferative disorders can also be detected, prevented, diagnosed, prognosticated, treated, and/or ameliorated by polynucleotides, polypeptides, and/or agonists or antagonists of the invention. Examples of such hyperproliferative disorders include, but are not limited to: hypergammaglobulinemia, lymphoproliferative disorders, paraproteinemias, purpura, sarcoidosis, Sezary Syndrome, Waldenstron's macroglobulinemia, Gaucher's Disease, histiocytosis, and any other hyperproliferative disease, besides neoplasia, located in an organ system listed above.

[0656] Another preferred embodiment utilizes polynucleotides of the present invention to inhibit aberrant cellular division, by gene therapy using the present invention, and/or protein fusions or fragments thereof.

[0657] Thus, the present invention provides a method for treating cell proliferative disorders by inserting into an abnormally proliferating cell a polynucleotide of the present invention, wherein said polynucleotide represses said expression.

[0658] Another embodiment of the present invention provides a method of treating cell-proliferative disorders in individuals comprising administration of one or more active gene copies of the present invention to an abnormally proliferating cell or cells. In a preferred embodiment, polynucleotides of the present invention is a DNA construct comprising a recombinant expression vector effective in expressing a DNA sequence encoding said polynucleotides. In another preferred embodiment of the present invention, the DNA construct encoding the poynucleotides of the present invention is inserted into cells to be treated utilizing a retrovirus, or more preferably an adenoviral vector (See G J. Nabel, et. al., PNAS 1999 96: 324-326, which is hereby incorporated by reference). In a most preferred embodiment, the viral vector is defective and will not transform non-proliferating cells, only proliferating cells. Moreover, in a preferred embodiment, the polynucleotides of the present invention inserted into proliferating cells either alone, or in combination with or fused to other polynucleotides, can then be modulated via an external stimulus (i.e. magnetic, specific small molecule, chemical, or drug administration, etc.), which acts upon the promoter upstream of said polynucleotides to induce expression of the encoded protein product. As such the beneficial therapeutic affect of the present invention may be expressly modulated (i.e. to increase, decrease, or inhibit expression of the present invention) based upon said external stimulus.

[0659] Polynucleotides of the present invention may be useful in repressing expression of oncogenic genes or antigens. By “repressing expression of the oncogenic genes” is intended the suppression of the transcription of the gene, the degradation of the gene transcript (pre-message RNA), the inhibition of splicing, the destruction of the messenger RNA, the prevention of the post-translational modifications of the protein, the destruction of the protein, or the inhibition of the normal function of the protein.

[0660] For local administration to abnormally proliferating cells, polynucleotides of the present invention may be administered by any method known to those of skill in the art including, but not limited to transfection, electroporation, microinjection of cells, or in vehicles such as liposomes, lipofectin, or as naked polynucleotides, or any other method described throughout the specification. The polynucleotide of the present invention may be delivered by known gene delivery systems such as, but not limited to, retroviral vectors (Gilboa, J. Virology 44:845 (1982); Hocke, Nature 320:275 (1986); Wilson, et al., Proc. Natl. Acad. Sci. U.S.A. 85:3014), vaccinia virus system (Chakrabarty et al., Mol. Cell Biol. 5:3403 (1985) or other efficient DNA delivery systems (Yates et al., Nature 313:812 (1985)) known to those skilled in the art. These references are exemplary only and are hereby incorporated by reference. In order to specifically deliver or transfect cells which are abnormally proliferating and spare non-dividing cells, it is preferable to utilize a retrovirus, or adenoviral (as described in the art and elsewhere herein) delivery system known to those of skill in the art. Since host DNA replication is required for retroviral DNA to integrate and the retrovirus will be unable to self replicate due to the lack of the retrovirus genes needed for its life cycle. Utilizing such a retroviral delivery system for polynucleotides of the present invention will target said gene and constructs to abnormally proliferating cells and will spare the non-dividing normal cells.

[0661] The polynucleotides of the present invention may be delivered directly to cell proliferative disorder/disease sites in internal organs, body cavities and the like by use of imaging devices used to guide an injecting needle directly to the disease site. The polynucleotides of the present invention may also be administered to disease sites at the time of surgical intervention.

[0662] By “cell proliferative disease” is meant any human or animal disease or disorder, affecting any one or any combination of organs, cavities, or body parts, which is characterized by single or multiple local abnormal proliferations of cells, groups of cells, or tissues, whether benign or malignant.

[0663] Any amount of the polynucleotides of the present invention may be administered as long as it has a biologically inhibiting effect on the proliferation of the treated cells. Moreover, it is possible to administer more than one of the polynucleotide of the present invention simultaneously to the same site. By “biologically inhibiting” is meant partial or total growth inhibition as well as decreases in the rate of proliferation or growth of the cells. The biologically inhibitory dose may be determined by assessing the effects of the polynucleotides of the present invention on target malignant or abnormally proliferating cell growth in tissue culture, tumor growth in animals and cell cultures, or any other method known to one of ordinary skill in the art.

[0664] The present invention is further directed to antibody-based therapies which involve administering of anti-polypeptides and anti-polynucleotide antibodies to a mammalian, preferably human, patient for treating one or more of the described disorders. Methods for producing anti-polypeptides and anti-polynucleotide antibodies polyclonal and monoclonal antibodies are described in detail elsewhere herein. Such antibodies may be provided in pharmaceutically acceptable compositions as known in the art or as described herein.

[0665] A summary of the ways in which the antibodies of the present invention may be used therapeutically includes binding polynucleotides or polypeptides of the present invention locally or systemically in the body or by direct cytotoxicity of the antibody, e.g. as mediated by complement (CDC) or by effector cells (ADCC). Some of these approaches are described in more detail below. Armed with the teachings provided herein, one of ordinary skill in the art will know how to use the antibodies of the present invention for diagnosis, prognosis, monitoring, or therapeutic purposes without undue experimentation.

[0666] In particular, the antibodies, fragments and derivatives of the present invention are useful for treating a subject having or developing cell proliferative and/or differentiation disorders as described herein. Such treatment comprises administering a single or multiple doses of the antibody, or a fragment, derivative, or a conjugate thereof.

[0667] The antibodies of this invention may be advantageously utilized in combination with other monoclonal or chimeric antibodies, or with lymphokines or hematopoietic growth factors, for example, which serve to increase the number or activity of effector cells which interact with the antibodies.

[0668] It is preferred to use high affinity and/or potent in vivo inhibiting and/or neutralizing antibodies against polypeptides or polynucleotides of the present invention, fragments or regions thereof, for both immunoassays directed to and therapy of disorders related to polynucleotides or polypeptides, including fragements thereof, of the present invention. Such antibodies, fragments, or regions, will preferably have an affinity for polynucleotides or polypeptides, including fragements thereof. Preferred binding affinities include those with a dissociation constant or Kd less than 5×10⁻⁶M, 10⁻⁶M, 5×10⁻⁷M, 10⁻⁷M, 5×10⁻⁸M, 10⁻⁸M, 5×10⁻⁹M, 10⁻⁹M, 5×10⁻¹⁰M, 10⁻¹⁰M, 5×10⁻¹¹M, 10⁻¹¹M, 5×10⁻¹²M, 10⁻¹²M, 5×10⁻¹³M, 10⁻¹³M, 5×10⁻¹⁴M, 10⁻¹⁴M, 5×10⁻¹⁵M, and 10⁻¹⁵M.

[0669] Moreover, polypeptides of the present invention are useful in inhibiting the angiogenesis of proliferative cells or tissues, either alone, as a protein fusion, or in combination with other polypeptides directly or indirectly, as described elsewhere herein. In a most preferred embodiment, said anti-angiogenesis effect may be achieved indirectly, for example, through the inhibition of hematopoietic, tumor-specific cells, such as tumor-associated macrophages (See Joseph I B, et al. J Natl Cancer Inst, 90(21):1648-53 (1998), which is hereby incorporated by reference). Antibodies directed to polypeptides or polynucleotides of the present invention may also result in inhibition of angiogenesis directly, or indirectly (See Witte L, et al., Cancer Metastasis Rev. 17(2):155-61 (1998), which is hereby incorporated by reference)).

[0670] Polypeptides, including protein fusions, of the present invention, or fragments thereof may be useful in inhibiting proliferative cells or tissues through the induction of apoptosis. Said polypeptides may act either directly, or indirectly to induce apoptosis of proliferative cells and tissues, for example in the activation of a death-domain receptor, such as tumor necrosis factor (TNF) receptor-1, CD95 (Fas/APO-1), TNF-receptor-related apoptosis-mediated protein (TRAMP) and TNF-related apoptosis-inducing ligand (TRAIL) receptor-1 and -2 (See Schulze-Osthoff K, et. al., Eur J Biochem 254(3):439-59 (1998), which is hereby incorporated by reference). Moreover, in another preferred embodiment of the present invention, said polypeptides may induce apoptosis through other mechanisms, such as in the activation of other proteins which will activate apoptosis, or through stimulating the expression of said proteins, either alone or in combination with small molecule drugs or adjuviants, such as apoptonin, galectins, thioredoxins, anti-inflammatory proteins (See for example, Mutat Res 400(1-2):447-55 (1998), Med Hypotheses.50(5):423-33 (1998), Chem Biol Interact. April 24; 111-112:23-34 (1998), J Mol Med.76(6):402-12 (1998), Int J Tissue React;20(1):3-15 (1998), which are all hereby incorporated by reference).

[0671] Polypeptides, including protein fusions to, or fragments thereof, of the present invention are useful in inhibiting the metastasis of proliferative cells or tissues. Inhibition may occur as a direct result of administering polypeptides, or antibodies directed to said polypeptides as described elsewere herein, or indirectly, such as activating the expression of proteins known to inhibit metastasis, for example alpha 4 integrins, (See, e.g., Curr Top Microbiol Immunol 1998; 231:125-41, which is hereby incorporated by reference). Such thereapeutic affects of the present invention may be achieved either alone, or in combination with small molecule drugs or adjuvants.

[0672] In another embodiment, the invention provides a method of delivering compositions containing the polypeptides of the invention (e.g., compositions containing polypeptides or polypeptide antibodes associated with heterologous polypeptides, heterologous nucleic acids, toxins, or prodrugs) to targeted cells expressing the polypeptide of the present invention. Polypeptides or polypeptide antibodes of the invention may be associated with with heterologous polypeptides, heterologous nucleic acids, toxins, or prodrugs via hydrophobic, hydrophilic, ionic and/or covalent interactions.

[0673] Polypeptides, protein fusions to, or fragments thereof, of the present invention are useful in enhancing the immunogenicity and/or antigenicity of proliferating cells or tissues, either directly, such as would occur if the polypeptides of the present invention ‘vaccinated’ the immune response to respond to proliferative antigens and immunogens, or indirectly, such as in activating the expression of proteins known to enhance the immune response (e.g. chemokines), to said antigens and immunogens.

[0674] Anti-Angiogenesis Activity

[0675] The naturally occurring balance between endogenous stimulators and inhibitors of angiogenesis is one in which inhibitory influences predominate. Rastinejad et al., Cell 56:345-355 (1989). In those rare instances in which neovascularization occurs under normal physiological conditions, such as wound healing, organ regeneration, embryonic development, and female reproductive processes, angiogenesis is stringently regulated and spatially and temporally delimited. Under conditions of pathological angiogenesis such as that characterizing solid tumor growth, these regulatory controls fail. Unregulated angiogenesis becomes pathologic and sustains progression of many neoplastic and non-neoplastic diseases. A number of serious diseases are dominated by abnormal neovascularization including solid tumor growth and metastases, arthritis, some types of eye disorders, and psoriasis. See, e.g., reviews by Moses et al., Biotech. 9:630-634 (1991); Folkman et al., N. Engl. J. Med., 333:1757-1763 (1995); Auerbach et al., J. Microvasc. Res. 29:401-411 (1985); Folkman, Advances in Cancer Research, eds. Klein and Weinhouse, Academic Press, New York, pp. 175-203 (1985); Patz, Am. J. Opthalmol. 94:715-743 (1982); and Folkman et al., Science 221:719-725 (1983). In a number of pathological conditions, the process of angiogenesis contributes to the disease state. For example, significant data have accumulated which suggest that the growth of solid tumors is dependent on angiogenesis. Folkman and Klagsbrun, Science 235:442-447 (1987).

[0676] The present invention provides for treatment of diseases or disorders associated with neovascularization by administration of the polynucleotides and/or polypeptides of the invention, as well as agonists or antagonists of the present invention. Malignant and metastatic conditions which can be treated with the polynucleotides and polypeptides, or agonists or antagonists of the invention include, but are not limited to, malignancies, solid tumors, and cancers described herein and otherwise known in the art (for a review of such disorders, see Fishman et al., Medicine, 2d Ed., J. B. Lippincott Co., Philadelphia (1985)).Thus, the present invention provides a method of treating an angiogenesis-related disease and/or disorder, comprising administering to an individual in need thereof a therapeutically effective amount of a polynucleotide, polypeptide, antagonist and/or agonist of the invention. For example, polynucleotides, polypeptides, antagonists and/or agonists may be utilized in a variety of additional methods in order to therapeutically treat a cancer or tumor. Cancers which may be treated with polynucleotides, polypeptides, antagonists and/or agonists include, but are not limited to solid tumors, including prostate, lung, breast, ovarian, stomach, pancreas, larynx, esophagus, testes, liver, parotid, biliary tract, colon, rectum, cervix, uterus, endometrium, kidney, bladder, thyroid cancer; primary tumors and metastases; melanomas; glioblastoma; Kaposi's sarcoma; leiomyosarcoma; non-small cell lung cancer; colorectal cancer; advanced malignancies; and blood born tumors such as leukemias. For example, polynucleotides, polypeptides, antagonists and/or agonists may be delivered topically, in order to treat cancers such as skin cancer, head and neck tumors, breast tumors, and Kaposi's sarcoma.

[0677] Within yet other aspects, polynucleotides, polypeptides, antagonists and/or agonists may be utilized to treat superficial forms of bladder cancer by, for example, intravesical administration. Polynucleotides, polypeptides, antagonists and/or agonists may be delivered directly into the tumor, or near the tumor site, via injection or a catheter. Of course, as the artisan of ordinary skill will appreciate, the appropriate mode of administration will vary according to the cancer to be treated. Other modes of delivery are discussed herein.

[0678] Polynucleotides, polypeptides, antagonists and/or agonists may be useful in treating other disorders, besides cancers, which involve angiogenesis. These disorders include, but are not limited to: benign tumors, for example hemangiomas, acoustic neuromas, neurofibromas, trachomas, and pyogenic granulomas; artheroscleric plaques; ocular angiogenic diseases, for example, diabetic retinopathy, retinopathy of prematurity, macular degeneration, corneal graft rejection, neovascular glaucoma, retrolental fibroplasia, rubeosis, retinoblastoma, uvietis and Pterygia (abnormal blood vessel growth) of the eye; rheumatoid arthritis; psoriasis; delayed wound healing; endometriosis; vasculogenesis; granulations; hypertrophic scars (keloids); nonunion fractures; scleroderma; trachoma; vascular adhesions; myocardial angiogenesis; coronary collaterals; cerebral collaterals; arteriovenous malformations; ischemic limb angiogenesis; Osler-Webber Syndrome; plaque neovascularization; telangiectasia; hemophiliac joints; angiofibroma; fibromuscular dysplasia; wound granulation; Crohn's disease; and atherosclerosis.

[0679] For example, within one aspect of the present invention methods are provided for treating hypertrophic scars and keloids, comprising the step of administering a polynucleotide, polypeptide, antagonist and/or agonist of the invention to a hypertrophic scar or keloid.

[0680] Within one embodiment of the present invention polynucleotides, polypeptides, antagonists and/or agonists of the invention are directly injected into a hypertrophic scar or keloid, in order to prevent the progression of these lesions. This therapy is of particular value in the prophylactic treatment of conditions which are known to result in the development of hypertrophic scars and keloids (e.g., burns), and is preferably initiated after the proliferative phase has had time to progress (approximately 14 days after the initial injury), but before hypertrophic scar or keloid development. As noted above, the present invention also provides methods for treating neovascular diseases of the eye, including for example, corneal neovascularization, neovascular glaucoma, proliferative diabetic retinopathy, retrolental fibroplasia and macular degeneration.

[0681] Moreover, Ocular disorders associated with neovascularization which can be treated with the polynucleotides and polypeptides of the present invention (including agonists and/or antagonists) include, but are not limited to: neovascular glaucoma, diabetic retinopathy, retinoblastoma, retrolental fibroplasia, uveitis, retinopathy of prematurity macular degeneration, corneal graft neovascularization, as well as other eye inflammatory diseases, ocular tumors and diseases associated with choroidal or iris neovascularization. See, e.g., reviews by Waltman et al., Am. J. Ophthal. 85:704-710 (1978) and Gartner et al., Surv. Ophthal. 22:291-312 (1978).

[0682] Thus, within one aspect of the present invention methods are provided for treating neovascular diseases of the eye such as corneal neovascularization (including corneal graft neovascularization), comprising the step of administering to a patient a therapeutically effective amount of a compound (as described above) to the cornea, such that the formation of blood vessels is inhibited. Briefly, the cornea is a tissue which normally lacks blood vessels. In certain pathological conditions however, capillaries may extend into the cornea from the pericorneal vascular plexus of the limbus. When the cornea becomes vascularized, it also becomes clouded, resulting in a decline in the patient's visual acuity. Visual loss may become complete if the cornea completely opacitates. A wide variety of disorders can result in corneal neovascularization, including for example, corneal infections (e.g., trachoma, herpes simplex keratitis, leishmaniasis and onchocerciasis), immunological processes (e.g., graft rejection and Stevens-Johnson's syndrome), alkali burns, trauma, inflammation (of any cause), toxic and nutritional deficiency states, and as a complication of wearing contact lenses.

[0683] Within particularly preferred embodiments of the invention, may be prepared for topical administration in saline (combined with any of the preservatives and antimicrobial agents commonly used in ocular preparations), and administered in eyedrop form. The solution or suspension may be prepared in its pure form and administered several times daily. Alternatively, anti-angiogenic compositions, prepared as described above, may also be administered directly to the cornea. Within preferred embodiments, the anti-angiogenic composition is prepared with a muco-adhesive polymer which binds to cornea. Within further embodiments, the anti-angiogenic factors or anti-angiogenic compositions may be utilized as an adjunct to conventional steroid therapy. Topical therapy may also be useful prophylactically in corneal lesions which are known to have a high probability of inducing an angiogenic response (such as chemical burns). In these instances the treatment, likely in combination with steroids, may be instituted immediately to help prevent subsequent complications.

[0684] Within other embodiments, the compounds described above may be injected directly into the corneal stroma by an ophthalmologist under microscopic guidance. The preferred site of injection may vary with the morphology of the individual lesion, but the goal of the administration would be to place the composition at the advancing front of the vasculature (i.e., interspersed between the blood vessels and the normal cornea). In most cases this would involve perilimbic corneal injection to “protect” the cornea from the advancing blood vessels. This method may also be utilized shortly after a corneal insult in order to prophylactically prevent corneal neovascularization. In this situation the material could be injected in the perilimbic cornea interspersed between the corneal lesion and its undesired potential limbic blood supply. Such methods may also be utilized in a similar fashion to prevent capillary invasion of transplanted corneas. In a sustained-release form injections might only be required 2-3 times per year. A steroid could also be added to the injection solution to reduce inflammation resulting from the injection itself.

[0685] Within another aspect of the present invention, methods are provided for treating neovascular glaucoma, comprising the step of administering to a patient a therapeutically effective amount of a polynucleotide, polypeptide, antagonist and/or agonist to the eye, such that the formation of blood vessels is inhibited. In one embodiment, the compound may be administered topically to the eye in order to treat early forms of neovascular glaucoma. Within other embodiments, the compound may be implanted by injection into the region of the anterior chamber angle. Within other embodiments, the compound may also be placed in any location such that the compound is continuously released into the aqueous humor. Within another aspect of the present invention, methods are provided for treating proliferative diabetic retinopathy, comprising the step of administering to a patient a therapeutically effective amount of a polynucleotide, polypeptide, antagonist and/or agonist to the eyes, such that the formation of blood vessels is inhibited.

[0686] Within particularly preferred embodiments of the invention, proliferative diabetic retinopathy may be treated by injection into the aqueous humor or the vitreous, in order to increase the local concentration of the polynucleotide, polypeptide, antagonist and/or agonist in the retina. Preferably, this treatment should be initiated prior to the acquisition of severe disease requiring photocoagulation.

[0687] Within another aspect of the present invention, methods are provided for treating retrolental fibroplasia, comprising the step of administering to a patient a therapeutically effective amount of a polynucleotide, polypeptide, antagonist and/or agonist to the eye, such that the formation of blood vessels is inhibited. The compound may be administered topically, via intravitreous injection and/or via intraocular implants.

[0688] Additionally, disorders which can be treated with the polynucleotides, polypeptides, agonists and/or agonists include, but are not limited to, hemangioma, arthritis, psoriasis, angiofibroma, atherosclerotic plaques, delayed wound healing, granulations, hemophilic joints, hypertrophic scars, nonunion fractures, Osler-Weber syndrome, pyogenic granuloma, scleroderma, trachoma, and vascular adhesions.

[0689] Moreover, disorders and/or states, which can be detected, prevented, diagnosed, prognosticated, treated, and/or ameliorated with the the polynucleotides, polypeptides, agonists and/or agonists of the invention include, but are not limited to, solid tumors, blood born tumors such as leukemias, tumor metastasis, Kaposi's sarcoma, benign tumors, for example hemangiomas, acoustic neuromas, neurofibromas, trachomas, and pyogenic granulomas, rheumatoid arthritis, psoriasis, ocular angiogenic diseases, for example, diabetic retinopathy, retinopathy of prematurity, macular degeneration, corneal graft rejection, neovascular glaucoma, retrolental fibroplasia, rubeosis, retinoblastoma, and uvietis, delayed wound healing, endometriosis, vascluogenesis, granulations, hypertrophic scars (keloids), nonunion fractures, scleroderma, trachoma, vascular adhesions, myocardial angiogenesis, coronary collaterals, cerebral collaterals, arteriovenous malformations, ischemic limb angiogenesis, Osler-Webber Syndrome, plaque neovascularization, telangiectasia, hemophiliac joints, angiofibroma fibromuscular dysplasia, wound granulation, Crohn's disease, atherosclerosis, birth control agent by preventing vascularization required for embryo implantation controlling menstruation, diseases that have angiogenesis as a pathologic consequence such as cat scratch disease (Rochele minalia quintosa), ulcers (Helicobacter pylori), Bartonellosis and bacillary angiomatosis.

[0690] In one aspect of the birth control method, an amount of the compound sufficient to block embryo implantation is administered before or after intercourse and fertilization have occurred, thus providing an effective method of birth control, possibly a “morning after” method. Polynucleotides, polypeptides, agonists and/or agonists may also be used in controlling menstruation or administered as either a peritoneal lavage fluid or for peritoneal implantation in the treatment of endometriosis.

[0691] Polynucleotides, polypeptides, agonists and/or agonists of the present invention may be incorporated into surgical sutures in order to prevent stitch granulomas.

[0692] Polynucleotides, polypeptides, agonists and/or agonists may be utilized in a wide variety of surgical procedures. For example, within one aspect of the present invention a compositions (in the form of, for example, a spray or film) may be utilized to coat or spray an area prior to removal of a tumor, in order to isolate normal surrounding tissues from malignant tissue, and/or to prevent the spread of disease to surrounding tissues. Within other aspects of the present invention, compositions (e.g., in the form of a spray) may be delivered via endoscopic procedures in order to coat tumors, or inhibit angiogenesis in a desired locale. Within yet other aspects of the present invention, surgical meshes which have been coated with anti-angiogenic compositions of the present invention may be utilized in any procedure wherein a surgical mesh might be utilized. For example, within one embodiment of the invention a surgical mesh laden with an anti-angiogenic composition may be utilized during abdominal cancer resection surgery (e.g., subsequent to colon resection) in order to provide support to the structure, and to release an amount of the anti-angiogenic factor.

[0693] Within further aspects of the present invention, methods are provided for treating tumor excision sites, comprising administering a polynucleotide, polypeptide, agonist and/or agonist to the resection margins of a tumor subsequent to excision, such that the local recurrence of cancer and the formation of new blood vessels at the site is inhibited. Within one embodiment of the invention, the anti-angiogenic compound is administered directly to the tumor excision site (e.g., applied by swabbing, brushing or otherwise coating the resection margins of the tumor with the anti-angiogenic compound). Alternatively, the anti-angiogenic compounds may be incorporated into known surgical pastes prior to administration. Within particularly preferred embodiments of the invention, the anti-angiogenic compounds are applied after hepatic resections for malignancy, and after neurosurgical operations.

[0694] Within one aspect of the present invention, polynucleotides, polypeptides, agonists and/or agonists may be administered to the resection margin of a wide variety of tumors, including for example, breast, colon, brain and hepatic tumors. For example, within one embodiment of the invention, anti-angiogenic compounds may be administered to the site of a neurological tumor subsequent to excision, such that the formation of new blood vessels at the site are inhibited.

[0695] The polynucleotides, polypeptides, agonists and/or agonists of the present invention may also be administered along with other anti-angiogenic factors. Representative examples of other anti-angiogenic factors include: Anti-Invasive Factor, retinoic acid and derivatives thereof, paclitaxel, Suramin, Tissue Inhibitor of Metalloproteinase-1, Tissue Inhibitor of Metalloproteinase-2, Plasminogen Activator Inhibitor-1, Plasminogen Activator Inhibitor-2, and various forms of the lighter “d group” transition metals.

[0696] Lighter “d group” transition metals include, for example, vanadium, molybdenum, tungsten, titanium, niobium, and tantalum species. Such transition metal species may form transition metal complexes. Suitable complexes of the above-mentioned transition metal species include oxo transition metal complexes.

[0697] Representative examples of vanadium complexes include oxo vanadium complexes such as vanadate and vanadyl complexes. Suitable vanadate complexes include metavanadate and orthovanadate complexes such as, for example, ammonium metavanadate, sodium metavanadate, and sodium orthovanadate. Suitable vanadyl complexes include, for example, vanadyl acetylacetonate and vanadyl sulfate including vanadyl sulfate hydrates such as vanadyl sulfate mono- and trihydrates.

[0698] Representative examples of tungsten and molybdenum complexes also include oxo complexes. Suitable oxo tungsten complexes include tungstate and tungsten oxide complexes. Suitable tungstate complexes include ammonium tungstate, calcium tungstate, sodium tungstate dihydrate, and tungstic acid. Suitable tungsten oxides include tungsten (IV) oxide and tungsten (VI) oxide. Suitable oxo molybdenum complexes include molybdate, molybdenum oxide, and molybdenyl complexes. Suitable molybdate complexes include ammonium molybdate and its hydrates, sodium molybdate and its hydrates, and potassium molybdate and its hydrates. Suitable molybdenum oxides include molybdenum (VI) oxide, molybdenum (VI) oxide, and molybdic acid. Suitable molybdenyl complexes include, for example, molybdenyl acetylacetonate. Other suitable tungsten and molybdenum complexes include hydroxo derivatives derived from, for example, glycerol, tartaric acid, and sugars.

[0699] A wide variety of other anti-angiogenic factors may also be utilized within the context of the present invention. Representative examples include platelet factor 4; protamine sulphate; sulphated chitin derivatives (prepared from queen crab shells), (Murata et al., Cancer Res. 51:22-26, 1991); Sulphated Polysaccharide Peptidoglycan Complex (SP-PG) (the function of this compound may be enhanced by the presence of steroids such as estrogen, and tamoxifen citrate); Staurosporine; modulators of matrix metabolism, including for example, proline analogs, cishydroxyproline, d,L-3,4-dehydroproline, Thiaproline, alpha,alpha-dipyridyl, aminopropionitrile fumarate; 4-propyl-5-(4-pyridinyl)-2(3H)-oxazolone; Methotrexate; Mitoxantrone; Heparin; Interferons; 2 Macroglobulin-serum; ChIMP-3 (Pavloff et al., J. Bio. Chem. 267:17321-17326, 1992); Chymostatin (Tomkinson et al., Biochem J. 286:475-480, 1992); Cyclodextrin Tetradecasulfate; Eponemycin; Camptothecin; Fumagillin (Ingber et al., Nature 348:555-557, 1990); Gold Sodium Thiomalate (“GST”; Matsubara and Ziff, J. Clin. Invest. 79:1440-1446, 1987); anticollagenase-serum; alpha2-antiplasmin (Holmes et al., J. Biol. Chem. 262(4):1659-1664, 1987); Bisantrene (National Cancer Institute); Lobenzarit disodium (N-(2)-carboxyphenyl-4-chloroanthronilic acid disodium or “CCA”; Takeuchi et al., Agents Actions 36:312-316, 1992); Thalidomide; Angostatic steroid; AGM-1470; carboxynaminolmidazole; and metalloproteinase inhibitors such as BB94.

[0700] Diseases at the Cellular Level

[0701] Diseases associated with increased cell survival or the inhibition of apoptosis that could be detected, prevented, diagnosed, prognosticated, treated, and/or ameliorated using polynucleotides or polypeptides, as well as antagonists or agonists of the present invention, include cancers (such as follicular lymphomas, carcinomas with p53 mutations, and hormone-dependent tumors, including, but not limited to colon cancer, cardiac tumors, pancreatic cancer, melanoma, retinoblastoma, glioblastoma, lung cancer, intestinal cancer, testicular cancer, stomach cancer, neuroblastoma, myxoma, myoma, lymphoma, endothelioma, osteoblastoma, osteoclastoma, osteosarcoma, chondrosarcoma, adenoma, breast cancer, prostate cancer, Kaposi's sarcoma and ovarian cancer); autoimmune disorders (such as, multiple sclerosis, Sjogren's syndrome, Hashimoto's thyroiditis, biliary cirrhosis, Behcet's disease, Crohn's disease, polymyositis, systemic lupus erythematosus and immune-related glomerulonephritis and rheumatoid arthritis) and viral infections (such as herpes viruses, pox viruses and adenoviruses), inflammation, graft v. host disease, acute graft rejection, and chronic graft rejection.

[0702] In preferred embodiments, polynucleotides, polypeptides, and/or antagonists of the invention are used to inhibit growth, progression, and/or metasis of cancers, in particular those listed above.

[0703] Additional diseases or conditions associated with increased cell survival that could be treated or detected by polynucleotides or polypeptides, or agonists or antagonists of the present invention include, but are not limited to, progression, and/or metastases of malignancies and related disorders such as leukemia (including acute leukemias (e.g., acute lymphocytic leukemia, acute myelocytic leukemia (including myeloblastic, promyelocytic, myelomonocytic, monocytic, and erythroleukemia)) and chronic leukemias (e.g., chronic myelocytic (granulocytic) leukemia and chronic lymphocytic leukemia)), polycythemia vera, lymphomas (e.g., Hodgkin's disease and non-Hodgkin's disease), multiple myeloma, Waldenstrom's macroglobulinemia, heavy chain disease, and solid tumors including, but not limited to, sarcomas and carcinomas such as fibrosarcoma, myxosarcoma, liposarcoma, chondrosarcoma, osteogenic sarcoma, chordoma, angiosarcoma, endotheliosarcoma, lymphangiosarcoma, lymphangioendotheliosarcoma, synovioma, mesothelioma, Ewing's tumor, leiomyosarcoma, rhabdomyosarcoma, colon carcinoma, pancreatic cancer, breast cancer, ovarian cancer, prostate cancer, squamous cell carcinoma, basal cell carcinoma, adenocarcinoma, sweat gland carcinoma, sebaceous gland carcinoma, papillary carcinoma, papillary adenocarcinomas, cystadenocarcinoma, medullary carcinoma, bronchogenic carcinoma, renal cell carcinoma, hepatoma, bile duct carcinoma, choriocarcinoma, seminoma, embryonal carcinoma, Wilm's tumor, cervical cancer, testicular tumor, lung carcinoma, small cell lung carcinoma, bladder carcinoma, epithelial carcinoma, glioma, astrocytoma, medulloblastoma, craniopharyngioma, ependymoma, pinealoma, hemangioblastoma, acoustic neuroma, oligodendroglioma, menangioma, melanoma, neuroblastoma, and retinoblastoma.

[0704] Diseases associated with increased apoptosis that could be detected, prevented, diagnosed, prognosticated, treated, and/or ameliorated using polynucleotides or polypeptides, as well as agonists or antagonists of the present invention, include, but are not limited to, AIDS; neurodegenerative disorders (such as Alzheimer's disease, Parkinson's disease, Amyotrophic lateral sclerosis, Retinitis pigmentosa, Cerebellar degeneration and brain tumor or prior associated disease); autoimmune disorders (such as, multiple sclerosis, Sjogren's syndrome, Hashimoto's thyroiditis, biliary cirrhosis, Behcet's disease, Crohn's disease, polymyositis, systemic lupus erythematosus and immune-related glomerulonephritis and rheumatoid arthritis) myelodysplastic syndromes (such as aplastic anemia), graft v. host disease, ischemic injury (such as that caused by myocardial infarction, stroke and reperfusion injury), liver injury (e.g., hepatitis related liver injury, ischemia/reperfusion injury, cholestosis (bile duct injury) and liver cancer); toxin-induced liver disease (such as that caused by alcohol), septic shock, cachexia and anorexia.

[0705] Wound Healing and Epithelial Cell Proliferation

[0706] In accordance with yet a further aspect of the present invention, there is provided a process for utilizing polynucleotides or polypeptides, as well as agonists or antagonists of the present invention, for therapeutic purposes, for example, to stimulate epithelial cell proliferation and basal keratinocytes for the purpose of wound healing, and to stimulate hair follicle production and healing of dermal wounds. Polynucleotides or polypeptides, as well as agonists or antagonists of the present invention, may be clinically useful in stimulating wound healing including surgical wounds, excisional wounds, deep wounds involving damage of the dermis and epidermis, eye tissue wounds, dental tissue wounds, oral cavity wounds, diabetic ulcers, dermal ulcers, cubitus ulcers, arterial ulcers, venous stasis ulcers, burns resulting from heat exposure or chemicals, and other abnormal wound healing conditions such as uremia, malnutrition, vitamin deficiencies and complications associated with systemic treatment with steroids, radiation therapy and antineoplastic drugs and antimetabolites. Polynucleotides or polypeptides, as well as agonists or antagonists of the present invention, could be used to promote dermal reestablishment subsequent to dermal loss

[0707] Polynucleotides or polypeptides, as well as agonists or antagonists of the present invention, could be used to increase the adherence of skin grafts to a wound bed and to stimulate re-epithelialization from the wound bed. The following are types of grafts that polynucleotides or polypeptides, agonists or antagonists of the present invention, could be used to increase adherence to a wound bed: autografts, artificial skin, allografts, autodermic graft, autoepdermic grafts, avacular grafts, Blair-Brown grafts, bone graft, brephoplastic grafts, cutis graft, delayed graft, dermic graft, epidermic graft, fascia graft, full thickness graft, heterologous graft, xenograft, homologous graft, hyperplastic graft, lamellar graft, mesh graft, mucosal graft, Ollier-Thiersch graft, omenpal graft, patch graft, pedicle graft, penetrating graft, split skin graft, thick split graft. Polynucleotides or polypeptides, as well as agonists or antagonists of the present invention, can be used to promote skin strength and to improve the appearance of aged skin.

[0708] It is believed that polynucleotides or polypeptides, as well as agonists or antagonists of the present invention, will also produce changes in hepatocyte proliferation, and epithelial cell proliferation in the lung, breast, pancreas, stomach, small intestine, and large intestine. Polynucleotides or polypeptides, as well as agonists or antagonists of the present invention, could promote proliferation of epithelial cells such as sebocytes, hair follicles, hepatocytes, type II pneumocytes, mucin-producing goblet cells, and other epithelial cells and their progenitors contained within the skin, lung, liver, and gastrointestinal tract. Polynucleotides or polypeptides, agonists or antagonists of the present invention, may promote proliferation of endothelial cells, keratinocytes, and basal keratinocytes.

[0709] Polynucleotides or polypeptides, as well as agonists or antagonists of the present invention, could also be used to reduce the side effects of gut toxicity that result from radiation, chemotherapy treatments or viral infections. Polynucleotides or polypeptides, as well as agonists or antagonists of the present invention, may have a cytoprotective effect on the small intestine mucosa. Polynucleotides or polypeptides, as well as agonists or antagonists of the present invention, may also stimulate healing of mucositis (mouth ulcers) that result from chemotherapy and viral infections.

[0710] Polynucleotides or polypeptides, as well as agonists or antagonists of the present invention, could further be used in full regeneration of skin in full and partial thickness skin defects, including burns, (i.e., repopulation of hair follicles, sweat glands, and sebaceous glands), treatment of other skin defects such as psoriasis. Polynucleotides or polypeptides, as well as agonists or antagonists of the present invention, could be used to treat epidermolysis bullosa, a defect in adherence of the epidermis to the underlying dermis which results in frequent, open and painful blisters by accelerating reepithelialization of these lesions. Polynucleotides or polypeptides, as well as agonists or antagonists of the present invention, could also be used to treat gastric and doudenal ulcers and help heal by scar formation of the mucosal lining and regeneration of glandular mucosa and duodenal mucosal lining more rapidly. Inflammatory bowel diseases, such as Crohn's disease and ulcerative colitis, are diseases which result in destruction of the mucosal surface of the small or large intestine, respectively. Thus, polynucleotides or polypeptides, as well as agonists or antagonists of the present invention, could be used to promote the resurfacing of the mucosal surface to aid more rapid healing and to prevent progression of inflammatory bowel disease. Treatment with polynucleotides or polypeptides, agonists or antagonists of the present invention, is expected to have a significant effect on the production of mucus throughout the gastrointestinal tract and could be used to protect the intestinal mucosa from injurious substances that are ingested or following surgery. Polynucleotides or polypeptides, as well as agonists or antagonists of the present invention, could be used to treat diseases associate with the under expression.

[0711] Moreover, polynucleotides or polypeptides, as well as agonists or antagonists of the present invention, could be used to prevent and heal damage to the lungs due to various pathological states. Polynucleotides or polypeptides, as well as agonists or antagonists of the present invention, which could stimulate proliferation and differentiation and promote the repair of alveoli and brochiolar epithelium to prevent or treat acute or chronic lung damage. For example, emphysema, which results in the progressive loss of aveoli, and inhalation injuries, i.e., resulting from smoke inhalation and burns, that cause necrosis of the bronchiolar epithelium and alveoli could be effectively treated using polynucleotides or polypeptides, agonists or antagonists of the present invention. Also, polynucleotides or polypeptides, as well as agonists or antagonists of the present invention, could be used to stimulate the proliferation of and differentiation of type II pneumocytes, which may help treat or prevent disease such as hyaline membrane diseases, such as infant respiratory distress syndrome and bronchopulmonary displasia, in premature infants.

[0712] Polynucleotides or polypeptides, as well as agonists or antagonists of the present invention, could stimulate the proliferation and differentiation of hepatocytes and, thus, could be used to alleviate or treat liver diseases and pathologies such as fulminant liver failure caused by cirrhosis, liver damage caused by viral hepatitis and toxic substances (i.e., acetaminophen, carbon tetraholoride and other hepatotoxins known in the art).

[0713] In addition, polynucleotides or polypeptides, as well as agonists or antagonists of the present invention, could be used treat or prevent the onset of diabetes mellitus. In patients with newly diagnosed Types I and II diabetes, where some islet cell function remains, polynucleotides or polypeptides, as well as agonists or antagonists of the present invention, could be used to maintain the islet function so as to alleviate, delay or prevent permanent manifestation of the disease. Also, polynucleotides or polypeptides, as well as agonists or antagonists of the present invention, could be used as an auxiliary in islet cell transplantation to improve or promote islet cell function.

[0714] Regeneration

[0715] Polynucleotides or polypeptides, as well as agonists or antagonists of the present invention can be used to differentiate, proliferate, and attract cells, leading to the regeneration of tissues. (See, Science 276:59-87 (1997)). The regeneration of tissues could be used to repair, replace, or protect tissue damaged by congenital defects, trauma (wounds, burns, incisions, or ulcers), age, disease (e.g. osteoporosis, osteocarthritis, periodontal disease, liver failure), surgery, including cosmetic plastic surgery, fibrosis, reperfusion injury, or systemic cytokine damage.

[0716] Tissues that could be regenerated using the present invention include organs (e.g., pancreas, liver, intestine, kidney, skin, endothelium), muscle (smooth, skeletal or cardiac), vasculature (including vascular and lymphatics), nervous, hematopoietic, and skeletal (bone, cartilage, tendon, and ligament) tissue. Preferably, regeneration occurs without or decreased scarring. Regeneration also may include angiogenesis.

[0717] Moreover, polynucleotides or polypeptides, as well as agonists or antagonists of the present invention, may increase regeneration of tissues difficult to heal. For example, increased tendon/ligament regeneration would quicken recovery time after damage. Polynucleotides or polypeptides, as well as agonists or antagonists of the present invention could also be used prophylactically in an effort to avoid damage. Specific diseases that could be treated include of tendinitis, carpal tunnel syndrome, and other tendon or ligament defects. A further example of tissue regeneration of non-healing wounds includes pressure ulcers, ulcers associated with vascular insufficiency, surgical, and traumatic wounds.

[0718] Similarly, nerve and brain tissue could also be regenerated by using polynucleotides or polypeptides, as well as agonists or antagonists of the present invention, to proliferate and differentiate nerve cells. Diseases that could be treated using this method include central and peripheral nervous system diseases, neuropathies, or mechanical and traumatic disorders (e.g., spinal cord disorders, head trauma, cerebrovascular disease, and stoke). Specifically, diseases associated with peripheral nerve injuries, peripheral neuropathy (e.g., resulting from chemotherapy or other medical therapies), localized neuropathies, and central nervous system diseases (e.g., Alzheimer's disease, Parkinson's disease, Huntington's disease, amyotrophic lateral sclerosis, and Shy-Drager syndrome), could all be treated using the polynucleotides or polypeptides, as well as agonists or antagonists of the present invention.

[0719] Chemotaxis

[0720] Polynucleotides or polypeptides, as well as agonists or antagonists of the present invention may have chemotaxis activity. A chemotaxic molecule attracts or mobilizes cells (e.g., monocytes, fibroblasts, neutrophils, T-cells, mast cells, eosinophils, epithelial and/or endothelial cells) to a particular site in the body, such as inflammation, infection, or site of hyperproliferation. The mobilized cells can then fight off and/or heal the particular trauma or abnormality.

[0721] Polynucleotides or polypeptides, as well as agonists or antagonists of the present invention may increase chemotaxic activity of particular cells. These chemotactic molecules can then be used to treat inflammation, infection, hyperproliferative disorders, or any immune system disorder by increasing the number of cells targeted to a particular location in the body. For example, chemotaxic molecules can be used to treat wounds and other trauma to tissues by attracting immune cells to the injured location. Chemotactic molecules of the present invention can also attract fibroblasts, which can be used to treat wounds.

[0722] It is also contemplated that polynucleotides or polypeptides, as well as agonists or antagonists of the present invention may inhibit chemotactic activity. These molecules could also be used to treat disorders. Thus, polynucleotides or polypeptides, as well as agonists or antagonists of the present invention could be used as an inhibitor of chemotaxis.

[0723] Binding Activity

[0724] A polypeptide of the present invention may be used to screen for molecules that bind to the polypeptide or for molecules to which the polypeptide binds. The binding of the polypeptide and the molecule may activate (agonist), increase, inhibit (antagonist), or decrease activity of the polypeptide or the molecule bound. Examples of such molecules include antibodies, oligonucleotides, proteins (e.g., receptors), or small molecules.

[0725] Preferably, the molecule is closely related to the natural ligand of the polypeptide, e.g., a fragment of the ligand, or a natural substrate, a ligand, a structural or functional mimetic. (See, Coligan et al., Current Protocols in Immunology 1(2):Chapter 5 (1991)). Similarly, the molecule can be closely related to the natural receptor to which the polypeptide binds, or at least, a fragment of the receptor capable of being bound by the polypeptide (e.g., active site). In either case, the molecule can be rationally designed using known techniques.

[0726] Preferably, the screening for these molecules involves producing appropriate cells which express the polypeptide. Preferred cells include cells from mammals, yeast, Drosophila, or E. coli. Cells expressing the polypeptide (or cell membrane containing the expressed polypeptide) are then preferably contacted with a test compound potentially containing the molecule to observe binding, stimulation, or inhibition of activity of either the polypeptide or the molecule.

[0727] The assay may simply test binding of a candidate compound to the polypeptide, wherein binding is detected by a label, or in an assay involving competition with a labeled competitor. Further, the assay may test whether the candidate compound results in a signal generated by binding to the polypeptide.

[0728] Alternatively, the assay can be carried out using cell-free preparations, polypeptide/molecule affixed to a solid support, chemical libraries, or natural product mixtures. The assay may also simply comprise the steps of mixing a candidate compound with a solution containing a polypeptide, measuring polypeptide/molecule activity or binding, and comparing the polypeptide/molecule activity or binding to a standard.

[0729] Preferably, an ELISA assay can measure polypeptide level or activity in a sample (e.g., biological sample) using a monoclonal or polyclonal antibody. The antibody can measure polypeptide level or activity by either binding, directly or indirectly, to the polypeptide or by competing with the polypeptide for a substrate.

[0730] Additionally, the receptor to which the polypeptide of the present invention binds can be identified by numerous methods known to those of skill in the art, for example, ligand panning and FACS sorting (Coligan, et al., Current Protocols in Immun., 1(2), Chapter 5, (1991)). For example, expression cloning is employed wherein polyadenylated RNA is prepared from a cell responsive to the polypeptides, for example, NIH3T3 cells which are known to contain multiple receptors for the FGF family proteins, and SC-3 cells, and a cDNA library created from this RNA is divided into pools and used to transfect COS cells or other cells that are not responsive to the polypeptides. Transfected cells which are grown on glass slides are exposed to the polypeptide of the present invention, after they have been labeled. The polypeptides can be labeled by a variety of means including iodination or inclusion of a recognition site for a site-specific protein kinase.

[0731] Following fixation and incubation, the slides are subjected to auto-radiographic analysis. Positive pools are identified and sub-pools are prepared and re-transfected using an iterative sub-pooling and re-screening process, eventually yielding a single clones that encodes the putative receptor.

[0732] As an alternative approach for receptor identification, the labeled polypeptides can be photoaffinity linked with cell membrane or extract preparations that express the receptor molecule. Cross-linked material is resolved by PAGE analysis and exposed to X-ray film. The labeled complex containing the receptors of the polypeptides can be excised, resolved into peptide fragments, and subjected to protein microsequencing. The amino acid sequence obtained from microsequencing would be used to design a set of degenerate oligonucleotide probes to screen a cDNA library to identify the genes encoding the putative receptors.

[0733] Moreover, the techniques of gene-shuffling, motif-shuffling, exon-shuffling, and/or codon-shuffling (collectively referred to as “DNA shuffling”) may be employed to modulate the activities of the polypeptide of the present invention thereby effectively generating agonists and antagonists of the polypeptide of the present invention. See generally, U.S. Pat. Nos. 5,605,793, 5,811,238, 5,830,721, 5,834,252, and 5,837,458, and Patten, P. A., et al., Curr. Opinion Biotechnol. 8:724-33 (1997); Harayama, S. Trends Biotechnol. 16(2):76-82 (1998); Hansson, L. O., et al., J. Mol. Biol. 287:265-76 (1999); and Lorenzo, M. M. and Blasco, R. Biotechniques 24(2):308-13 (1998); each of these patents and publications are hereby incorporated by reference). In one embodiment, alteration of polynucleotides and corresponding polypeptides may be achieved by DNA shuffling. DNA shuffling involves the assembly of two or more DNA segments into a desired molecule by homologous, or site-specific, recombination. In another embodiment, polynucleotides and corresponding polypeptides may be altered by being subjected to random mutagenesis by error-prone PCR, random nucleotide insertion or other methods prior to recombination. In another embodiment, one or more components, motifs, sections, parts, domains, fragments, etc., of the polypeptide of the present invention may be recombined with one or more components, motifs, sections, parts, domains, fragments, etc. of one or more heterologous molecules. In preferred embodiments, the heterologous molecules are family members. In further preferred embodiments, the heterologous molecule is a growth factor such as, for example, platelet-derived growth factor (PDGF), insulin-like growth factor (IGF-I), transforming growth factor (TGF)-alpha, epidermal growth factor (EGF), fibroblast growth factor (FGF), TGF-beta, bone morphogenetic protein (BMP)-2, BMP4, BMP-5, BMP-6, BMP-7, activins A and B, decapentaplegic(dpp), 60A, OP-2, dorsalin, growth differentiation factors (GDFs), nodal, MIS, inhibin-alpha, TGF-beta1, TGF-beta2, TGF-beta3, TGF-beta5, and glial-derived neurotrophic factor (GDNF).

[0734] Other preferred fragments are biologically active fragments of the polypeptide of the present invention. Biologically active fragments are those exhibiting activity similar, but not necessarily identical, to an activity of the polypeptide of the present invention. The biological activity of the fragments may include an improved desired activity, or a decreased undesirable activity.

[0735] Additionally, this invention provides a method of screening compounds to identify those which modulate the action of the polypeptide of the present invention. An example of such an assay comprises combining a mammalian fibroblast cell, a the polypeptide of the present invention, the compound to be screened and ³[H] thymidine under cell culture conditions where the fibroblast cell would normally proliferate. A control assay may be performed in the absence of the compound to be screened and compared to the amount of fibroblast proliferation in the presence of the compound to determine if the compound stimulates proliferation by determining the uptake of ³[H] thymidine in each case. The amount of fibroblast cell proliferation is measured by liquid scintillation chromatography which measures the incorporation of ³[H] thymidine. Both agonist and antagonist compounds may be identified by this procedure.

[0736] In another method, a mammalian cell or membrane preparation expressing a receptor for a polypeptide of the present invention is incubated with a labeled polypeptide of the present invention in the presence of the compound. The ability of the compound to enhance or block this interaction could then be measured. Alternatively, the response of a known second messenger system following interaction of a compound to be screened and the receptor is measured and the ability of the compound to bind to the receptor and elicit a second messenger response is measured to determine if the compound is a potential agonist or antagonist. Such second messenger systems include but are not limited to, cAMP guanylate cyclase, ion channels or phosphoinositide hydrolysis.

[0737] All of these above assays can be used as diagnostic or prognostic markers. The molecules discovered using these assays can be used to treat disease or to bring about a particular result in a patient (e.g., blood vessel growth) by activating or inhibiting the polypeptide/molecule. Moreover, the assays can discover agents which may inhibit or enhance the production of the polypeptides of the invention from suitably manipulated cells or tissues.

[0738] Therefore, the invention includes a method of identifying compounds which bind to a polypeptide of the invention comprising the steps of: (a) incubating a candidate binding compound with a polypeptide of the present invention; and (b) determining if binding has occurred. Moreover, the invention includes a method of identifying agonists/antagonists comprising the steps of: (a) incubating a candidate compound with a polypeptide of the present invention, (b) assaying a biological activity, and (b) determining if a biological activity of the polypeptide has been altered.

[0739] Targeted Delivery

[0740] In another embodiment, the invention provides a method of delivering compositions to targeted cells expressing a receptor for a polypeptide of the invention, or cells expressing a cell bound form of a polypeptide of the invention.

[0741] As discussed herein, polypeptides or antibodies of the invention may be associated with heterologous polypeptides, heterologous nucleic acids, toxins, or prodrugs via hydrophobic, hydrophilic, ionic and/or covalent interactions. In one embodiment, the invention provides a method for the specific delivery of compositions of the invention to cells by administering polypeptides of the invention (including antibodies) that are associated with heterologous polypeptides or nucleic acids. In one example, the invention provides a method for delivering a therapeutic protein into the targeted cell. In another example, the invention provides a method for delivering a single stranded nucleic acid (e.g., antisense or ribozymes) or double stranded nucleic acid (e.g., DNA that can integrate into the cell's genome or replicate episomally and that can be transcribed) into the targeted cell.

[0742] In another embodiment, the invention provides a method for the specific destruction of cells (e.g., the destruction of tumor cells) by administering polypeptides of the invention (e.g., polypeptides of the invention or antibodies of the invention) in association with toxins or cytotoxic prodrugs.

[0743] By “toxin” is meant compounds that bind and activate endogenous cytotoxic effector systems, radioisotopes, holotoxins, modified toxins, catalytic subunits of toxins, or any molecules or enzymes not normally present in or on the surface of a cell that under defined conditions cause the cell's death. Toxins that may be used according to the methods of the invention include, but are not limited to, radioisotopes known in the art, compounds such as, for example, antibodies (or complement fixing containing portions thereof) that bind an inherent or induced endogenous cytotoxic effector system, thymidine kinase, endonuclease, RNAse, alpha toxin, ricin, abrin, Pseudomonas exotoxin A, diphtheria toxin, saporin, momordin, gelonin, pokeweed antiviral protein, alpha-sarcin and cholera toxin. By “cytotoxic prodrug” is meant a non-toxic compound that is converted by an enzyme, normally present in the cell, into a cytotoxic compound. Cytotoxic prodrugs that may be used according to the methods of the invention include, but are not limited to, glutamyl derivatives of benzoic acid mustard alkylating agent, phosphate derivatives of etoposide or mitomycin C, cytosine arabinoside, daunorubisin, and phenoxyacetamide derivatives of doxorubicin.

[0744] Drug Screening

[0745] Further contemplated is the use of the polypeptides of the present invention, or the polynucleotides encoding these polypeptides, to screen for molecules which modify the activities of the polypeptides of the present invention. Such a method would include contacting the polypeptide of the present invention with a selected compound(s) suspected of having antagonist or agonist activity, and assaying the activity of these polypeptides following binding.

[0746] This invention is particularly useful for screening therapeutic compounds by using the polypeptides of the present invention, or binding fragments thereof, in any of a variety of drug screening techniques. The polypeptide or fragment employed in such a test may be affixed to a solid support, expressed on a cell surface, free in solution, or located intracellularly. One method of drug screening utilizes eukaryotic or prokaryotic host cells which are stably transformed with recombinant nucleic acids expressing the polypeptide or fragment. Drugs are screened against such transformed cells in competitive binding assays. One may measure, for example, the formulation of complexes between the agent being tested and a polypeptide of the present invention.

[0747] Thus, the present invention provides methods of screening for drugs or any other agents which affect activities mediated by the polypeptides of the present invention. These methods comprise contacting such an agent with a polypeptide of the present invention or a fragment thereof and assaying for the presence of a complex between the agent and the polypeptide or a fragment thereof, by methods well known in the art. In such a competitive binding assay, the agents to screen are typically labeled. Following incubation, free agent is separated from that present in bound form, and the amount of free or uncomplexed label is a measure of the ability of a particular agent to bind to the polypeptides of the present invention.

[0748] Another technique for drug screening provides high throughput screening for compounds having suitable binding affinity to the polypeptides of the present invention, and is described in great detail in European Patent Application 84/03564, published on Sep. 13, 1984, which is incorporated herein by reference herein. Briefly stated, large numbers of different small peptide test compounds are synthesized on a solid substrate, such as plastic pins or some other surface. The peptide test compounds are reacted with polypeptides of the present invention and washed. Bound polypeptides are then detected by methods well known in the art. Purified polypeptides are coated directly onto plates for use in the aforementioned drug screening techniques. In addition, non-neutralizing antibodies may be used to capture the peptide and immobilize it on the solid support.

[0749] This invention also contemplates the use of competitive drug screening assays in which neutralizing antibodies capable of binding polypeptides of the present invention specifically compete with a test compound for binding to the polypeptides or fragments thereof. In this manner, the antibodies are used to detect the presence of any peptide which shares one or more antigenic epitopes with a polypeptide of the invention.

[0750] Antisense and Ribozyme (Antagonists)

[0751] In specific embodiments, antagonists according to the present invention are nucleic acids corresponding to the sequences contained in SEQ ID NO:X, or the complementary strand thereof, and/or to cDNA sequences contained in cDNA ATCC Deposit No:Z identified for example, in Table 1A and/or 1B. In one embodiment, antisense sequence is generated internally, by the organism, in another embodiment, the antisense sequence is separately administered (see, for example, O'Connor, J., Neurochem. 56:560 (1991). Oligodeoxynucleotides as Antisense Inhibitors of Gene Expression, CRC Press, Boca Raton, Fla. (1988). Antisense technology can be used to control gene expression through antisense DNA or RNA, or through triple-helix formation. Antisense techniques are discussed for example, in Okano, J., Neurochem. 56:560 (1991); Oligodeoxynucleotides as Antisense Inhibitors of Gene Expression, CRC Press, Boca Raton, Fla. (1988). Triple helix formation is discussed in, for instance, Lee et al., Nucleic Acids Research 6:3073 (1979); Cooney et al., Science 241:456 (1988); and Dervan et al., Science 251:1300 (1991). The methods are based on binding of a polynucleotide to a complementary DNA or RNA.

[0752] For example, the use of c-myc and c-myb antisense RNA constructs to inhibit the growth of the non-lymphocytic leukemia cell line HL-60 and other cell lines was previously described. (Wickstrom et al. (1988); Anfossi et al. (1989)). These experiments were performed in vitro by incubating cells with the oligoribonucleotide. A similar procedure for in vivo use is described in WO 91/15580. Briefly, a pair of oligonucleotides for a given antisense RNA is produced as follows: A sequence complimentary to the first 15 bases of the open reading frame is flanked by an EcoR1 site on the 5 end and a HindIII site on the 3 end. Next, the pair of oligonucleotides is heated at 90° C. for one minute and then annealed in 2× ligation buffer (20 mM TRIS HCl pH 7.5, 10 mM MgCl2, 10 MM dithiothreitol (DTT) and 0.2 mM ATP) and then ligated to the EcoR1/Hind III site of the retroviral vector PMV7 (WO 91/15580).

[0753] For example, the 5′ coding portion of a polynucleotide that encodes the polypeptide of the present invention may be used to design an antisense RNA oligonucleotide of from about 10 to 40 base pairs in length. A DNA oligonucleotide is designed to be complementary to a region of the gene involved in transcription thereby preventing transcription and the production of the receptor. The antisense RNA oligonucleotide hybridizes to the mRNA in vivo and blocks translation of the mRNA molecule into receptor polypeptide.

[0754] In one embodiment, the antisense nucleic acid of the invention is produced intracellularly by transcription from an exogenous sequence. For example, a vector or a portion thereof, is transcribed, producing an antisense nucleic acid (RNA) of the invention. Such a vector would contain a sequence encoding the antisense nucleic acid. Such a vector can remain episomal or become chromosomally integrated, as long as it can be transcribed to produce the desired antisense RNA. Such vectors can be constructed by recombinant DNA technology methods standard in the art. Vectors can be plasmid, viral, or others known in the art, used for replication and expression in vertebrate cells. Expression of the sequence encoding the polypeptide of the present invention or fragments thereof, can be by any promoter known in the art to act in vertebrate, preferably human cells. Such promoters can be inducible or constitutive. Such promoters include, but are not limited to, the SV40 early promoter region (Bernoist and Chambon, Nature 29:304-310 (1981), the promoter contained in the 3′ long terminal repeat of Rous sarcoma virus (Yamamoto et al., Cell 22:787-797 (1980), the herpes thymidine promoter (Wagner et al., Proc. Natl. Acad. Sci. U.S.A. 78:1441-1445 (1981), the regulatory sequences of the metallothionein gene (Brinster, et al., Nature 296:39-42 (1982)), etc.

[0755] The antisense nucleic acids of the invention comprise a sequence complementary to at least a portion of an RNA transcript of a gene of the present invention. However, absolute complementarity, although preferred, is not required. A sequence “complementary to at least a portion of an RNA,” referred to herein, means a sequence having sufficient complementarity to be able to hybridize with the RNA, forming a stable duplex; in the case of double stranded antisense nucleic acids, a single strand of the duplex DNA may thus be tested, or triplex formation may be assayed. The ability to hybridize will depend on both the degree of complementarity and the length of the antisense nucleic acid. Generally, the larger the hybridizing nucleic acid, the more base mismatches with a RNA it may contain and still form a stable duplex (or triplex as the case may be). One skilled in the art can ascertain a tolerable degree of mismatch by use of standard procedures to determine the melting point of the hybridized complex.

[0756] Oligonucleotides that are complementary to the 5′ end of the message, e.g., the 5′ untranslated sequence up to and including the AUG initiation codon, should work most efficiently at inhibiting translation. However, sequences complementary to the 3′ untranslated sequences of mRNAs have been shown to be effective at inhibiting translation of mRNAs as well. See generally, Wagner, R., 1994, Nature 372:333-335. Thus, oligonucleotides complementary to either the 5′- or 3′-non-translated, non-coding regions of polynucleotide sequences described herein could be used in an antisense approach to inhibit translation of endogenous mRNA. Oligonucleotides complementary to the 5′ untranslated region of the mRNA should include the complement of the AUG start codon. Antisense oligonucleotides complementary to mRNA coding regions are less efficient inhibitors of translation but could be used in accordance with the invention. Whether designed to hybridize to the 5′-, 3′- or coding region of mRNA of the present invention, antisense nucleic acids should be at least six nucleotides in length, and are preferably oligonucleotides ranging from 6 to about 50 nucleotides in length. In specific aspects the oligonucleotide is at least 10 nucleotides, at least 17 nucleotides, at least 25 nucleotides or at least 50 nucleotides.

[0757] The polynucleotides of the invention can be DNA or RNA or chimeric mixtures or derivatives or modified versions thereof, single-stranded or double-stranded. The oligonucleotide can be modified at the base moiety, sugar moiety, or phosphate backbone, for example, to improve stability of the molecule, hybridization, etc. The oligonucleotide may include other appended groups such as peptides (e.g., for targeting host cell receptors in vivo), or agents facilitating transport across the cell membrane (see, e.g., Letsinger et al., 1989, Proc. Natl. Acad. Sci. U.S.A. 86:6553-6556; Lemaitre et al., 1987, Proc. Natl. Acad. Sci. 84:648-652; PCT Publication No. WO88/09810, published Dec. 15, 1988) or the blood-brain barrier (see, e.g., PCT Publication No. WO89/10134, published Apr. 25, 1988), hybridization-triggered cleavage agents. (See, e.g., Krol et al., 1988, BioTechniques 6:958-976) or intercalating agents. (See, e.g., Zon, 1988, Pharm. Res. 5:539-549). To this end, the oligonucleotide may be conjugated to another molecule, e.g., a peptide, hybridization triggered cross-linking agent, transport agent, hybridization-triggered cleavage agent, etc.

[0758] The antisense oligonucleotide may comprise at least one modified base moiety which is selected from the group including, but not limited to, 5-fluorouracil, 5-bromouracil, 5-chlorouracil, 5-iodouracil, hypoxanthine, xantine, 4-acetylcytosine, 5-(carboxyhydroxylmethyl)uracil, 5-carboxymethylaminomethyl-2-thiouridine, 5-carboxymethylaminomethyluracil, dihydrouracil, beta-D-galactosylqueosine, inosine, N6-isopentenyladenine, 1-methylguanine, 1-methylinosine, 2,2-dimethylguanine, 2-methyladenine, 2-methylguanine, 3-methylcytosine, 5-methylcytosine, N6-adenine, 7-methylguanine, 5-methylaminomethyluracil, 5-methoxyaminomethyl-2-thiouracil, beta-D-mannosylqueosine, 5′-methoxycarboxymethyluracil, 5-methoxyuracil, 2-methylthio-N6-isopentenyladenine, uracil-5-oxyacetic acid (v), wybutoxosine, pseudouracil, queosine, 2-thiocytosine, 5-methyl-2-thiouracil, 2-thiouracil, 4-thiouracil, 5-methyluracil, uracil-5-oxyacetic acid methylester, uracil-5-oxyacetic acid (v), 5-methyl-2-thiouracil, 3-(3-amino-3-N-2-carboxypropyl)uracil, (acp3)w, and 2,6-diaminopurine.

[0759] The antisense oligonucleotide may also comprise at least one modified sugar moiety selected from the group including, but not limited to, arabinose, 2-fluoroarabinose, xylulose, and hexose.

[0760] In yet another embodiment, the antisense oligonucleotide comprises at least one modified phosphate backbone selected from the group including, but not limited to, a phosphorothioate, a phosphorodithioate, a phosphoramidothioate, a phosphoramidate, a phosphordiamidate, a methylphosphonate, an alkyl phosphotriester, and a formacetal or analog thereof.

[0761] In yet another embodiment, the antisense oligonucleotide is an a-anomeric oligonucleotide. An a-anomeric oligonucleotide forms specific double-stranded hybrids with complementary RNA in which, contrary to the usual b-units, the strands run parallel to each other (Gautier et al., 1987, Nucl. Acids Res. 15:6625-6641). The oligonucleotide is a 2′-0-methylribonucleotide (Inoue et al., 1987, Nucl. Acids Res. 15:6131-6148), or a chimeric RNA-DNA analogue (Inoue et al., 1987, FEBS Lett. 215:327-330).

[0762] Polynucleotides of the invention may be synthesized by standard methods known in the art, e.g. by use of an automated DNA synthesizer (such as are commercially available from Biosearch, Applied Biosystems, etc.). As examples, phosphorothioate oligonucleotides may be synthesized by the method of Stein et al. (1988, Nucl. Acids Res. 16:3209), methylphosphonate oligonucleotides can be prepared by use of controlled pore glass polymer supports (Sarin et al., 1988, Proc. Natl. Acad. Sci. U.S.A. 85:7448-7451), etc.

[0763] While antisense nucleotides complementary to the coding region sequence could be used, those complementary to the transcribed untranslated region are most preferred.

[0764] Potential antagonists according to the invention also include catalytic RNA, or a ribozyme (See, e.g., PCT International Publication WO 90/11364, published Oct. 4, 1990; Sarver et al, Science 247:1222-1225 (1990). While ribozymes that cleave mRNA at site specific recognition sequences can be used to destroy mRNAs, the use of hammerhead ribozymes is preferred. Hammerhead ribozymes cleave mRNAs at locations dictated by flanking regions that form complementary base pairs with the target mRNA. The sole requirement is that the target mRNA have the following sequence of two bases: 5′-UG-3′. The construction and production of hammerhead ribozymes is well known in the art and is described more fully in Haseloff and Gerlach, Nature 334:585-591 (1988). There are numerous potential hammerhead ribozyme cleavage sites within the nucleotide sequence of SEQ ID NO:X. Preferably, the ribozyme is engineered so that the cleavage recognition site is located near the 5′ end of the mRNA; i.e., to increase efficiency and minimize the intracellular accumulation of non-functional mRNA transcripts.

[0765] As in the antisense approach, the ribozymes of the invention can be composed of modified oligonucleotides (e.g., for improved stability, targeting, etc.) and should be delivered to cells which express in vivo. DNA constructs encoding the ribozyme may be introduced into the cell in the same manner as described above for the introduction of antisense encoding DNA. A preferred method of delivery involves using a DNA construct “encoding” the ribozyme under the control of a strong constitutive promoter, such as, for example, pol III or pol II promoter, so that transfected cells will produce sufficient quantities of the ribozyme to destroy endogenous messages and inhibit translation. Since ribozymes unlike antisense molecules, are catalytic, a lower intracellular concentration is required for efficiency.

[0766] Antagonist/agonist compounds may be employed to inhibit the cell growth and proliferation effects of the polypeptides of the present invention on neoplastic cells and tissues, i.e. stimulation of angiogenesis of tumors, and, therefore, retard or prevent abnormal cellular growth and proliferation, for example, in tumor formation or growth.

[0767] The antagonist/agonist may also be employed to prevent hyper-vascular diseases, and prevent the proliferation of epithelial lens cells after extracapsular cataract surgery. Prevention of the mitogenic activity of the polypeptides of the present invention may also be desirous in cases such as restenosis after balloon angioplasty.

[0768] The antagonist/agonist may also be employed to prevent the growth of scar tissue during wound healing.

[0769] The antagonist/agonist may also be employed to treat the diseases described herein.

[0770] Thus, the invention provides a method of treating disorders or diseases, including but not limited to the disorders or diseases listed throughout this application, associated with overexpression of a polynucleotide of the present invention by administering to a patient (a) an antisense molecule directed to the polynucleotide of the present invention, and/or (b) a ribozyme directed to the polynucleotide of the present invention.

[0771] Binding Peptides and Other Molecules

[0772] The invention also encompasses screening methods for identifying polypeptides and nonpolypeptides that bind polypeptides of the invention, and the binding molecules identified thereby. These binding molecules are useful, for example, as agonists and antagonists of the polypeptides of the invention. Such agonists and antagonists can be used, in accordance with the invention, in the therapeutic embodiments described in detail, below.

[0773] This method comprises the steps of:

[0774] contacting polypeptides of the invention with a plurality of molecules; and

[0775] identifying a molecule that binds the polypeptides of the invention.

[0776] The step of contacting the polypeptides of the invention with the plurality of molecules may be effected in a number of ways. For example, one may contemplate immobilizing the polypeptides on a solid support and bringing a solution of the plurality of molecules in contact with the immobilized polypeptides. Such a procedure would be akin to an affinity chromatographic process, with the affinity matrix being comprised of the immobilized polypeptides of the invention. The molecules having a selective affinity for the polypeptides can then be purified by affinity selection. The nature of the solid support, process for attachment of the polypeptides to the solid support, solvent, and conditions of the affinity isolation or selection are largely conventional and well known to those of ordinary skill in the art.

[0777] Alternatively, one may also separate a plurality of polypeptides into substantially separate fractions comprising a subset of or individual polypeptides. For instance, one can separate the plurality of polypeptides by gel electrophoresis, column chromatography, or like method known to those of ordinary skill for the separation of polypeptides. The individual polypeptides can also be produced by a transformed host cell in such a way as to be expressed on or about its outer surface (e.g., a recombinant phage). Individual isolates can then be “probed” by the polypeptides of the invention, optionally in the presence of an inducer should one be required for expression, to determine if any selective affinity interaction takes place between the polypeptides and the individual clone. Prior to contacting the polypeptides with each fraction comprising individual polypeptides, the polypeptides could first be transferred to a solid support for additional convenience. Such a solid support may simply be a piece of filter membrane, such as one made of nitrocellulose or nylon. In this manner, positive clones could be identified from a collection of transformed host cells of an expression library, which harbor a DNA construct encoding a polypeptide having a selective affinity for polypeptides of the invention. Furthermore, the amino acid sequence of the polypeptide having a selective affinity for the polypeptides of the invention can be determined directly by conventional means or the coding sequence of the DNA encoding the polypeptide can frequently be determined more conveniently. The primary sequence can then be deduced from the corresponding DNA sequence. If the amino acid sequence is to be determined from the polypeptide itself, one may use microsequencing techniques. The sequencing technique may include mass spectroscopy.

[0778] In certain situations, it may be desirable to wash away any unbound polypeptides from a mixture of the polypeptides of the invention and the plurality of polypeptides prior to attempting to determine or to detect the presence of a selective affinity interaction. Such a wash step may be particularly desirable when the polypeptides of the invention or the plurality of polypeptides are bound to a solid support.

[0779] The plurality of molecules provided according to this method may be provided by way of diversity libraries, such as random or combinatorial peptide or nonpeptide libraries which can be screened for molecules that specifically bind polypeptides of the invention. Many libraries are known in the art that can be used, e.g., chemically synthesized libraries, recombinant (e.g., phage display libraries), and in vitro translation-based libraries. Examples of chemically synthesized libraries are described in Fodor et al., 1991, Science 251:767-773; Houghten et al., 1991, Nature 354:84-86; Lam et al., 1991, Nature 354:82-84; Medynski, 1994, Bio/Technology 12:709-710;Gallop et al., 1994, J. Medicinal Chemistry 37(9):1233-1251; Ohlmeyer et al., 1993, Proc. Natl. Acad. Sci. USA 90:10922-10926; Erb et al., 1994, Proc. Natl. Acad. Sci. USA 91:11422-11426; Houghten et al., 1992, Biotechniques 13:412; Jayawickreme et al., 1994, Proc. Natl. Acad. Sci. USA 91:1614-1618; Salmon et al., 1993, Proc. Natl. Acad. Sci. USA 90:11708-11712; PCT Publication No. WO 93/20242; and Brenner and Lerner, 1992, Proc. Natl. Acad. Sci. USA 89:5381-5383.

[0780] Examples of phage display libraries are described in Scott and Smith, 1990, Science 249:386-390; Devlin et al., 1990, Science, 249:404-406; Christian, R. B., et al., 1992, J. Mol. Biol. 227:711-718); Lenstra, 1992, J. Immunol. Meth. 152:149-157; Kay et al., 1993, Gene 128:59-65; and PCT Publication No. WO 94/18318 dated Aug. 18, 1994.

[0781] In vitro translation-based libraries include but are not limited to those described in PCT Publication No. WO 91/05058 dated Apr. 18, 1991; and Mattheakis et al., 1994, Proc. Natl. Acad. Sci. USA 91:9022-9026.

[0782] By way of examples of nonpeptide libraries, a benzodiazepine library (see e.g., Bunin et al., 1994, Proc. Natl. Acad. Sci. USA 91:4708-4712) can be adapted for use. Peptoid libraries (Simon et al., 1992, Proc. Natl. Acad. Sci. USA 89:9367-9371) can also be used. Another example of a library that can be used, in which the amide functionalities in peptides have been permethylated to generate a chemically transformed combinatorial library, is described by Ostresh et al. (1994, Proc. Natl. Acad. Sci. USA 91:11138-11142). The variety of non-peptide libraries that are useful in the present invention is great. For example, Ecker and Crooke, 1995, Bio/Technology 13:351-360 list benzodiazepines, hydantoins, piperazinediones, biphenyls, sugar analogs, beta-mercaptoketones, arylacetic acids, acylpiperidines, benzopyrans, cubanes, xanthines, aminimides, and oxazolones as among the chemical species that form the basis of various libraries.

[0783] Non-peptide libraries can be classified broadly into two types: decorated monomers and oligomers. Decorated monomer libraries employ a relatively simple scaffold structure upon which a variety functional groups is added. Often the scaffold will be a molecule with a known useful pharmacological activity. For example, the scaffold might be the benzodiazepine structure.

[0784] Non-peptide oligomer libraries utilize a large number of monomers that are assembled together in ways that create new shapes that depend on the order of the monomers. Among the monomer units that have been used are carbamates, pyrrolinones, and morpholinos. Peptoids, peptide-like oligomers in which the side chain is attached to the alpha amino group rather than the alpha carbon, form the basis of another version of non-peptide oligomer libraries. The first non-peptide oligomer libraries utilized a single type of monomer and thus contained a repeating backbone. Recent libraries have utilized more than one monomer, giving the libraries added flexibility.

[0785] Screening the libraries can be accomplished by any of a variety of commonly known methods. See, e.g., the following references, which disclose screening of peptide libraries: Parmley and Smith, 1989, Adv. Exp. Med. Biol. 251:215-218; Scott and Smith, 1990, Science 249:386-390; Fowlkes et al., 1992; BioTechniques 13:422-427; Oldenburg et al., 1992, Proc. Natl. Acad. Sci. USA 89:5393-5397; Yu et al., 1994, Cell 76:933-945; Staudt et al., 1988, Science 241:577-580; Bock et al., 1992, Nature 355:564-566; Tuerk et al., 1992, Proc. Natl. Acad. Sci. USA 89:6988-6992; Ellington et al., 1992, Nature 355:850-852; U.S. Pat. No. 5,096,815, U.S. Pat. No. 5,223,409, and U.S. Pat. No. 5,198,346, all to Ladner et al.; Rebar and Pabo, 1993, Science 263:671-673; and CT Publication No. WO 94/18318.

[0786] In a specific embodiment, screening to identify a molecule that binds polypeptides of the invention can be carried out by contacting the library members with polypeptides of the invention immobilized on a solid phase and harvesting those library members that bind to the polypeptides of the invention. Examples of such screening methods, termed “panning” techniques are described by way of example in Parmley and Smith, 1988, Gene 73:305-318; Fowlkes et al., 1992, BioTechniques 13:422-427; PCT Publication No. WO 94/18318; and in references cited herein.

[0787] In another embodiment, the two-hybrid system for selecting interacting proteins in yeast (Fields and Song, 1989, Nature 340:245-246; Chien et al., 1991, Proc. Natl. Acad. Sci. USA 88:9578-9582) can be used to identify molecules that specifically bind to polypeptides of the invention.

[0788] Where the binding molecule is a polypeptide, the polypeptide can be conveniently selected from any peptide library, including random peptide libraries, combinatorial peptide libraries, or biased peptide libraries. The term “biased” is used herein to mean that the method of generating the library is manipulated so as to restrict one or more parameters that govern the diversity of the resulting collection of molecules, in this case peptides.

[0789] Thus, a truly random peptide library would generate a collection of peptides in which the probability of finding a particular amino acid at a given position of the peptide is the same for all 20 amino acids. A bias can be introduced into the library, however, by specifying, for example, that a lysine occur every fifth amino acid or that positions 4, 8, and 9 of a decapeptide library be fixed to include only arginine. Clearly, many types of biases can be contemplated, and the present invention is not restricted to any particular bias. Furthermore, the present invention contemplates specific types of peptide libraries, such as phage displayed peptide libraries and those that utilize a DNA construct comprising a lambda phage vector with a DNA insert.

[0790] As mentioned above, in the case of a binding molecule that is a polypeptide, the polypeptide may have about 6 to less than about 60 amino acid residues, preferably about 6 to about 10 amino acid residues, and most preferably, about 6 to about 22 amino acids. In another embodiment, a binding polypeptide has in the range of 15-100 amino acids, or 20-50 amino acids.

[0791] The selected binding polypeptide can be obtained by chemical synthesis or recombinant expression.

[0792] Other Activities

[0793] A polypeptide, polynucleotide, agonist, or antagonist of the present invention, as a result of the ability to stimulate vascular endothelial cell growth, may be employed in treatment for stimulating re-vascularization of ischemic tissues due to various disease conditions such as thrombosis, arteriosclerosis, and other cardiovascular conditions. The polypeptide, polynucleotide, agonist, or antagonist of the present invention may also be employed to stimulate angiogenesis and limb regeneration, as discussed above.

[0794] A polypeptide, polynucleotide, agonist, or antagonist of the present invention may also be employed for treating wounds due to injuries, burns, post-operative tissue repair, and ulcers since they are mitogenic to various cells of different origins, such as fibroblast cells and skeletal muscle cells, and therefore, facilitate the repair or replacement of damaged or diseased tissue.

[0795] A polypeptide, polynucleotide, agonist, or antagonist of the present invention may also be employed stimulate neuronal growth and to treat and prevent neuronal damage which occurs in certain neuronal disorders or neuro-degenerative conditions such as Alzheimer's disease, Parkinson's disease, and AIDS-related complex. A polypeptide, polynucleotide, agonist, or antagonist of the present invention may have the ability to stimulate chondrocyte growth, therefore, they may be employed to enhance bone and periodontal regeneration and aid in tissue transplants or bone grafts.

[0796] A polypeptide, polynucleotide, agonist, or antagonist of the present invention may be also be employed to prevent skin aging due to sunburn by stimulating keratinocyte growth.

[0797] A polypeptide, polynucleotide, agonist, or antagonist of the present invention may also be employed for preventing hair loss, since FGF family members activate hair-forming cells and promotes melanocyte growth. Along the same lines, a polypeptide, polynucleotide, agonist, or antagonist of the present invention may be employed to stimulate growth and differentiation of hematopoietic cells and bone marrow cells when used in combination with other cytokines.

[0798] A polypeptide, polynucleotide, agonist, or antagonist of the present invention may also be employed to maintain organs before transplantation or for supporting cell culture of primary tissues. A polypeptide, polynucleotide, agonist, or antagonist of the present invention may also be employed for inducing tissue of mesodermal origin to differentiate in early embryos.

[0799] A polypeptide, polynucleotide, agonist, or antagonist of the present invention may also increase or decrease the differentiation or proliferation of embryonic stem cells, besides, as discussed above, hematopoietic lineage.

[0800] A polypeptide, polynucleotide, agonist, or antagonist of the present invention may also be used to modulate mammalian characteristics, such as body height, weight, hair color, eye color, skin, percentage of adipose tissue, pigmentation, size, and shape (e.g., cosmetic surgery). Similarly, a polypeptide, polynucleotide, agonist, or antagonist of the present invention may be used to modulate mammalian metabolism affecting catabolism, anabolism, processing, utilization, and storage of energy.

[0801] A polypeptide, polynucleotide, agonist, or antagonist of the present invention may be used to change a mammal's mental state or physical state by influencing biorhythms, caricadic rhythms, depression (including depressive disorders), tendency for violence, tolerance for pain, reproductive capabilities (preferably by Activin or Inhibin-like activity), hormonal or endocrine levels, appetite, libido, memory, stress, or other cognitive qualities.

[0802] A polypeptide, polynucleotide, agonist, or antagonist of the present invention may also be used as a food additive or preservative, such as to increase or decrease storage capabilities, fat content, lipid, protein, carbohydrate, vitamins, minerals, cofactors or other nutritional components.

[0803] The above-recited applications have uses in a wide variety of hosts. Such hosts include, but are not limited to, human, murine, rabbit, goat, guinea pig, camel, horse, mouse, rat, hamster, pig, micro-pig, chicken, goat, cow, sheep, dog, cat, non-human primate, and human. In specific embodiments, the host is a mouse, rabbit, goat, guinea pig, chicken, rat, hamster, pig, sheep, dog or cat. In preferred embodiments, the host is a mammal. In most preferred embodiments, the host is a human.

### Other Preferred Embodiments

[0804] Other preferred embodiments of the claimed invention include an isolated nucleic acid molecule comprising a nucleotide sequence which is at least 95% identical to a sequence of at least about 50 contiguous nucleotides in the nucleotide sequence of SEQ ID NO:X or the complementary strand thereto, the nucleotide sequence as defined in Table 1B or columns 8 and 9 of Table 2 or the complementary strand thereto, and/or cDNA contained in ATCC Deposit No:Z.

[0805] Also preferred is a nucleic acid molecule wherein said sequence of contiguous nucleotides is included in the nucleotide sequence of the portion of SEQ ID NO:X as defined in column 5, “ORF (From-To)”, in Table 1B.1.

[0806] Also preferred is a nucleic acid molecule wherein said sequence of contiguous nucleotides is included in the nucleotide sequence of the portion of SEQ ID NO:X as defined in columns 8 and 9, “NT From” and “NT To” respectively, in Table 2.

[0807] Also preferred is an isolated nucleic acid molecule comprising a nucleotide sequence which is at least 95% identical to a sequence of at least about 150 contiguous nucleotides in the nucleotide sequence of SEQ ID NO:X or the complementary strand thereto, the nucleotide sequence as defined in Table 1B or columns 8 and 9 of Table 2 or the complementary strand thereto, and/or cDNA contained in ATCC Deposit No:Z.

[0808] Further preferred is an isolated nucleic acid molecule comprising a nucleotide sequence which is at least 95% identical to a sequence of at least about 500 contiguous nucleotides in the nucleotide sequence of SEQ ID NO:X or the complementary strand thereto, the nucleotide sequence as defined in Table 1B or columns 8 and 9 of Table 2 or the complementary strand thereto, and/or cDNA contained in ATCC Deposit No:Z.

[0809] A further preferred embodiment is a nucleic acid molecule comprising a nucleotide sequence which is at least 95% identical to the nucleotide sequence of the portion of SEQ ID NO:X defined in column 5, “ORF (From-To)”, in Table 1B.1.

[0810] A further preferred embodiment is a nucleic acid molecule comprising a nucleotide sequence which is at least 95% identical to the nucleotide sequence of the portion of SEQ ID NO:X defined in columns 8 and 9, “NT From” and “NT To”, respectively, in Table 2.

[0811] A further preferred embodiment is an isolated nucleic acid molecule comprising a nucleotide sequence which is at least 95% identical to the complete nucleotide sequence of SEQ ID NO:X or the complementary strand thereto, the nucleotide sequence as defined in column 5 of Table 1B.1 or columns 8 and 9 of Table 2 or the complementary strand thereto, and/or cDNA contained in ATCC Deposit No:Z.

[0812] Also preferred is an isolated nucleic acid molecule which hybridizes under stringent hybridization conditions to a nucleic acid molecule comprising a nucleotide sequence of SEQ ID NO:X or the complementary strand thereto, the nucleotide sequence as defined in column 5 of Table 1B.1 or columns 8 and 9 of Table 2 or the complementary strand thereto, and/or cDNA contained in ATCC Deposit No:Z, wherein said nucleic acid molecule which hybridizes does not hybridize under stringent hybridization conditions to a nucleic acid molecule having a nucleotide sequence consisting of only A residues or of only T residues.

[0813] Also preferred is a composition of matter comprising a DNA molecule which comprises the cDNA contained in ATCC Deposit No:Z.

[0814] Also preferred is an isolated nucleic acid molecule comprising a nucleotide sequence which is at least 95% identical to a sequence of at least 50 contiguous nucleotides of the cDNA sequence contained in ATCC Deposit No:Z.

[0815] Also preferred is an isolated nucleic acid molecule, wherein said sequence of at least 50 contiguous nucleotides is included in the nucleotide sequence of an open reading frame sequence encoded by cDNA contained in ATCC Deposit No:Z.

[0816] Also preferred is an isolated nucleic acid molecule comprising a nucleotide sequence which is at least 95% identical to sequence of at least 150 contiguous nucleotides in the nucleotide sequence encoded by cDNA contained in ATCC Deposit No:Z.

[0817] A further preferred embodiment is an isolated nucleic acid molecule comprising a nucleotide sequence which is at least 95% identical to sequence of at least 500 contiguous nucleotides in the nucleotide sequence encoded by cDNA contained in ATCC Deposit No:Z.

[0818] A further preferred embodiment is an isolated nucleic acid molecule comprising a nucleotide sequence which is at least 95% identical to the complete nucleotide sequence encoded. by cDNA contained in ATCC Deposit No:Z.

[0819] A further preferred embodiment is a method for detecting in a biological sample a nucleic acid molecule comprising a nucleotide sequence which is at least 95% identical to a sequence of at least 50 contiguous nucleotides in a sequence selected from the group consisting of: a nucleotide sequence of SEQ ID NO:X or the complementary strand thereto; the nucleotide sequence as defined in column 5 of Table 1B.1 or columns 8 and 9 of Table 2 or the complementary strand thereto; and a nucleotide sequence encoded by cDNA contained in ATCC Deposit No:Z; which method comprises a step of comparing a nucleotide sequence of at least one nucleic acid molecule in said sample with a sequence selected from said group and determining whether the sequence of said nucleic acid molecule in said sample is at least 95% identical to said selected sequence.

[0820] Also preferred is the above method wherein said step of comparing sequences comprises determining the extent of nucleic acid hybridization between nucleic acid molecules in said sample and a nucleic acid molecule comprising said sequence selected from said group. Similarly, also preferred is the above method wherein said step of comparing sequences is performed by comparing the nucleotide sequence determined from a nucleic acid molecule in said sample with said sequence selected from said group. The nucleic acid molecules can comprise DNA molecules or RNA molecules.

[0821] A further preferred embodiment is a method for identifying the species, tissue or cell type of a biological sample which method comprises a step of detecting nucleic acid molecules in said sample, if any, comprising a nucleotide sequence that is at least 95% identical to a sequence of at least 50 contiguous nucleotides in a sequence selected from the group consisting of: a nucleotide sequence of SEQ ID NO:X or the complementary strand thereto; the nucleotide sequence as defined in column 5 of Table 1B.1 or columns 8 and 9 of Table 2 or the complementary strand thereto; and a nucleotide sequence of the cDNA contained in ATCC Deposit No:Z.

[0822] The method for identifying the species, tissue or cell type of a biological sample can comprise a step of detecting nucleic acid molecules comprising a nucleotide sequence in a panel of at least two nucleotide sequences, wherein at least one sequence in said panel is at least 95% identical to a sequence of at least 50 contiguous nucleotides in a sequence selected from said group.

[0823] Also preferred is a method for diagnosing in a subject a pathological condition associated with abnormal structure or expression of a nucleotide sequence of SEQ ID NO:X or the complementary strand thereto; the nucleotide sequence as defined in column 5 of Table 1B.1 or columns 8 and 9 of Table 2 or the complementary strand thereto; or the cDNA contained in ATCC Deposit No:Z which encodes a protein, wherein the method comprises a step of detecting in a biological sample obtained from said subject nucleic acid molecules, if any, comprising a nucleotide sequence that is at least 95% identical to a sequence of at least 50 contiguous nucleotides in a sequence selected from the group consisting of: a nucleotide sequence of SEQ ID NO:X or the complementary strand thereto; the nucleotide sequence as defined in column 5 of Table 1B.1 or columns 8 and 9 of Table 2 or the complementary strand thereto; and a nucleotide sequence of cDNA contained in ATCC Deposit No:Z.

[0824] The method for diagnosing a pathological condition can comprise a step of detecting nucleic acid molecules comprising a nucleotide sequence in a panel of at least two nucleotide sequences, wherein at least one sequence in said panel is at least 95% identical to a sequence of at least 50 contiguous nucleotides in a sequence selected from said group.

[0825] Also preferred is a composition of matter comprising isolated nucleic acid molecules wherein the nucleotide sequences of said nucleic acid molecules comprise a panel of at least two nucleotide sequences, wherein at least one sequence in said panel is at least 95% identical to a sequence of at least 50 contiguous nucleotides in a sequence selected from the group consisting of: a nucleotide sequence of SEQ ID NO:X or the complementary strand thereto; the nucleotide sequence as defined in column 5 of Table 1B.1 or columns 8 and 9 of Table 2 or the complementary strand thereto; and a nucleotide sequence encoded by cDNA contained in ATCC Deposit No:Z. The nucleic acid molecules can comprise DNA molecules or RNA molecules.

[0826] Also preferred is a composition of matter comprising isolated nucleic acid molecules wherein the nucleotide sequences of said nucleic acid molecules comprise a DNA microarray or “chip” of at least 1, 2, 3, 4, 5, 6, 7, 8, 9, 10, 15, 20, 25, 30, 40, 50, 100, 150, 200, 250, 300, 500, 1000, 2000, 3000, or 4000 nucleotide sequences, wherein at least one sequence in said DNA microarray or “chip” is at least 95% identical to a sequence of at least 50 contiguous nucleotides in a sequence selected from the group consisting of: a nucleotide sequence of SEQ ID NO:X wherein X is any integer as defined in Table 1A and/or 1B; and a nucleotide sequence encoded by a human cDNA clone identified by a cDNA “Clone ID” in Table 1A and/or 1B.

[0827] Also preferred is an isolated polypeptide comprising an amino acid sequence at least 90% identical to a sequence of at least about 10 contiguous amino acids in the polypeptide sequence of SEQ ID NO:Y; a polypeptide encoded by SEQ ID NO:X or the complementary strand thereto; the polypeptide encoded by the nucleotide sequence as defined in columns 8 and 9 of Table 2; and/or a polypeptide encoded by cDNA contained in ATCC Deposit No:Z.

[0828] Also preferred is an isolated polypeptide comprising an amino acid sequence at least 95% identical to a sequence of at least about 30 contiguous amino acids in the amino acid sequence of SEQ ID NO:Y; a polypeptide encoded by SEQ ID NO:X or the complementary strand thereto; the polypeptide encoded by the nucleotide sequence as defined in columns 8 and 9 of Table 2; and/or a polypeptide encoded by cDNA contained in ATCC Deposit No:Z.

[0829] Further preferred is an isolated polypeptide comprising an amino acid sequence at least 95% identical to a sequence of at least about 100 contiguous amino acids in the amino acid sequence of SEQ ID NO:Y; a polypeptide encoded by SEQ ID NO:X or the complementary strand thereto; the polypeptide encoded by the nucleotide sequence as defined in columns 8 and 9 of Table 2; and/or a polypeptide encoded by cDNA contained in ATCC Deposit No:Z.

[0830] Further preferred is an isolated polypeptide comprising an amino acid sequence at least 95% identical to the complete amino acid sequence of SEQ ID NO:Y; a polypeptide encoded by SEQ ID NO:X or the complementary strand thereto; the polypeptide encoded by the nucleotide sequence as defined in columns 8 and 9 of Table 2; and/or a polypeptide encoded by cDNA contained in ATCC Deposit No:Z.

[0831] Further preferred is an isolated polypeptide comprising an amino acid sequence at least 90% identical to a sequence of at least about 10 contiguous amino acids in the complete amino acid sequence of a polypeptide encoded by contained in ATCC Deposit No:Z

[0832] Also preferred is a polypeptide wherein said sequence of contiguous amino acids is included in the amino acid sequence of a portion of said polypeptide encoded by cDNA contained in ATCC Deposit No:Z; a polypeptide encoded by SEQ ID NO:X or the complementary strand thereto; the polypeptide encoded by the nucleotide sequence as defined in columns 8 and 9 of Table 2; and/or the polypeptide sequence of SEQ ID NO:Y.

[0833] Also preferred is an isolated polypeptide comprising an amino acid sequence at least 95% identical to a sequence of at least about 30 contiguous amino acids in the amino acid sequence of a polypeptide encoded by the cDNA contained in ATCC Deposit No:Z.

[0834] Also preferred is an isolated polypeptide comprising an amino acid sequence at least 95% identical to a sequence of at least about 100 contiguous amino acids in the amino acid sequence of a polypeptide encoded by cDNA contained in ATCC Deposit No:Z.

[0835] Also preferred is an isolated polypeptide comprising an amino acid sequence at least 95% identical to the amino acid sequence of a polypeptide encoded by the cDNA contained in ATCC Deposit No:Z.

[0836] Further preferred is an isolated antibody which binds specifically to a polypeptide comprising an amino acid sequence that is at least 90% identical to a sequence of at least 10 contiguous amino acids in a sequence selected from the group consisting of: a polypeptide sequence of SEQ ID NO:Y; a polypeptide encoded by SEQ ID NO:X or the complementary strand thereto; the polypeptide encoded by the nucleotide sequence as defined in columns 8 and 9 of Table 2; and a polypeptide encoded by the cDNA contained in ATCC Deposit No:Z.

[0837] Further preferred is a method for detecting in a biological sample a polypeptide comprising an amino acid sequence which is at least 90% identical to a sequence of at least 10 contiguous amino acids in a sequence selected from the group consisting of: a polypeptide sequence of SEQ ID NO:Y; a polypeptide encoded by SEQ ID NO:X or the complementary strand thereto; the polypeptide encoded by the nucleotide sequence as defined in columns 8 and 9 of Table 2; and a polypeptide encoded by the cDNA contained in ATCC Deposit No:Z; which method comprises a step of comparing an amino acid sequence of at least one polypeptide molecule in said sample with a sequence selected from said group and determining whether the sequence of said polypeptide molecule in said sample is at least 90% identical to said sequence of at least 10 contiguous amino acids.

[0838] Also preferred is the above method wherein said step of comparing an amino acid sequence of at least one polypeptide molecule in said sample with a sequence selected from said group comprises determining the extent of specific binding of polypeptides in said sample to an antibody which binds specifically to a polypeptide comprising an amino acid sequence that is at least 90% identical to a sequence of at least 10 contiguous amino acids in a sequence selected from the group consisting of: a polypeptide sequence of SEQ ID NO:Y; a polypeptide encoded by SEQ ID NO:X or the complementary strand thereto; the polypeptide encoded by the nucleotide sequence as defined in columns 8 and 9 of Table 2; and a polypeptide encoded by the cDNA contained in ATCC Deposit No:Z.

[0839] Also preferred is the above method wherein said step of comparing sequences is performed by comparing the amino acid sequence determined from a polypeptide molecule in said sample with said sequence selected from said group.

[0840] Also preferred is a method for identifying the species, tissue or cell type of a biological sample which method comprises a step of detecting polypeptide molecules in said sample, if any, comprising an amino acid sequence that is at least 90% identical to a sequence of at least 10 contiguous amino acids in a sequence selected from the group consisting of: polypeptide sequence of SEQ ID NO:Y; a polypeptide encoded by SEQ ID NO:X or the complementary strand thereto; the polypeptide encoded by the nucleotide sequence as defined in columns 8 and 9 of Table 2; and a polypeptide encoded by the cDNA contained in ATCC Deposit No:Z.

[0841] Also preferred is the above method for identifying the species, tissue or cell type of a biological sample, which method comprises a step of detecting polypeptide molecules comprising an amino acid sequence in a panel of at least two amino acid sequences, wherein at least one sequence in said panel is at least 90% identical to a sequence of at least 10 contiguous amino acids in a sequence selected from the above group.

[0842] Also preferred is a method for diagnosing in a subject a pathological condition associated with abnormal structure or expression of a nucleic acid sequence identified in Table 1A, 1B or Table 2 encoding a polypeptide, which method comprises a step of detecting in a biological sample obtained from said subject polypeptide molecules comprising an amino acid sequence in a panel of at least two amino acid sequences, wherein at least one sequence in said panel is at least 90% identical to a sequence of at least 10 contiguous amino acids in a sequence selected from the group consisting of: polypeptide sequence of SEQ ID NO:Y; a polypeptide encoded by SEQ ID NO:X or the complementary strand thereto; the polypeptide encoded by the nucleotide sequence as defined in columns 8 and 9 of Table 2; and a polypeptide encoded by the cDNA contained in ATCC Deposit No:Z.

[0843] In any of these methods, the step of detecting said polypeptide molecules includes using an antibody.

[0844] Also preferred is an isolated nucleic acid molecule comprising a nucleotide sequence which is at least 95% identical to a nucleotide sequence encoding a polypeptide wherein said polypeptide comprises an amino acid sequence that is at least 90% identical to a sequence of at least 10 contiguous amino acids in a sequence selected from the group consisting of: polypeptide sequence of SEQ ID NO:Y; a polypeptide encoded by SEQ ID NO:X or the complementary strand thereto; the polypeptide encoded by the nucleotide sequence as defined in columns 8 and 9 of Table 2; and a polypeptide encoded by the cDNA contained in ATCC Deposit No:Z.

[0845] Also preferred is an isolated nucleic acid molecule, wherein said nucleotide sequence encoding a polypeptide has been optimized for expression of said polypeptide in a prokaryotic host.

[0846] Also preferred is a polypeptide molecule, wherein said polypeptide comprises an amino acid sequence selected from the group consisting of: polypeptide sequence of SEQ ID NO:Y; a polypeptide encoded by SEQ ID NO:X or the complementary strand thereto; the polypeptide encoded by the nucleotide sequence as defined in columns 8 and 9 of Table 2; and a polypeptide encoded by the cDNA contained in ATCC Deposit No:Z.

[0847] Further preferred is a method of making a recombinant vector comprising inserting any of the above isolated nucleic acid molecule into a vector. Also preferred is the recombinant vector produced by this method. Also preferred is a method of making a recombinant host cell comprising introducing the vector into a host cell, as well as the recombinant host cell produced by this method.

[0848] Also preferred is a method of making an isolated polypeptide comprising culturing this recombinant host cell under conditions such that said polypeptide is expressed and recovering said polypeptide. Also preferred is this method of making an isolated polypeptide, wherein said recombinant host cell is a eukaryotic cell and said polypeptide is a human protein comprising an amino acid sequence selected from the group consisting of: polypeptide sequence of SEQ ID NO:Y; a polypeptide encoded by SEQ ID NO:X or the complementary strand thereto; the polypeptide encoded by the nucleotide sequence as defined in columns 8 and 9 of Table 2; and a polypeptide encoded by the cDNA contained in ATCC Deposit No:Z. The isolated polypeptide produced by this method is also preferred.

[0849] Also preferred is a method of treatment of an individual in need of an increased level of a protein activity, which method comprises administering to such an individual a Therapeutic comprising an amount of an isolated polypeptide, polynucleotide, immunogenic fragment or analogue thereof, binding agent, antibody, or antigen binding fragment of the claimed invention effective to increase the level of said protein activity in said individual.

[0850] Also preferred is a method of treatment of an individual in need of a decreased level of a protein activity, which method comprised administering to such an individual a Therapeutic comprising an amount of an isolated polypeptide, polynucleotide, immunogenic fragment or analogue thereof, binding agent, antibody, or antigen binding fragment of the claimed invention effective to decrease the level of said protein activity in said individual.

[0851] Also preferred is a method of treatment of an individual in need of a specific delivery of toxic compositions to diseased cells (e.g., tumors, leukemias or lymphomas), which method comprises administering to such an individual a Therapeutic comprising an amount of an isolated polypeptide of the invention, including, but not limited to a binding agent, or antibody of the claimed invention that are associated with toxin or cytotoxic prodrugs.

[0852] Having generally described the invention, the same will be more readily understood by reference to the following examples, which are provided by way of illustration and are not intended as limiting.

[0853] Description of Table 6

[0854] Table 6 summarizes some of the ATCC Deposits, Deposit dates, and ATCC designation numbers of deposits made with the ATCC in connection with the present application. These deposits were made in addition to those described in the Table 1A.

TABLE 6

| ATCC Deposits | Deposit Date | ATCC Designation Number |
|---|---|---|
| LP01, LP02, LP03, | May-20-97 | 209059, 209060, 209061, 209062, |
| LP04, LP05, LP06, | | 209063, 209064, 209065, 209066, |
| LP07, LP08, LP09, | | 209067, 209068, 209069 |
| LP10, LP11, | | |
| LP12 | Jan-12-98 | 209579 |
| LP13 | Jan-12-98 | 209578 |
| LP14 | Jul-16-98 | 203067 |
| LP15 | Jul-16-98 | 203068 |
| LP16 | Feb-1-99 | 203609 |
| LP17 | Feb-1-99 | 203610 |
| LP20 | Nov-17-98 | 203485 |
| LP21 | Jun-18-99 | PTA-252 |
| LP22 | Jun-18-99 | PTA-253 |
| LP23 | Dec-22-99 | PTA-1081 |

### EXAMPLES

### Example 1

### Isolation of a Selected cDNA Clone from the Deposited Sample

[0855] Each ATCC Deposit No:Z is contained in a plasmid vector. Table 7 identifies the vectors used to construct the cDNA library from which each clone was isolated. In many cases, the vector used to construct the library is a phage vector from which a plasmid has been excised. The following correlates the related plasmid for each phage vector used in constructing the cDNA library. For example, where a particular clone is identified in Table 7 as being isolated in the vector “Lambda Zap,” the corresponding deposited clone is in “pBluescript.”

| Vector Used to Construct Library | Corresponding Deposited Plasmid |
|---|---|
| Lambda Zap | pBluescript (pBS) |
| Uni-Zap XR | pBluescript (pBS) |
| Zap Express | pBK |
| lafmid BA | plafmid BA |
| pSport1 | pSport1 |
| pCMVSport 2.0 | pCMVSport 2.0 |
| pCMVSport 3.0 | pCMVSport 3.0 |
| pCR ®2.1 | pCR ®2.1 |

[0856] Vectors Lambda Zap (U.S. Pat. Nos. 5,128,256 and 5,286,636), Uni-Zap XR (U.S. Pat. Nos. 5,128,256 and 5,286,636), Zap Express (U.S. Pat. Nos. 5,128,256 and 5,286,636), pBluescript (pBS) (Short, J. M. et al., Nucleic Acids Res. 16:7583-7600 (1988); Alting-Mees, M. A. and Short, J. M., Nucleic Acids Res. 17:9494 (1989)) and pBK (Alting-Mees, M. A. et al., Strategies 5:58-61 (1992)) are commercially available from Stratagene Cloning Systems, Inc., 11011 N. Torrey Pines Road, La Jolla, Calif., 92037. pBS contains an ampicillin resistance gene and pBK contains a neomycin resistance gene. Both can be transformed into E. coli strain XL-1. Blue, also available from Stratagene. pBS comes in 4 forms SK+, SK−, KS+ and KS. The S and K refers to the orientation of the polylinker to the T7 and T3 primer sequences which flank the polylinker region (“S” is for SacI and “K” is for KpnI which are the first sites on each respective end of the linker). “+” or “−” refer to the orientation of the f1 origin of replication (“ori”), such that in one orientation, single stranded rescue initiated from the f1 ori generates sense strand DNA and in the other, antisense.

[0857] Vectors pSport1, pCMVSport 2.0 and pCMVSport 3.0, were obtained from Life Technologies, Inc., P.O. Box 6009, Gaithersburg, Md. 20897. All Sport vectors contain an ampicillin resistance gene and may be transformed into E. coli strain DH10B, also available from Life Technologies. (See, for instance, Gruber, C. E., et al., Focus 15:59 (1993)). Vector lafmid BA (Bento Soares, Columbia University, NY) contains an ampicillin resistance gene and can be transformed into E. coli strain XL-1 Blue. Vector pCR®2.1, which is available from Invitrogen, 1600 Faraday Avenue, Carlsbad, Calif. 92008, contains an ampicillin resistance gene and may be transformed into E. coli strain DH10B, available from Life Technologies. (See, for instance, Clark, J. M., Nuc. Acids Res. 16:9677-9686 (1988) and Mead, D. et al., Bio/Technology 9: (1991)). Preferably, a polynucleotide of the present invention does not comprise the phage vector sequences identified for the particular clone in Table 7, as well as the corresponding plasmid vector sequences designated above.

[0858] The deposited material in the sample assigned the ATCC Deposit Number cited by reference to Table 1A, Table 2, Table 6 and Table 7 for any given cDNA clone also may contain one or more additional plasmids, each comprising a cDNA clone different from that given clone. Thus, deposits sharing the same ATCC Deposit Number contain at least a plasmid for each ATCC Deposit No:Z.

TABLE 7

| | | | ATCC |
|---|---|---|---|
| Libraries owned by Catalog | Catalog Description | Vector | Deposit |
| HUKA HUKB HUKC HUKD | Human Uterine Cancer | Lambda ZAP II | LP01 |
| HUKE HUKF HUKG | | | |
| HCNA HCNB | Human Colon | Lambda Zap II | LP01 |
| HFFA | Human Fetal Brain, random | Lambda Zap II | LP01 |
| | primed | | |
| HTWA | Resting T-Cell | Lambda ZAP II | LP01 |
| HBQA | Early Stage Human Brain, | Lambda ZAP II | LP01 |
| | random primed | | |
| HLMB HLMF HLMG HLMH | breast lymph node CDNA | Lambda ZAP II | LP01 |
| HLMI HLMJ HLMM HLMN | library | | |
| HCQA HCQB | human colon cancer | Lamda ZAP II | LP01 |
| HMEA HMEC HMED HMEE | Human Microvascular | Lambda ZAP II | LP01 |
| HMEF HMEG HMEI HMEJ | Endothelial Cells, fract. A | | |
| HMEK HMEL | | | |
| HUSA HUSC | Human Umbilical Vein | Lambda ZAP II | LP01 |
| | Endothelial Cells, fract. A | | |
| HLQA HLQB | Hepatocellular Tumor | Lambda ZAP II | LP01 |
| HHGA HHGB HHGC HHGD | Hemangiopericytoma | Lambda ZAP II | LP01 |
| HSDM | Human Striatum Depression, re- | Lambda ZAP II | LP01 |
| | rescue | | |
| HUSH | H Umbilical Vein Endothelial | Lambda ZAP II | LP01 |
| | Cells, frac A, re-excision | | |
| HSGS | Salivary gland, subtracted | Lambda ZAP II | LP01 |
| HFXA HFXB HFXC HFXD | Brain frontal cortex | Lambda ZAP II | LP01 |
| HFXE HFXF HFXG HFXH | | | |
| HPQA HPQB HPQC | PERM TF274 | Lambda ZAP II | LP01 |
| HFXJ HFXK | Brain Frontal Cortex, re-excision | Lambda ZAP II | LP01 |
| HCWA HCWB HCWC HCWD | CD34 positive cells (Cord | ZAP Express | LP02 |
| HCWE HCWF HCWG HCWH | Blood) | | |
| HCWI HCWJ HCWK | | | |
| HCUA HCUB HCUC | CD34 depleted Buffy Coat | ZAP Express | LP02 |
| | (Cord Blood) | | |
| HRSM | A-14 cell line | ZAP Express | LP02 |
| HRSA | A1-CELL LINE | ZAP Express | LP02 |
| HCUD HCUE HCUF HCUG | CD34 depleted Buffy Coat | ZAP Express | LP02 |
| HCUH HCUI | (Cord Blood), re-excision | | |
| HBXE HBXF HBXG | H. Whole Brain #2, re-excision | ZAP Express | LP02 |
| HRLM | L8 cell line | ZAP Express | LP02 |
| HBXA HBXB HBXC HBXD | Human Whole Brain #2 - Oligo | ZAP Express | LP02 |
| | dT >1.5 Kb | | |
| HUDA HUDB HUDC | Testes | ZAP Express | LP02 |
| HHTM HHTN HHTO | H. hypothalamus, frac A; re- | ZAP Express | LP02 |
| | excision | | |
| HHTL | H. hypothalamus, frac A | ZAP Express | LP02 |
| HASA HASD | Human Adult Spleen | Uni-ZAP XR | LP03 |
| HFKC HFKD HFKE HFKF | Human Fetal Kidney | Uni-ZAP XR | LP03 |
| HFKG | | | |
| HE8A HE8B HE8C HE8D | Human 8 Week Whole Embryo | Uni-ZAP XR | LP03 |
| HE8E HE8F HE8M HE8N | | | |
| HGBA HGBD HGBE HGBF | Human Gall Bladder | Uni-ZAP XR | LP03 |
| HGBG HGBH HGBI | | | |
| HLHA HLHB HLHC HLHD | Human Fetal Lung III | Uni-ZAP XR | LP03 |
| HLHE HLHF HLHG HLHH | | | |
| HLHQ | | | |
| HPMA HPMB HPMC HPMD | Human Placenta | Uni-ZAP XR | LP03 |
| HPME HPMF HPMG HPMH | | | |
| HPRA HPRB HPRC HPRD | Human Prostate | Uni-ZAP XR | LP03 |
| HSIA HSIC HSID HSIE | Human Adult Small Intestine | Uni-ZAP XR | LP03 |
| HTEA HTEB HTEC HTED | Human Testes | Uni-ZAP XR | LP03 |
| HTEE HTEF HTEG HTEH | | | |
| HTEI HTEJ HTEK | | | |
| HTPA HTPB HTPC HTPD | Human Pancreas Tumor | Uni-ZAP XR | LP03 |
| HTPE | | | |
| HTTA HTTB HTTC HTTD | Human Testes Tumor | Uni-ZAP XR | LP03 |
| HTTE HTTF | | | |
| HAPA HAPB HAPC HAPM | Human Adult Pulmonary | Uni-ZAP XR | LP03 |
| HETA HETB HETC HETD | Human Endometrial Tumor | Uni-ZAP XR | LP03 |
| HETE HETF HETG HETH | | | |
| HETI | | | |
| HHFB HHFC HHFD HHFE | Human Fetal Heart | Uni-ZAP XR | LP03 |
| HHFF HHFG HHFH HHFI | | | |
| HHPB HHPC HHPD HHPE | Human Hippocampus | Uni-ZAP XR | LP03 |
| HHPF HHPG HHPH | | | |
| HCE1 HCE2 HCE3 HCE4 | Human Cerebellum | Uni-ZAP XR | LP03 |
| HCE5 HCEB HCEC HCED | | | |
| HCEE HCEF HCEG | | | |
| HUVB HUVC HUVD HUVE | Human Umbilical Vein, Endo. | Uni-ZAP XR | LP03 |
| | remake | | |
| HSTA HSTB HSTC HSTD | Human Skin Tumor | Uni-ZAP XR | LP03 |
| HTAA HTAB HTAC HTAD | Human Activated T-Cells | Uni-ZAP XR | LP03 |
| HTAE | | | |
| HFEA HFEB HFEC | Human Fetal Epithelium (Skin) | Uni-ZAP XR | LP03 |
| HJPA HJPB HJPC HJPD | HUMAN JURKAT | Uni-ZAP XR | LP03 |
| | MEMBRANE BOUND | | |
| | POLYSOMES | | |
| HESA | Human epithelioid sarcoma | Uni-Zap XR | LP03 |
| HLTA HLTB HLTC HLTD | Human T-Cell Lymphoma | Uni-ZAP XR | LP03 |
| HLTE HLTF | | | |
| HFTA HFTB HFTC HFTD | Human Fetal Dura Mater | Uni-ZAP XR | LP03 |
| HRDA HRDB HRDC HRDD | Human Rhabdomyosarcoma | Uni-ZAP XR | LP03 |
| HRDE HRDF | | | |
| HCAA HCAB HCAC | Cem cells cyclohexamide treated | Uni-ZAP XR | LP03 |
| HRGA HRGB HRGC HRGD | Raji Cells, cyclohexamide | Uni-ZAP XR | LP03 |
| | treated | | |
| HSUA HSUB HSUC HSUM | Supt Cells, cyclohexamide | Uni-ZAP XR | LP03 |
| | treated | | |
| HT4A HT4C HT4D | Activated T-Cells, 12 hrs. | Uni-ZAP XR | LP03 |
| HE9A HE9B HE9C HE9D | Nine Week Old Early Stage | Uni-ZAP XR | LP03 |
| HE9E HE9F HE9G HE9H | Human | | |
| HE9M HE9N | | | |
| HATA HATB HATC HATD | Human Adrenal Gland Tumor | Uni-ZAP XR | LP03 |
| HATE | | | |
| HT5A | Activated T-Cells, 24 hrs. | Uni-ZAP XR | LP03 |
| HFGA HFGM | Human Fetal Brain | Uni-ZAP XR | LP03 |
| HNEA HNEB HNEC HNED | Human Neutrophil | Uni-ZAP XR | LP03 |
| HNEE | | | |
| HBGB HBGD | Human Primary Breast Cancer | Uni-ZAP XR | LP03 |
| HBNA HBNB | Human Normal Breast | Uni-ZAP XR | LP03 |
| HCAS | Cem Cells, cyclohexamide | Uni-ZAP XR | LP03 |
| | treated, subtra | | |
| HHPS | Human Hippocampus, | pBS | LP03 |
| | subtracted | | |
| HKCS HKCU | Human Colon Cancer, | pBS | LP03 |
| | subtracted | | |
| HRGS | Raji cells, cyclohexamide | pBS | LP03 |
| | treated, subtracted | | |
| HSUT | Supt cells, cyclohexamide | pBS | LP03 |
| | treated, differentially expressed | | |
| HT4S | Activated T-Cells, 12 hrs, | Uni-ZAP XR | LP03 |
| | subtracted | | |
| HCDA HCDB HCDC HCDD | Human Chondrosarcoma | Uni-ZAP XR | LP03 |
| HCDE | | | |
| HOAA HOAB HOAC | Human Osteosarcoma | Uni-ZAP XR | LP03 |
| HTLA HTLB HTLC HTLD | Human adult testis, large inserts | Uni-ZAP XR | LP03 |
| HTLE HTLF | | | |
| HLMA HLMC HLMD | Breast Lymph node cDNA | Uni-ZAP XR | LP03 |
| | library | | |
| H6EA H6EB H6EC | HL-60, PMA 4H | Uni-ZAP XR | LP03 |
| HTXA HTXB HTXC HTXD | Activated T-Cell | Uni-ZAP XR | LP03 |
| HTXE HTXF HTXG HTXH | (12 hs)/Thiouridine labelledEco | | |
| HNFA HNFB HNFC HNFD | Human Neutrophil, Activated | Uni-ZAP XR | LP03 |
| HNFE HNFF HNFG HNFH | | | |
| HNFJ | | | |
| HTOB HTOC | HUMAN TONSILS, | Uni-ZAP XR | LP03 |
| | FRACTION 2 | | |
| HMGB | Human OB MG63 control | Uni-ZAP XR | LP03 |
| | fraction I | | |
| HOPB | Human OB HOS control fraction I | Uni-ZAP XR | LP03 |
| HORB | Human OB HOS treated (10 nM | Uni-ZAP XR | LP03 |
| | E2) fraction I | | |
| HSVA HSVB HSVC | Human Chronic Synovitis | Uni-ZAP XR | LP03 |
| HROA | HUMAN STOMACH | Uni-ZAP XR | LP03 |
| HBJA HBJB HBJC HBJD HBJE | HUMAN B CELL | Uni-ZAP XR | LP03 |
| HBJF HBJG HBJH HBJI HBJJ | LYMPHOMA | | |
| HBJK | | | |
| HCRA HCRB HCRC | human corpus colosum | Uni-ZAP XR | LP03 |
| HODA HODB HODC HODD | human ovarian cancer | Uni-ZAP XR | LP03 |
| HDSA | Dermatofibrosarcoma | Uni-ZAP XR | LP03 |
| | Protuberance | | |
| HMWA HMWB HMWC | Bone Marrow Cell Line | Uni-ZAP XR | LP03 |
| HMWD HMWE HMWF | (RS4; 11) | | |
| HMWG HMWH HMWI HMWJ | | | |
| HSOA | stomach cancer (human) | Uni-ZAP XR | LP03 |
| HERA | SKIN | Uni-ZAP XR | LP03 |
| HMDA | Brain-medulloblastoma | Uni-ZAP XR | LP03 |
| HGLA HGLB HGLD | Glioblastoma | Uni-ZAP XR | LP03 |
| HEAA | H. Atrophic Endometrium | Uni-ZAP XR | LP03 |
| HBCA HBCB | H. Lymph node breast Cancer | Uni-ZAP XR | LP03 |
| HPWT | Human Prostate BPH, re- | Uni-ZAP XR | LP03 |
| | excision | | |
| HFVG HFVH HFVI | Fetal Liver, subtraction II | pBS | LP03 |
| HNFI | Human Neutrophils, Activated, | pBS | LP03 |
| | re-excision | | |
| HBMB HBMC HBMD | Human Bone Marrow, re- | pBS | LP03 |
| | excision | | |
| HKML HKMM HKMN | H. Kidney Medulla, re-excision | pBS | LP03 |
| HKIX HKIY | H. Kidney Cortex, subtracted | pBS | LP03 |
| HADT | H. Amygdala Depression, | pBS | LP03 |
| | subtracted | | |
| H6AS | Hl-60, untreated, subtracted | Uni-ZAP XR | LP03 |
| H6ES | HL-60, PMA 4 H, subtracted | Uni-ZAP XR | LP03 |
| H6BS | HL-60, RA 4 h, Subtracted | Uni-ZAP XR | LP03 |
| H6CS | HL-60, PMA 1d, subtracted | Uni-ZAP XR | LP03 |
| HTXJ HTXK | Activated T- | Uni-ZAP XR | LP03 |
| | cell(12 h)/Thiouridine-re- | | |
| | excision | | |
| HMSA HMSB HMSC HMSD | Monocyte activated | Uni-ZAP XR | LP03 |
| HMSE HMSF HMSG HMSH | | | |
| HMSI HMSJ HMSK | | | |
| HAGA HAGB HAGC HAGD | Human Amygdala | Uni-ZAP XR | LP03 |
| HAGE HAGF | | | |
| HSRA HSRB HSRE | STROMAL- | Uni-ZAP XR | LP03 |
| | OSTEOCLASTOMA | | |
| HSRD HSRF HSRG HSRH | Human Osteoclastoma Stromal | Uni-ZAP XR | LP03 |
| | Cells - unamplified | | |
| HSQA HSQB HSQC HSQD | Stromal cell TF274 | Uni-ZAP XR | LP03 |
| HSQE HSQF HSQG | | | |
| HSKA HSKB HSKC HSKD | Smooth muscle, serum treated | Uni-ZAP XR | LP03 |
| HSKE HSKF HSKZ | | | |
| HSLA HSLB HSLC HSLD | Smooth muscle, control | Uni-ZAP XR | LP03 |
| HSLE HSLF HSLG | | | |
| HSDA HSDD HSDE HSDF | Spinal cord | Uni-ZAP XR | LP03 |
| HSDG HSDH | | | |
| HPWS | Prostate-BPH subtracted II | pBS | LP03 |
| HSKW HSKX HSKY | Smooth Muscle- HASTE | pBS | LP03 |
| | normalized | | |
| HFPB HFPC HFPD | H. Frontal cortex, epileptic; re- | Uni-ZAP XR | LP03 |
| | excision | | |
| HSDI HSDJ HSDK | Spinal Cord, re-excision | Uni-ZAP XR | LP03 |
| HSKN HSKO | Smooth Muscle Serum Treated, | pBS | LP03 |
| | Norm | | |
| HSKG HSKH HSKI | Smooth muscle, serum | pBS | LP03 |
| | induced, re-exc | | |
| HFCA HFCB HFCC HFCD | Human Fetal Brain | Uni-ZAP XR | LP04 |
| HFCE HFCF | | | |
| HPTA HPTB HPTD | Human Pituitary | Uni-ZAP XR | LP04 |
| HTHB HTHC HTHD | Human Thymus | Uni-ZAP XR | LP04 |
| HE6B HE6C HE6D HE6E HE6F | Human Whole Six Week Old | Uni-ZAP XR | LP04 |
| HE6G HE6S | Embryo | | |
| HSSA HSSB HSSC HSSD | Human Synovial Sarcoma | Uni-ZAP XR | LP04 |
| HSSE HSSF HSSG HSSH HSSI | | | |
| HSSJ HSSK | | | |
| HE7T | 7 Week Old Early Stage Human, | Uni-ZAP XR | LP04 |
| | subtracted | | |
| HEPA HEPB HEPC | Human Epididymus | Uni-ZAP XR | LP04 |
| HSNA HSNB HSNC HSNM | Human Synovium | Uni-ZAP XR | LP04 |
| HSNN | | | |
| HPFB HPFC HPFD HPFE | Human Prostate Cancer, Stage C | Uni-ZAP XR | LP04 |
| | fraction | | |
| HE2A HE2D HE2E HE2H HE2I | 12 Week Old Early Stage | Uni-ZAP XR | LP04 |
| HE2M HE2N HE2O | Human | | |
| HE2B HE2C HE2F HE2G HE2P | 12 Week Old Early Stage | Uni-ZAP XR | LP04 |
| HE2Q | Human, II | | |
| HPTS HPTT HPTU | Human Pituitary, subtracted | Uni-ZAP XR | LP04 |
| HAUA HAUB HAUC | Amniotic Cells - TNF induced | Uni-ZAP XR | LP04 |
| HAQA HAQB HAQC HAQD | Amniotic Cells - Primary | Uni-ZAP XR | LP04 |
| | Culture | | |
| HWTA HWTB HWTC | wilm's tumor | Uni-ZAP XR | LP04 |
| HBSD | Bone Cancer, re-excision | Uni-ZAP XR | LP04 |
| HSGB | Salivary gland, re-excision | Uni-ZAP XR | LP04 |
| HSJA HSJB HSJC | Smooth muscle-ILb induced | Uni-ZAP XR | LP04 |
| HSXA HSXB HSXC HSXD | Human Substantia Nigra | Uni-ZAP XR | LP04 |
| HSHA HSHB HSHC | Smooth muscle, IL1b induced | Uni-ZAP XR | LP04 |
| HOUA HOUB HOUC HOUD | Adipocytes | Uni-ZAP XR | LP04 |
| HOUE | | | |
| HPWA HPWB HPWC HPWD | Prostate BPH | Uni-ZAP XR | LP04 |
| HPWE | | | |
| HELA HELB HELC HELD | Endothelial cells-control | Uni-ZAP XR | LP04 |
| HELE HELF HELG HELH | | | |
| HEMA HEMB HEMC HEMD | Endothelial-induced | Uni-ZAP XR | LP04 |
| HEME HEMF HEMG HEMH | | | |
| HBIA HBIB HBIC | Human Brain, Striatum | Uni-ZAP XR | LP04 |
| HHSA HHSB HHSC HHSD | Human | Uni-ZAP XR | LP04 |
| HHSE | Hypothalmus, Schizophrenia | | |
| HNGA HNGB HNGC HNGD | neutrophils control | Uni-ZAP XR | LP04 |
| HNGE HNGF HNGG HNGH | | | |
| HNGI HNGJ | | | |
| HNHA HNHB HNHC HNHD | Neutrophils IL-1 and LPS | Uni-ZAP XR | LP04 |
| HNHE HNHF HNHG HNHH | induced | | |
| HNHI HNHJ | | | |
| HSDB HSDC | STRIATUM DEPRESSION | Uni-ZAP XR | LP04 |
| HHPT | Hypothalamus | Uni-ZAP XR | LP04 |
| HSAT HSAU HSAV HSAW | Anergic T-cell | Uni-ZAP XR | LP04 |
| HSAX HSAY HSAZ | | | |
| HBMS HBMT HBMU HBMV | Bone marrow | Uni-ZAP XR | LP04 |
| HBMW HBMX | | | |
| HOEA HOEB HOEC HOED | Osteoblasts | Uni-ZAP XR | LP04 |
| HOEE HOEF HOEJ | | | |
| HAIA HAIB HAIC HAID HAIE | Epithelial-TNFa and INF | Uni-ZAP XR | LP04 |
| HAIF | induced | | |
| HTGA HTGB HTGC HTGD | Apoptotic T-cell | Uni-ZAP XR | LP04 |
| HMCA HMCB HMCC HMCD | Macrophage-oxLDL | Uni-ZAP XR | LP04 |
| HMCE | | | |
| HMAA HMAB HMAC HMAD | Macrophage (GM-CSF treated) | Uni-ZAP XR | LP04 |
| HMAE HMAF HMAG | | | |
| HPHA | Normal Prostate | Uni-ZAP XR | LP04 |
| HPIA HPIB HPIC | LNCAP prostate cell line | Uni-ZAP XR | LP04 |
| HPJA HPJB HPJC | PC3 Prostate cell line | Uni-ZAP XR | LP04 |
| HOSE HOSF HOSG | Human Osteoclastoma, re- | Uni-ZAP XR | LP04 |
| | excision | | |
| HTGE HTGF | Apoptotic T-cell, re-excision | Uni-ZAP XR | LP04 |
| HMAJ HMAK | H Macrophage (GM-CSF | Uni-ZAP XR | LP04 |
| | treated), re-excision | | |
| HACB HACC HACD | Human Adipose Tissue, re- | Uni-ZAP XR | LP04 |
| | excision | | |
| HFPA | H. Frontal Cortex, Epileptic | Uni-ZAP XR | LP04 |
| HFAA HFAB HFAC HFAD | Alzheimer's, spongy change | Uni-ZAP XR | LP04 |
| HFAE | | | |
| HFAM | Frontal Lobe, Dementia | Uni-ZAP XR | LP04 |
| HMIA HMIB HMIC | Human Manic Depression | Uni-ZAP XR | LP04 |
| | Tissue | | |
| HTSA HTSE HTSF HTSG | Human Thymus | pBS | LP05 |
| HTSH | | | |
| HPBA HPBB HPBC HPBD | Human Pineal Gland | pBS | LP05 |
| HPBE | | | |
| HSAA HSAB HSAC | HSA 172 Cells | pBS | LP05 |
| HSBA HSBB HSBC HSBM | HSC172 cells | pBS | LP05 |
| HJAA HJAB HJAC HJAD | Jurkat T-cell G1 phase | pBS | LP05 |
| HJBA HJBB HJBC HJBD | Jurkat T-Cell, S phase | pBS | LP05 |
| HAFA HAFB | Aorta endothelial cells + TNF-a | pBS | LP05 |
| HAWA HAWB HAWC | Human White Adipose | pBS | LP05 |
| HTNA HTNB | Human Thyroid | pBS | LP05 |
| HONA | Normal Ovary, Premenopausal | pBS | LP05 |
| HARA HARB | Human Adult Retina | pBS | LP05 |
| HLJA HLJB | Human Lung | pCMVSport 1 | LP06 |
| HOFM HOFN HOFO | H. Ovarian Tumor, II, OV5232 | pCMVSport 2.0 | LP07 |
| HOGA HOGB HOGC | OV 10-3-95 | pCMVSport 2.0 | LP07 |
| HCGL | CD34+cells, II | pCMVSport 2.0 | LP07 |
| HDLA | Hodgkin's Lymphoma I | pCMVSport 2.0 | LP07 |
| HDTA HDTB HDTC HDTD | Hodgkin's Lymphoma II | pCMVSport 2.0 | LP07 |
| HDTE | | | |
| HKAA HKAB HKAC HKAD | Keratinocyte | pCMVSport 2.0 | LP07 |
| HKAE HKAF HKAG HKAH | | | |
| HCIM | CAPFINDER, Crohn's Disease, | pCMVSport 2.0 | LP07 |
| | lib 2 | | |
| HKAL | Keratinocyte, lib 2 | pCMVSport2.0 | LP07 |
| HKAT | Keratinocyte, lib 3 | pCMVSport2.0 | LP07 |
| HNDA | Nasal polyps | pCMVSport2.0 | LP07 |
| HDRA | H. Primary Dendritic Cells, lib 3 | pCMVSport2.0 | LP07 |
| HOHA HOHB HOHC | Human Osteoblasts II | pCMVSport2.0 | LP07 |
| HLDA HLDB HLDC | Liver, Hepatoma | pCMVSport3.0 | LP08 |
| HLDN HLDO HLDP | Human Liver, normal | pCMVSport3.0 | LP08 |
| HMTA | pBMC stimulated w/ poly I/C | pCMVSport3.0 | LP08 |
| HNTA | NTERA2, control | pCMVSport3.0 | LP08 |
| HDPA HDPB HDPC HDPD | Primary Dendritic Cells, lib 1 | pCMVSport3.0 | LP08 |
| HDPF HDPG HDPH HDPI | | | |
| HDPJ HDPK | | | |
| HDPM HDPN HDPO HDPP | Primary Dendritic cells, frac 2 | pCMVSport3.0 | LP08 |
| HMUA HMUB HMUC | Myoloid Progenitor Cell Line | pCMVSport3.0 | LP08 |
| HHEA HHEB HHEC HHED | T Cell helper I | pCMVSport3.0 | LP08 |
| HHEM HHEN HHEO HHEP | T cell helper II | pCMVSport3.0 | LP08 |
| HEQA HEQB HEQC | Human endometrial stromal cells | pCMVSport3.0 | LP08 |
| HJMA HJMB | Human endometrial stromal | pCMVSport3.0 | LP08 |
| | cells-treated with progesterone | | |
| HSWA HSWB HSWC | Human endometrial stromal | pCMVSport3.0 | LP08 |
| | cells-treated with estradiol | | |
| HSYA HSYB HSYC | Human Thymus Stromal Cells | pCMVSport3.0 | LP08 |
| HLWA HLWB HLWC | Human Placenta | pCMVSport3.0 | LP08 |
| HRAA HRAB HRAC | Rejected Kidney, lib 4 | pCMVSport3.0 | LP08 |
| HMTM | PCR, pBMC I/C treated | PCRII | LP09 |
| HMJA | H. Meniingima, M6 | pSport 1 | LP10 |
| HMKA HMKB HMKC HMKD | H. Meningima, M1 | pSport 1 | LP10 |
| HMKE | | | |
| HUSG HUSI | Human umbilical vein | pSport 1 | LP10 |
| | endothelial cells, IL-4 induced | | |
| HUSX HUSY | Human Umbilical Vein | pSport 1 | LP10 |
| | Endothelial Cells, uninduced | | |
| HOFA | Ovarian Tumor I, OV5232 | pSport 1 | LP10 |
| HCFA HCFB HCFC HCFD | T-Cell PHA 16 hrs | pSport 1 | LP10 |
| HCFL HCFM HCFN HCFO | T-Cell PHA 24 hrs | pSport 1 | LP10 |
| HADA HADC HADD HADE | Human Adipose | pSport 1 | LP10 |
| HADF HADG | | | |
| HOVA HOVB HOVC | Human Ovary | pSport 1 | LP10 |
| HTWB HTWC HTWD HTWE | Resting T-Cell Library, II | pSport 1 | LP10 |
| HTWF | | | |
| HMMA | Spleen metastic melanoma | pSport 1 | LP10 |
| HLYA HLYB HLYC HLYD | Spleen, Chronic lymphocytic | pSport 1 | LP10 |
| HLYE | leukemia | | |
| HCGA | CD34+ cell, I | pSport 1 | LP10 |
| HEOM HEON | Human Eosinophils | pSport 1 | LP10 |
| HTDA | Human Tonsil, Lib 3 | pSport 1 | LP10 |
| HSPA | Salivary Gland, Lib 2 | pSport 1 | LP10 |
| HCHA HCHB HCHC | Breast Cancer cell line, MDA 36 | pSport 1 | LP10 |
| HCHM HCHN | Breast Cancer Cell line, | pSport 1 | LP10 |
| | angiogenic | | |
| HCIA | Crohn's Disease | pSport 1 | LP10 |
| HDAA HDAB HDAC | HEL cell line | pSport 1 | LP10 |
| HABA | Human Astrocyte | pSport 1 | LP10 |
| HUFA HUFB HUFC | Ulcerative Colitis | pSport 1 | LP10 |
| HNTM | NTERA2 + retinoic acid, 14 | pSport 1 | LP10 |
| | days | | |
| HDQA | Primary Dendritic | pSport 1 | LP10 |
| | cells, CapFinder2, frac 1 | | |
| HDQM | Primary Dendritic Cells, | pSport 1 | LP10 |
| | CapFinder, frac 2 | | |
| HLDX | Human Liver, normal, CapFinder | pSport 1 | LP10 |
| HULA HULB HULC | Human Dermal Endothelial | pSport1 | LP10 |
| | Cells, untreated | | |
| HUMA | Human Dermal Endothelial | pSport1 | LP10 |
| | cells, treated | | |
| HCJA | Human Stromal Endometrial | p Sport1 | LP10 |
| | fibroblasts, untreated | | |
| HCJM | Human Stromal endometrial | pSport1 | LP10 |
| | fibroblasts, treated w/ estradiol | | |
| HEDA | Human Stromal endometrial | pSport1 | LP10 |
| | fibroblasts, treated with | | |
| | progesterone | | |
| HFNA | Human ovary tumor cell | pSport1 | LP10 |
| | OV350721 | | |
| HKGA HKGB HKGC HKGD | Merkel Cells | pSport1 | LP10 |
| HISA HISB HISC | Pancreas Islet Cell Tumor | pSport1 | LP10 |
| HLSA | Skin, burned | pSport1 | LP10 |
| HBZA | Prostate, BPH, Lib 2 | pSport 1 | LP10 |
| HBZS | Prostate BPH, Lib 2, subtracted | pSport 1 | LP10 |
| HFIA HFIB HFIC | Synovial Fibroblasts (control) | pSport 1 | LP10 |
| HFIH HEII HFIJ | Synovial hypoxia | pSport 1 | LP10 |
| HFIT HFIU HFIV | Synovial IL-1/TNF stimulated | pSport 1 | LP10 |
| HGCA | Messangial cell, frac 1 | pSport1 | LP10 |
| HMVA HMVB HMVC | Bone Marrow Stromal Cell, | pSport1 | LP10 |
| | untreated | | |
| HFIX HFIY HFIZ | Synovial Fibroblasts (II1/TNF), | pSport1 | LP10 |
| | subt | | |
| HFOX HFOY HFOZ | Synovial hypoxia-RSF | pSport1 | LP10 |
| | subtracted | | |
| HMQA HMQB HMQC HMQD | Human Activated Monocytes | Uni-ZAP XR | LP11 |
| HLIA HLIB HLIC | Human Liver | pCMVSport 1 | LP012 |
| HHBA HHBB HHBC HHBD | Human Heart | pCMVSport 1 | LP012 |
| HHBE | | | |
| HBBA HBBB | Human Brain | pCMVSport 1 | LP012 |
| HLJA HLJB HLJC HLJD HLJE | Human Lung | pCMVSport 1 | LP012 |
| HOGA HOGB HOGC | Ovarian Tumor | pCMVSport 2.0 | LP012 |
| HTJM | Human Tonsils, Lib 2 | pCMVSport 2.0 | LP012 |
| HAMF HAMG | KMH2 | pCMVSport 3.0 | LP012 |
| HAJA HAJB HAJC | L428 | pCMVSport 3.0 | LP012 |
| HWBA HWBB HWBC HWBD | Dendritic cells, pooled | pCMVSport 3.0 | LP012 |
| HWBE | | | |
| HWAA HWAB HWAC HWAD | Human Bone Marrow, treated | pCMVSport 3.0 | LP012 |
| HWAE | | | |
| HYAA HYAB HYAC | B Cell lymphoma | pCMVSport 3.0 | LP012 |
| HWHG HWHH HWHI | Healing groin wound, 6.5 hours | pCMVSport 3.0 | LP012 |
| | post incision | | |
| HWHP HWHQ HWHR | Healing groin wound; 7.5 hours | pCMVSport 3.0 | LP012 |
| | post incision | | |
| HARM | Healing groin wound - zero hr | pCMVSport 3.0 | LP012 |
| | post-incision (control) | | |
| HBIM | Olfactory epithelium; | pCMVSport 3.0 | LP012 |
| | nasalcavity | | |
| HWDA | Healing Abdomen wound; | pCMVSport 3.0 | LP012 |
| | 70&90 min post incision | | |
| HWEA | Healing Abdomen Wound; 15 | pCMVSport 3.0 | LP012 |
| | days post incision | | |
| HWJA | Healing Abdomen | pCMVSport 3.0 | LP012 |
| | Wound; 21&29 days | | |
| HNAL | Human Tongue, frac 2 | pSport1 | LP012 |
| HMJA | H. Meniingima, M6 | pSport1 | LP012 |
| HMKA HMKB HMKC HMKD | H. Meningima, M1 | pSport1 | LP012 |
| HMKE | | | |
| HOFA | Ovarian Tumor I, OV5232 | pSport1 | LP012 |
| HCFA HCFB HCFC HCFD | T-Cell PHA 16 hrs | pSport1 | LP012 |
| HCFL HCFM HCFN HCFO | T-Cell PHA 24 hrs | pSport1 | LP012 |
| HMMA HMMB HMMC | Spleen metastic melanoma | pSport1 | LP012 |
| HTDA | Human Tonsil, Lib 3 | pSport1 | LP012 |
| HDBA | Human Fetal Thymus | pSport1 | LP012 |
| HDUA | Pericardium | pSport1 | LP012 |
| HBZA | Prostate, BPH, Lib 2 | pSport1 | LP012 |
| HWCA | Larynx tumor | pSport1 | LP012 |
| HWKA | Normal lung | pSport1 | LP012 |
| HSMB | Bone marrow stroma, treated | pSport1 | LP012 |
| HBHM | Normal trachea | pSport1 | LP012 |
| HLFC | Human Larynx | pSport1 | LP012 |
| HLRB | Siebben Polyposis | pSport1 | LP012 |
| HNIA | Mammary Gland | pSport1 | LP012 |
| HNJB | Palate carcinoma | pSport1 | LP012 |
| HNKA | Palate normal | pSport1 | LP012 |
| HMZA | Pharynx carcinoma | pSport1 | LP012 |
| HABG | Cheek Carcinoma | pSport1 | LP012 |
| HMZM | Pharynx Carcinoma | pSport1 | LP012 |
| HDRM | Larynx Carcinoma | pSport1 | LP012 |
| HVAA | Pancreas normal PCA4 No | pSport1 | LP012 |
| HICA | Tongue carcinoma | pSport1 | LP012 |
| HUKA HUKB HUKC HUKD | Human Uterine Cancer | Lambda ZAP II | LP013 |
| HUKE | | | |
| HFFA | Human Fetal Brain, random | Lambda ZAP II | LP013 |
| | primed | | |
| HTUA | Activated T-cell labeled with 4- | Lambda ZAP II | LP013 |
| | thioluri | | |
| HBQA | Early Stage Human Brain, | Lambda ZAP II | LP013 |
| | random primed | | |
| HMEB | Human microvascular | Lambda ZAP II | LP013 |
| | Endothelial cells, fract. B | | |
| HUSH | Human Umbilical Vein | Lambda ZAP II | LP013 |
| | Endothelial cells, fract. A, re- | | |
| | excision | | |
| HLQC HLQD | Hepatocellular tumor, re- | Lambda ZAP II | LP013 |
| | excision | | |
| HTWJ HTWK HTWL | Resting T-cell, re-excision | Lambda ZAP II | LP013 |
| HF6S | Human Whole 6 week Old | pBluescript | LP013 |
| | Embryo (II), subt | | |
| HHPS | Human Hippocampus, | pBluescript | LP013 |
| | subtracted | | |
| HL1S | LNCAP, differential expression | pBluescript | LP013 |
| HLHS HLHT | Early Stage Human Lung, | pBluescript | LP013 |
| | Subtracted | | |
| HSUS | Supt cells, cyclohexamide | pBluescript | LP013 |
| | treated, subtracted | | |
| HSUT | Supt cells, cyclohexamide | pBluescript | LP013 |
| | treated, differentially expressed | | |
| HSDS | H. Striatum Depression, | pBluescript | LP013 |
| | subtracted | | |
| HPTZ | Human Pituitary, Subtracted VII | pBluescript | LP013 |
| HSDX | H. Striatum Depression, subt II | pBluescript | LP013 |
| HSDZ | H. Striatum Depression, subt | pBluescript | LP013 |
| HPBA HPBB HPBC HPBD | Human Pineal Gland | pBluescript SK− | LP013 |
| HPBE | | | |
| HRTA | Colorectal Tumor | pBluescript SK− | LP013 |
| HSBA HSBB HSBC HSBM | HSC172 cells | pBluescript SK− | LP013 |
| HJAA HJAB HJAC HJAD | Jurkat T-cell G1 phase | pBluescript SK− | LP013 |
| HJBA HJBB HJBC HJBD | Jurkat T-cell, S1 phase | pBluescript SK− | LP013 |
| HTNA HTNB | Human Thyroid | pBluescript SK− | LP013 |
| HAHA HAHB | Human Adult Heart | Uni-ZAP XR | LP013 |
| HE6A | Whole 6 week Old Embryo | Uni-ZAP XR | LP013 |
| HFCA HFCB HFCC HFCD | Human Fetal Brain | Uni-ZAP XR | LP013 |
| HFCE | | | |
| HFKC HFKD HFKE HFKF | Human Fetal Kidney | Uni-ZAP XR | LP013 |
| HFKG | | | |
| HGBA HGBD HGBE HGBF | Human Gall Bladder | Uni-ZAP XR | LP013 |
| HGBG | | | |
| HPRA HPRB HPRC HPRD | Human Prostate | Uni-ZAP XR | LP013 |
| HTEA HTEB HTEC HTED | Human Testes | Uni-ZAP XR | LP013 |
| HTEE | | | |
| HTTA HTTB HTTC HTTD | Human Testes Tumor | Uni-ZAP XR | LP013 |
| HTTE | | | |
| HYBA HYBB | Human Fetal Bone | Uni-ZAP XR | LP013 |
| HFLA | Human Fetal Liver | Uni-ZAP XR | LP013 |
| HHFB HHFC HHFD HHFE | Human Fetal Heart | Uni-ZAP XR | LP013 |
| HHFF | | | |
| HUVB HUVC HUVD HUVE | Human Umbilical Vein, End. | Uni-ZAP XR | LP013 |
| | remake | | |
| HTHB HTHC HTHD | Human Thymus | Uni-ZAP XR | LP013 |
| HSTA HSTB HSTC HSTD | Human Skin Tumor | Uni-ZAP XR | LP013 |
| HTAA HTAB HTAC HTAD | Human Activated T-cells | Uni-ZAP XR | LP013 |
| HTAE | | | |
| HFEA HFEB HFEC | Human Fetal Epithelium (skin) | Uni-ZAP XR | LP013 |
| HJPA HJPB HJPC HJPD | Human Jurkat Membrane Bound | Uni-ZAP XR | LP013 |
| | Polysomes | | |
| HESA | Human Epithelioid Sarcoma | Uni-ZAP XR | LP013 |
| HALS | Human Adult Liver, Subtracted | Uni-ZAP XR | LP013 |
| HFTA HFTB HFTC HFTD | Human Fetal Dura Mater | Uni-ZAP XR | LP013 |
| HCAA HCAB HCAC | Cem cells, cyclohexamide | Uni-ZAP XR | LP013 |
| | treated | | |
| HRGA HRGB HRGC HRGD | Raji Cells, cyclohexamide | Uni-ZAP XR | LP013 |
| | treated | | |
| HE9A HE9B HE9C HE9D | Nine Week Old Early Stage | Uni-ZAP XR | LP013 |
| HE9E | Human | | |
| HSFA | Human Fibrosarcoma | Uni-ZAP XR | LP013 |
| HATA HATB HATC HATD | Human Adrenal Gland Tumor | Uni-ZAP XR | LP013 |
| HATE | | | |
| HTRA | Human Trachea Tumor | Uni-ZAP XR | LP013 |
| HE2A HE2D HE2E HE2H HE2I | 12 Week Old Early Stage | Uni-ZAP XR | LP013 |
| | Human | | |
| HE2B HE2C HE2F HE2G HE2P | 12 Week Old Early Stage | Uni-ZAP XR | LP013 |
| | Human, II | | |
| HNEA HNEB HNEC HNED | Human Neutrophil | Uni-ZAP XR | LP013 |
| HNEE | | | |
| HBGA | Human Primary Breast Cancer | Uni-ZAP XR | LP013 |
| HPTS HPTT HPTU | Human Pituitary, subtracted | Uni-ZAP XR | LP013 |
| HMQA HMQB HMQC HMQD | Human Activated Monocytes | Uni-ZAP XR | LP013 |
| HOAA HOAB HOAC | Human Osteosarcoma | Uni-ZAP XR | LP013 |
| HTOA HTOD HTOE HTOF | human tonsils | Uni-ZAP XR | LP013 |
| HTOG | | | |
| HMGB | Human OB MG63 control | Uni-ZAP XR | LP013 |
| | fraction I | | |
| HOPB | Human OB HOS control fraction I | Uni-ZAP XR | LP013 |
| HOQB | Human OB HOS treated (1 nM | Uni-ZAP XR | LP013 |
| | E2) fraction I | | |
| HAUA HAUB HAUC | Amniotic Cells - TNF induced | Uni-ZAP XR | LP013 |
| HAQA HAQB HAQC HAQD | Amniotic Cells - Primary | Uni-ZAP XR | LP013 |
| | Culture | | |
| HROA HROC | HUMAN STOMACH | Uni-ZAP XR | LP013 |
| HBJA HBJB HBJC HBJD HBJE | HUMAN B CELL | Uni-ZAP XR | LP013 |
| | LYMPHOMA | | |
| HODA HODB HODC HODD | human ovarian cancer | Uni-ZAP XR | LP013 |
| HCPA | Corpus Callosum | Uni-ZAP XR | LP013 |
| HSOA | stomach cancer (human) | Uni-ZAP XR | LP013 |
| HERA | SKIN | Uni-ZAP XR | LP013 |
| HMDA | Brain-medulloblastoma | Uni-ZAP XR | LP013 |
| HGLA HGLB HGLD | Glioblastoma | Uni-ZAP XR | LP013 |
| HWTA HWTB HWTC | wilm's tumor | Uni-ZAP XR | LP013 |
| HEAA | H. Atrophic Endometrium | Uni-ZAP XR | LP013 |
| HAPN HAPO HAPP HAPQ | Human Adult Pulmonary; re- | Uni-ZAP XR | LP013 |
| HAPR | excision | | |
| HLTG HLTH | Human T-cell lymphoma; re- | Uni-ZAP XR | LP013 |
| | excision | | |
| HAHC HAHD HAHE | Human Adult Heart; re-excision | Uni-ZAP XR | LP013 |
| HAGA HAGB HAGC HAGD | Human Amygdala | Uni-ZAP XR | LP013 |
| HAGE | | | |
| HSJA HSJB HSJC | Smooth muscle-ILb induced | Uni-ZAP XR | LP013 |
| HSHA HSHB HSHC | Smooth muscle, IL1b induced | Uni-ZAP XR | LP013 |
| HPWA HPWB HPWC HPWD | Prostate BPH | Uni-ZAP XR | LP013 |
| HPWE | | | |
| HPIA HPIB HPIC | LNCAP prostate cell line | Uni-ZAP XR | LP013 |
| HPJA HPJB HPJC | PC3 Prostate cell line | Uni-ZAP XR | LP013 |
| HBTA | Bone Marrow Stroma, | Uni-ZAP XR | LP013 |
| | TNF&LPS ind | | |
| HMCF HMCG HMCH HMCI | Macrophage-oxLDL; re-excision | Uni-ZAP XR | LP013 |
| HMCJ | | | |
| HAGG HAGH HAGI | Human Amygdala; re-excision | Uni-ZAP XR | LP013 |
| HACA | H. Adipose Tissue | Uni-ZAP XR | LP013 |
| HKFB | K562 + PMA (36 hrs), re- | ZAP Express | LP013 |
| | excision | | |
| HCWT HCWU HCWV | CD34 positive cells (cord | ZAP Express | LP013 |
| | blood), re-ex | | |
| HBWA | Whole brain | ZAP Express | LP013 |
| HBXA HBXB HBXC HBXD | Human Whole Brain #2 - Oligo | ZAP Express | LP013 |
| | dT >1.5 Kb | | |
| HAVM | Temporal cortex-Alzheizmer | pT-Adv | LP014 |
| HAVT | Hippocampus, Alzheimer | pT-Adv | LP014 |
| | Subtracted | | |
| HHAS | CHME Cell Line | Uni-ZAP XR | LP014 |
| HAJR | Larynx normal | pSport 1 | LP014 |
| HWLE HWLF HWLG HWLH | Colon Normal | pSport 1 | LP014 |
| HCRM HCRN HCRO | Colon Carcinoma | pSport 1 | LP014 |
| HWLI HWLJ HWLK | Colon Normal | pSport 1 | LP014 |
| HWLQ HWLR HWLS HWLT | Colon Tumor | pSport 1 | LP014 |
| HBFM | Gastrocnemius Muscle | pSport 1 | LP014 |
| HBOD HBOE | Quadriceps Muscle | pSport 1 | LP014 |
| HBKD HBKE | Soleus Muscle | pSport 1 | LP014 |
| HCCM | Pancreatic Langerhans | pSport 1 | LP014 |
| HWGA | Larynx carcinoma | pSport 1 | LP014 |
| HWGM HWGN | Larynx carcinoma | pSport 1 | LP014 |
| HWLA HWLB HWLC | Normal colon | pSport 1 | LP014 |
| HWLM HWLN | Colon Tumor | pSport 1 | LP014 |
| HVAM HVAN HVAO | Pancreas Tumor | pSport 1 | LP014 |
| HWGQ | Larynx carcinoma | pSport 1 | LP014 |
| HAQM HAQN | Salivary Gland | pSport 1 | LP014 |
| HASM | Stomach; normal | pSport 1 | LP014 |
| HBCM | Uterus; normal | pSport 1 | LP014 |
| HCDM | Testis; normal | pSport 1 | LP014 |
| HDJM | Brain; normal | pSport 1 | LP014 |
| HEFM | Adrenal Gland, normal | pSport 1 | LP014 |
| HBAA | Rectum normal | pSport 1 | LP014 |
| HFDM | Rectum tumour | pSport 1 | LP014 |
| HGAM | Colon, normal | pSport 1 | LP014 |
| HHMM | Colon, tumour | pSport 1 | LP014 |
| HCLB HCLC | Human Lung Cancer | Lambda Zap II | LP015 |
| HRLA | L1 Cell line | ZAP Express | LP015 |
| HHAM | Hypothalamus, Alzheimer's | pCMVSport 3.0 | LP015 |
| HKBA | Ku 812F Basophils Line | pSport 1 | LP015 |
| HS2S | Saos2, Dexamethosome Treated | pSport 1 | LP016 |
| HA5A | Lung Carcinoma A549 | pSport 1 | LP016 |
| | TNFalpha activated | | |
| HTFM | TF-1 Cell Line GM-CSF Treated | pSport 1 | LP016 |
| HYAS | Thyroid Tumour | pSport 1 | LP016 |
| HUTS | Larynx Normal | pSport 1 | LP016 |
| HXOA | Larynx Tumor | pSport 1 | LP016 |
| HEAH | Ea.hy.926 cell line | pSport 1 | LP016 |
| HINA | Adenocarcinoma Human | pSport 1 | LP016 |
| HRMA | Lung Mesothelium | pSport 1 | LP016 |
| HLCL | Human Pre-Differentiated | Uni-Zap XR | LP017 |
| | Adipocytes | | |
| HS2A | Saos2 Cells | pSport 1 | LP020 |
| HS2I | Saos2 Cells; Vitamin D3 Treated | pSport 1 | LP020 |
| HUCM | CHME Cell Line, untreated | pSport 1 | LP020 |
| HEPN | Aryepiglottis Normal | pSport 1 | LP020 |
| HPSN | Sinus Piniformis Tumour | pSport 1 | LP020 |
| HNSA | Stomach Normal | pSport 1 | LP020 |
| HNSM | Stomach Tumour | pSport 1 | LP020 |
| HNLA | Liver Normal Met5No | pSport 1 | LP020 |
| HUTA | Liver Tumour Met 5 Tu | pSport 1 | LP020 |
| HOCN | Colon Normal | pSport 1 | LP020 |
| HOCT | Colon Tumor | pSport 1 | LP020 |
| HTNT | Tongue Tumour | pSport 1 | LP020 |
| HLXN | Larynx Normal | pSport 1 | LP020 |
| HLXT | Larynx Tumour | pSport 1 | LP020 |
| HTYN | Thymus | pSport 1 | LP020 |
| HPLN | Placenta | pSport 1 | LP020 |
| HTNG | Tongue Normal | pSport 1 | LP020 |
| HZAA | Thyroid Normal (SDCA2 No) | pSport 1 | LP020 |
| HWES | Thyroid Thyroiditis | pSport 1 | LP020 |
| HFHD | Ficolled Human Stromal Cells, | pTrip1Ex2 | LP021 |
| | 5Fu treated | | |
| HFHM, HFHN | Ficolled Human Stromal Cells, | pTrip1Ex2 | LP021 |
| | Untreated | | |
| HPCI | Hep G2 Cells, lambda library | lambda Zap-CMV | LP021 |
| | | XR | |
| HBCA, HBCB, HBCC | H. Lymph node breast Cancer | Uni-ZAP XR | LP021 |
| HCOK | Chondrocytes | pSPORT1 | LP022 |
| HDCA, HDCB, HDCC | Dendritic Cells From CD34 | pSPORT1 | LP022 |
| | Cells | | |
| HDMA, HDMB | CD40 activated monocyte | pSPORT1 | LP022 |
| | dendritic cells | | |
| HDDM, HDDN, HDDO | LPS activated derived dendritic | pSPORT1 | LP022 |
| | cells | | |
| HPCR | Hep G2 Cells, PCR library | lambda Zap-CMV | LP022 |
| | | XR | |
| HAAA, HAAB, HAAC | Lung, Cancer (4005313A3): | pSPORT1 | LP022 |
| | Invasive Poorly Differentiated | | |
| | Lung Adenocarcinoma | | |
| HIPA, HIPB, HIPC | Lung, Cancer (4005163 B7): | pSPORT1 | LP022 |
| | Invasive, Poorly Diff. | | |
| | Adenocarcinoma, Metastatic | | |
| HOOH, HOOI | Ovary, Cancer: (4004562 B6) | pSPORT1 | LP022 |
| | Papillary Serous Cystic | | |
| | Neoplasm, Low Malignant Pot | | |
| HIDA | Lung, Normal: (4005313 B1) | pSPORT1 | LP022 |
| HUJA, HUJB, HUJC, HUJD, HUJE | B-Cells | pCMVSport 3.0 | LP022 |
| HNOA, HNOB, HNOC, HNOD | Ovary, Normal: (9805C040R) | pSPORT1 | LP022 |
| HNLM | Lung, Normal: (4005313 B1) | pSPORT1 | LP022 |
| HSCL | Stromal Cells | pSPORT1 | LP022 |
| HAAX | Lung, Cancer: (4005313 A3) | pSPORT1 | LP022 |
| | Invasive Poorly-differentiated | | |
| | Metastatic lung adenocarcinoma | | |
| HUUA, HUUB, HUUC, HUUD | B-cells (unstimulated) | pTrip1Ex2 | LP022 |
| HWWA, HWWB, HWWC, HWWD, | B-cells (stimulated) | pSPORT1 | LP022 |
| HWWE, HWWF, HWWG | | | |
| HCCC | Colon, Cancer: (9808C064R) | pCMVSport 3.0 | LP023 |
| HPDO HPDP HPDQ HPDR | Ovary, Cancer (9809C332): | pSport 1 | LP023 |
| HPD | Poorly differentiated | | |
| | adenocarinoma | | |
| HPCO HPCP HPCQ HPCT | Ovary, Cancer (15395A1F): | pSport 1 | LP023 |
| | Grade II papillary Carcinoma | | |
| HOCM HOCO HOCP HOCQ | Ovary, Cancer: (15799A1F) | pSport 1 | LP023 |
| | Poorly differentiated carcinoma | | |
| HCBM HCBN HCBO | Breast, Cancer: (4004943 A5) | pSport 1 | LP023 |
| HNBT HNBU HNBV | Breast, Normal: (4005522B2) | pSport 1 | LP023 |
| HBCP HBCQ | Breast, Cancer: (4005522 A2) | pSport 1 | LP023 |
| HBCJ | Breast, Cancer: (9806C012R) | pSport 1 | LP023 |
| HSAM HSAN | Stromal cells 3.88 | pSport 1 | LP023 |
| HVCA HVCB HVCC HVCD | Ovary, Cancer: (4004332 A2) | pSport 1 | LP023 |
| HSCK HSEN HSEO | Stromal cells (HBM3.18) | pSport 1 | LP023 |
| HSCP HSCQ | stromal cell clone 2.5 | pSport 1 | LP023 |
| HUXA | Breast Cancer: (4005385 A2) | pSport 1 | LP023 |
| HCOM HCON HCOO HCOP | Ovary, Cancer (4004650 A3): | pSport 1 | LP023 |
| HCOQ | Well-Differentiated | | |
| | Micropapillary Serous | | |
| | Carcinoma | | |
| HBNM | Breast, Cancer: (9802C020E) | pSport 1 | LP023 |
| HVVA HVVB HVVC HVVD | Human Bone Marrow, treated | pSport 1 | LP023 |
| HVVE | | | |

[0859] Two nonlimiting examples are provided below for isolating a particular clone from the deposited sample of plasmid cDNAs cited for that clone in Table 7. First, a plasmid is directly isolated by screening the clones using a polynucleotide probe corresponding to the nucleotide sequence of SEQ ID NO:X.

[0860] Particularly, a specific polynucleotide with 30-40 nucleotides is synthesized using an Applied Biosystems DNA synthesizer according to the sequence reported. The oligonucleotide is labeled, for instance, with ³²P-γ-ATP using T4 polynucleotide kinase and purified according to routine methods. (E.g., Maniatis et al., Molecular Cloning: A Laboratory Manual, Cold Spring Harbor Press, Cold Spring, N.Y. (1982)). The plasmid mixture is transformed into a suitable host, as indicated above (such as XL-1 Blue (Stratagene)) using techniques known to those of skill in the art, such as those provided by the vector supplier or in related publications or patents cited above. The transformants are plated on 1.5% agar plates (containing the appropriate selection agent, e.g., ampicillin) to a density of about 150 transformants (colonies) per plate. These plates are screened using Nylon membranes according to routine methods for bacterial colony screening (e.g., Sambrook et al., Molecular Cloning: A Laboratory Manual, 2nd Edit., (1989), Cold Spring Harbor Laboratory Press, pages 1.93 to 1.104), or other techniques known to those of skill in the art.

[0861] Alternatively, two primers of 17-20 nucleotides derived from both ends of the nucleotide sequence of SEQ ID NO:X are synthesized and used to amplify the desired cDNA using the deposited cDNA plasmid as a template. The polymerase chain reaction is carried out under routine conditions, for instance, in 25 μl of reaction mixture with 0.5 ug of the above cDNA template. A convenient reaction mixture is 1.5-5 mM MgCl₂, 0.01% (w/v) gelatin, 20 μM each of dATP, dCTP, dGTP, dTTP, 25 pmol of each primer and 0.25 Unit of Taq polymerase. Thirty five cycles of PCR (denaturation at 94° C. for 1 min; annealing at 55° C. for 1 min; elongation at 72° C. for 1 min) are performed with a Perkin-Elmer Cetus automated thermal cycler. The amplified product is analyzed by agarose gel electrophoresis and the DNA band with expected molecular weight is excised and purified. The PCR product is verified to be the selected sequence by subcloning and sequencing the DNA product.

[0862] Several methods are available for the identification of the 5′ or 3′ non-coding portions of a gene which may not be present in the deposited clone. These methods include but are not limited to, filter probing, clone enrichment using specific probes, and protocols similar or identical to 5′ and 3′ “RACE” protocols which are well known in the art. For instance, a method similar to 5′ RACE is available for generating the missing 5′ end of a desired full-length transcript. (Fromont-Racine et al., Nucleic Acids Res. 21(7):1683-1684 (1993)).

[0863] Briefly, a specific RNA oligonucleotide is ligated to the 5′ ends of a population of RNA presumably containing full-length gene RNA transcripts. A primer set containing a primer specific to the ligated RNA oligonucleotide and a primer specific to a known sequence of the gene of interest is used to PCR amplify the 5′ portion of the desired full-length gene. This amplified product may then be sequenced and used to generate the full length gene.

[0864] This above method starts with total RNA isolated from the desired source, although poly-A+ RNA can be used. The RNA preparation can then be treated with phosphatase if necessary to eliminate 5′ phosphate groups on degraded or damaged RNA which may interfere with the later RNA ligase step. The phosphatase should then be inactivated and the RNA treated with tobacco acid pyrophosphatase in order to remove the cap structure present at the 5′ ends of messenger RNAs. This reaction leaves a 5′ phosphate group at the 5′ end of the cap cleaved RNA which can then be ligated to an RNA oligonucleotide using T4 RNA ligase.

[0865] This modified RNA preparation is used as a template for first strand cDNA synthesis using a gene specific oligonucleotide. The first strand synthesis reaction is used as a template for PCR amplification of the desired 5′ end using a primer specific to the ligated RNA oligonucleotide and a primer specific to the known sequence of the gene of interest. The resultant product is then sequenced and analyzed to confirm that the 5′ end sequence belongs to the desired gene.

### Example 2

### Isolation of Genomic Clones Corresponding to a Polynucleotide

[0866] A human genomic P1 library (Genomic Systems, Inc.) is screened by PCR using primers selected for the sequence corresponding to SEQ ID NO:X according to the method described in Example 1. (See also, Sambrook.)

### Example 3

### Tissue Specific Expression Analysis

[0867] The Human Genome Sciences, Inc. (HGS) database is derived from sequencing tissue and/or disease specific cDNA libraries. Libraries generated from a particular tissue are selected and the specific tissue expression pattern of EST groups or assembled contigs within these libraries is determined by comparison of the expression patterns of those groups or contigs within the entire database. ESTs and assembled contigs which show tissue specific expression are selected.

[0868] The original clone from which the specific EST sequence was generated, or in the case of an assembled contig, the clone from which the 5′ most EST sequence was generated, is obtained from the catalogued library of clones and the insert amplified by PCR using methods known in the art. The PCR product is denatured and then transferred in 96 or 384 well format to a nylon membrane (Schleicher and Scheull) generating an array filter of tissue specific clones. Housekeeping genes, maize genes, and known tissue specific genes are included on the filters. These targets can be used in signal normalization and to validate assay sensitivity. Additional targets are included to monitor probe length and specificity of hybridization.

[0869] Radioactively labeled hybridization probes are generated by first strand cDNA synthesis per the manufacturer's instructions (Life Technologies) from mRNA/RNA samples prepared from the specific tissue being analyzed (e.g., prostate, prostate cancer, ovarian, ovarian cancer, etc.). The hybridization probes are purified by gel exclusion chromatography, quantitated, and hybridized with the array filters in hybridization bottles at 65° C. overnight. The filters are washed under stringent conditions and signals are captured using a Fuji phosphorimager.

[0870] Data is extracted using AIS software and following background subtraction, signal normalization is performed. This includes a normalization of filter-wide expression levels between different experimental runs. Genes that are differentially expressed in the tissue of interest are identified.

### Example 4

### Chromosomal Mapping of the Polynucleotides

[0871] An oligonucleotide primer set is designed according to the sequence at the 5′ end of SEQ ID NO:X. This primer preferably spans about 100 nucleotides. This primer set is then used in a polymerase chain reaction under the following set of conditions: 30 seconds, 95° C.; 1 minute, 56° C.; 1 minute, 70° C. This cycle is repeated 32 times followed by one 5 minute cycle at 70° C. Human, mouse, and hamster DNA is used as template in addition to a somatic cell hybrid panel containing individual chromosomes or chromosome fragments (Bios, Inc). The reactions are analyzed on either 8% polyacrylamide gels or 3.5% agarose gels. Chromosome mapping is determined by the presence of an approximately 100 bp PCR fragment in the particular somatic cell hybrid.

### Example 5

### Bacterial Expression of a Polypeptide

[0872] A polynucleotide encoding a polypeptide of the present invention is amplified using PCR oligonucleotide primers corresponding to the 5′ and 3′ ends of the DNA sequence, as outlined in Example 1, to synthesize insertion fragments. The primers used to amplify the cDNA insert should preferably contain restriction sites, such as BamHI and XbaI, at the 5′ end of the primers in order to clone the amplified product into the expression vector. For example, BamHI and XbaI correspond to the restriction enzyme sites on the bacterial expression vector pQE-9. (Qiagen, Inc., Chatsworth, Calif.). This plasmid vector encodes antibiotic resistance (Amp^{r}), a bacterial origin of replication (ori), an IPTG-regulatable promoter/operator (P/O), a ribosome binding site (RBS), a 6-histidine tag (6-His), and restriction enzyme cloning sites.

[0873] The pQE-9 vector is digested with BamHI and XbaI and the amplified fragment is ligated into the pQE-9 vector maintaining the reading frame initiated at the bacterial RBS. The ligation mixture is then used to transform the E. coli strain M15/rep4 (Qiagen, Inc.) which contains multiple copies of the plasmid pREP4, which expresses the lacI repressor and also confers kanamycin resistance (Kan^{r}). Transformants are identified by their ability to grow on LB plates and ampicillin/kanamycin resistant colonies are selected. Plasmid DNA is isolated and confirmed by restriction analysis.

[0874] Clones containing the desired constructs are grown overnight (O/N) in liquid culture in LB media supplemented with both Amp (100 ug/ml) and Kan (25 ug/ml). The O/N culture is used to inoculate a large culture at a ratio of 1:100 to 1:250. The cells are grown to an optical density 600 (O.D.⁶⁰⁰) of between 0.4 and 0.6. IPTG (Isopropyl-B-D-thiogalacto pyranoside) is then added to a final concentration of 1 mM. IPTG induces by inactivating the lacI repressor, clearing the P/O leading to increased gene expression.

[0875] Cells are grown for an extra 3 to 4 hours. Cells are then harvested by centrifugation (20 mins at 6000×g). The cell pellet is solubilized in the chaotropic agent 6 Molar Guanidine HCl by stirring for 3-4 hours at 4° C. The cell debris is removed by centrifugation, and the supernatant containing the polypeptide is loaded onto a nickel-nitrilo-tri-acetic acid (“Ni-NTA”) affinity resin column (available from QIAGEN, Inc., supra). Proteins with a 6×His tag bind to the Ni-NTA resin with high affinity and can be purified in a simple one-step procedure (for details see: The QIAexpressionist (1995) QIAGEN, Inc., supra).

[0876] Briefly, the supernatant is loaded onto the column in 6 M guanidine-HCl, pH 8. The column is first washed with 10 volumes of 6 M guanidine-HCl, pH 8, then washed with 10 volumes of 6 M guanidine-HCl pH 6, and finally the polypeptide is eluted with 6 M guanidine-HCl, pH 5.

[0877] The purified protein is then renatured by dialyzing it against phosphate-buffered saline (PBS) or 50 mM Na-acetate, pH 6 buffer plus 200 mM NaCl. Alternatively, the protein can be successfully refolded while immobilized on the Ni-NTA column. The recommended conditions are as follows: renature using a linear 6M-1M urea gradient in 500 mM NaCl, 20% glycerol, 20 mM Tris/HCl pH 7.4, containing protease inhibitors. The renaturation should be performed over a period of 1.5 hours or more. After renaturation the proteins are eluted by the addition of 250 mM immidazole. Immidazole is removed by a final dialyzing step against PBS or 50 mM sodium acetate pH 6 buffer plus 200 mM NaCl. The purified protein is stored at 4° C. or frozen at −80° C.

[0878] In addition to the above expression vector, the present invention further includes an expression vector, called pHE4a (ATCC Accession Number 209645, deposited on Feb. 25, 1998) which contains phage operator and promoter elements operatively linked to a polynucleotide of the present invention, called pHE4a. (ATCC Accession Number 209645, deposited on Feb. 25, 1998.) This vector contains: 1) a neomycinphosphotransferase gene as a selection marker, 2) an E. coli origin of replication, 3) a T5 phage promoter sequence, 4) two lac operator sequences, 5) a Shine-Delgarno sequence, and 6) the lactose operon repressor gene (lacIq). The origin of replication (oriC) is derived from pUC19 (LTI, Gaithersburg, Md.). The promoter and operator sequences are made synthetically.

[0879] DNA can be inserted into the pHE4a by restricting the vector with NdeI and XbaI, BamHI, XhoI, or Asp718, running the restricted product on a gel, and isolating the larger fragment (the stuffer fragment should be about 310 base pairs). The DNA insert is generated according to the PCR protocol described in Example 1, using PCR primers having restriction sites for NdeI (5′ primer) and XbaI, BamHI, XhoI, or Asp718 (3′ primer). The PCR insert is gel purified and restricted with compatible enzymes. The insert and vector are ligated according to standard protocols.

[0880] The engineered vector could easily be substituted in the above protocol to express protein in a bacterial system.

### Example 6

### Purification of a Polypeptide from an Inclusion Body

[0881] The following alternative method can be used to purify a polypeptide expressed in E. coli when it is present in the form of inclusion bodies. Unless otherwise specified, all of the following steps are conducted at 4-10° C.

[0882] Upon completion of the production phase of the E. coli fermentation, the cell culture is cooled to 4-10° C. and the cells harvested by continuous centrifugation at 15,000 rpm (Heraeus Sepatech). On the basis of the expected yield of protein per unit weight of cell paste and the amount of purified protein required, an appropriate amount of cell paste, by weight, is suspended in a buffer solution containing 100 mM Tris, 50 mM EDTA, pH 7.4. The cells are dispersed to a homogeneous suspension using a high shear mixer.

[0883] The cells are then lysed by passing the solution through a microfluidizer (Microfuidics, Corp. or APV Gaulin, Inc.) twice at 4000-6000 psi. The homogenate is then mixed with NaCl solution to a final concentration of 0.5 M NaCl, followed by centrifugation at 7000×g for 15 min. The resultant pellet is washed again using 0.5M NaCl, 100 mM Tris, 50 mM EDTA, pH 7.4.

[0884] The resulting washed inclusion bodies are solubilized with 1.5 M guanidine hydrochloride (GuHCl) for 2-4 hours. After 7000×g centrifugation for 15 min., the pellet is discarded and the polypeptide containing supernatant is incubated at 4° C. overnight to allow further GuHCl extraction.

[0885] Following high speed centrifugation (30,000×g) to remove insoluble particles, the GuHCl solubilized protein is refolded by quickly mixing the GuHCl extract with 20 volumes of buffer containing 50 mM sodium, pH 4.5, 150 mM NaCl, 2 mM EDTA by vigorous stirring. The refolded diluted protein solution is kept at 4° C. without mixing for 12 hours prior to further purification steps.

[0886] To clarify the refolded polypeptide solution, a previously prepared tangential filtration unit equipped with 0.16 μm membrane filter with appropriate surface area (e.g., Filtron), equilibrated with 40 mM sodium acetate, pH 6.0 is employed. The filtered sample is loaded onto a cation exchange resin (e.g., Poros HS-50, Perseptive Biosystems). The column is washed with 40 mM sodium acetate, pH 6.0 and eluted with 250 mM, 500 mM, 1000 mM, and 1500 mM NaCl in the same buffer, in a stepwise manner. The absorbance at 280 nm of the effluent is continuously monitored. Fractions are collected and further analyzed by SDS-PAGE.

[0887] Fractions containing the polypeptide are then pooled and mixed with 4 volumes of water. The diluted sample is then loaded onto a previously prepared set of tandem columns of strong anion (Poros HQ-50, Perseptive Biosystems) and weak anion (Poros CM-20, Perseptive Biosystems) exchange resins. The columns are equilibrated with 40 mM sodium acetate, pH 6.0. Both columns are washed with 40 mM sodium acetate, pH 6.0, 200 mM NaCl. The CM-20 column is then eluted using a 10 column volume linear gradient ranging from 0.2 M NaCl, 50 mM sodium acetate, pH 6.0 to 1.0 M NaCl, 50 mM sodium acetate, pH 6.5. Fractions are collected under constant A₂₈₀ monitoring of the effluent. Fractions containing the polypeptide (determined, for instance, by 16% SDS-PAGE) are then pooled.

[0888] The resultant polypeptide should exhibit greater than 95% purity after the above refolding and purification steps. No major contaminant bands should be observed from Commassie blue stained 16% SDS-PAGE gel when 5 μg of purified protein is loaded. The purified protein can also be tested for endotoxin/LPS contamination, and typically the LPS content is less than 0.1 ng/ml according to LAL assays.

### Example 7

### Cloning and Expression of a Polypeptide in a Baculovirus Expression System

[0889] In this example, the plasmid shuttle vector pA2 is used to insert a polynucleotide into a baculovirus to express a polypeptide. This expression vector contains the strong polyhedrin promoter of the Autographa californica nuclear polyhedrosis virus (AcMNPV) followed by convenient restriction sites such as BamHI, Xba I and Asp718. The polyadenylation site of the simian virus 40 (“SV40”) is used for efficient polyadenylation. For easy selection of recombinant virus, the plasmid contains the beta-galactosidase gene from E. coli under control of a weak Drosophila promoter in the same orientation, followed by the polyadenylation signal of the polyhedrin gene. The inserted genes are flanked on both sides by viral sequences for cell-mediated homologous recombination with wild-type viral DNA to generate a viable virus that express the cloned polynucleotide.

[0890] Many other baculovirus vectors can be used in place of the vector above, such as pAc373, pVL941, and pAcIM1, as one skilled in the art would readily appreciate, as long as the construct provides appropriately located signals for transcription, translation, secretion and the like, including a signal peptide and an in-frame AUG as required. Such vectors are described, for instance, in Luckow et al., Virology 170:31-39 (1989).

[0891] Specifically, the cDNA sequence contained in the deposited clone, including the AUG initiation codon, is amplified using the PCR protocol described in Example 1. If a naturally occurring signal sequence is used to produce the polypeptide of the present invention, the pA2 vector does not need a second signal peptide. Alternatively, the vector can be modified (pA2 GP) to include a baculovirus leader sequence, using the standard methods described in Summers et al., “A Manual of Methods for Baculovirus Vectors and Insect Cell Culture Procedures,” Texas Agricultural Experimental Station Bulletin No. 1555 (1987).

[0892] The amplified fragment is isolated from a 1% agarose gel using a commercially available kit (“Geneclean,” BIO 101 Inc., La Jolla, Calif.). The fragment then is digested with appropriate restriction enzymes and again purified on a 1% agarose gel.

[0893] The plasmid is digested with the corresponding restriction enzymes and optionally, can be dephosphorylated using calf intestinal phosphatase, using routine procedures known in the art. The DNA is then isolated from a 1% agarose gel using a commercially available kit (“Geneclean” BIO 101 Inc., La Jolla, Calif.).

[0894] The fragment and the dephosphorylated plasmid are ligated together with T4 DNA ligase. E. coli HB101 or other suitable E. coli hosts such as XL-1 Blue (Stratagene Cloning Systems, La Jolla, Calif.) cells are transformed with the ligation mixture and spread on culture plates. Bacteria containing the plasmid are identified by digesting DNA from individual colonies and analyzing the digestion product by gel electrophoresis. The sequence of the cloned fragment is confirmed by DNA sequencing.

[0895] Five μg of a plasmid containing the polynucleotide is co-transfected with 1.0 μg of a commercially available linearized baculovirus DNA (“BaculoGold™ baculovirus DNA, Pharmingen, San Diego, Calif.), using the lipofection method described by Feigner et al., Proc. Natl. Acad. Sci. USA 84:7413-7417 (1987). One μg of BaculoGold™ virus DNA and 5 μg of the plasmid are mixed in a sterile well of a microtiter plate containing 50 μl of serum-free Grace's medium (Life Technologies Inc., Gaithersburg, Md.). Afterwards, 10 μl Lipofectin plus 90 μl Grace's medium are added, mixed and incubated for 15 minutes at room temperature. Then the transfection mixture is added drop-wise to Sf9 insect cells (ATCC CRL 1711) seeded in a 35 mm tissue culture plate with 1 ml Grace's medium without serum. The plate is then incubated for 5 hours at 27° C. The transfection solution is then removed from the plate and 1 ml of Grace's insect medium supplemented with 10% fetal calf serum is added. Cultivation is then continued at 27° C. for four days.

[0896] After four days the supernatant is collected and a plaque assay is performed, as described by Summers and Smith, supra. An agarose gel with “Blue Gal” (Life Technologies Inc., Gaithersburg) is used to allow easy identification and isolation of gal-expressing clones, which produce blue-stained plaques. (A detailed description of a “plaque assay” of this type can also be found in the user's guide for insect cell culture and baculovirology distributed by Life Technologies Inc., Gaithersburg, page 9-10.) After appropriate incubation, blue stained plaques are picked with the tip of a micropipettor (e.g., Eppendorf). The agar containing the recombinant viruses is then resuspended in a microcentrifuge tube containing 200 μl of Grace's medium and the suspension containing the recombinant baculovirus is used to infect Sf9 cells seeded in 35 mm dishes. Four days later the supernatants of these culture dishes are harvested and then they are stored at 4° C.

[0897] To verify the expression of the polypeptide, Sf9 cells are grown in Grace's medium supplemented with 10% heat-inactivated FBS. The cells are infected with the recombinant baculovirus containing the polynucleotide at a multiplicity of infection (“MOI”) of about 2. If radiolabeled proteins are desired, 6 hours later the medium is removed and is replaced with SF900 II medium minus methionine and cysteine (available from Life Technologies Inc., Rockville, Md.). After 42 hours, 5 μCi of ³⁵S-methionine and 5 μCi ³⁵S-cysteine (available from Amersham) are added. The cells are further incubated for 16 hours and then are harvested by centrifugation. The proteins in the supernatant as well as the intracellular proteins are analyzed by SDS-PAGE followed by autoradiography (if radiolabeled).

[0898] Microsequencing of the amino acid sequence of the amino terminus of purified protein may be used to determine the amino terminal sequence of the produced protein.

### Example 8

### Expression of a Polypeptide in Mammalian Cells

[0899] The polypeptide of the present invention can be expressed in a mammalian cell. A typical mammalian expression vector contains a promoter element, which mediates the initiation of transcription of mRNA, a protein coding sequence, and signals required for the termination of transcription and polyadenylation of the transcript. Additional elements include enhancers, Kozak sequences and intervening sequences flanked by donor and acceptor sites for RNA splicing. Highly efficient transcription is achieved with the early and late promoters from SV40, the long terminal repeats (LTRs) from Retroviruses, e.g., RSV, HTLVI, HIVI and the early promoter of the cytomegalovirus (CMV). However, cellular elements can also be used (e.g., the human actin promoter).

[0900] Suitable expression vectors for use in practicing the present invention include, for example, vectors such as pSVL and pMSG (Pharmacia, Uppsala, Sweden), pRSVcat (ATCC 37152), pSV2dhfr (ATCC 37146), pBC12MI (ATCC 67109), pCMVSport 2.0, and pCMVSport 3.0. Mammalian host cells that could be used include, human Hela, 293, H9 and Jurkat cells, mouse NIH3T3 and C127 cells, Cos 1, Cos 7 and CV1, quail QC1-3 cells, mouse L cells and Chinese hamster ovary (CHO) cells.

[0901] Alternatively, the polypeptide can be expressed in stable cell lines containing the polynucleotide integrated into a chromosome. The co-transfection with a selectable marker such as DHFR, gpt, neomycin, or hygromycin allows the identification and isolation of the transfected cells.

[0902] The transfected gene can also be amplified to express large amounts of the encoded protein. The DHFR (dihydrofolate reductase) marker is useful in developing cell lines that carry several hundred or even several thousand copies of the gene of interest. (See, e.g., Alt, F. W., et al., J. Biol. Chem. 253:1357-1370 (1978); Hamlin, J. L. and Ma, C., Biochem. et Biophys. Acta, 1097:107-143 (1990); Page, M. J. and Sydenham, M. A., Biotechnology 9:64-68 (1991)). Another useful selection marker is the enzyme glutamine synthase (GS) (Murphy et al., Biochem J. 227:277-279 (1991); Bebbington et al., Bio/Technology 10:169-175 (1992). Using these markers, the mammalian cells are grown in selective medium and the cells with the highest resistance are selected. These cell lines contain the amplified gene(s) integrated into a chromosome. Chinese hamster ovary (CHO) and NSO cells are often used for the production of proteins.

[0903] Derivatives of the plasmid pSV2-dhfr (ATCC Accession No. 37146), the expression vectors pC4 (ATCC Accession No. 209646) and pC6 (ATCC Accession No. 209647) contain the strong promoter (LTR) of the Rous Sarcoma Virus (Cullen et al., Molecular and Cellular Biology, 438-447 (March, 1985)) plus a fragment of the CMV-enhancer (Boshart et al., Cell 41:521-530 (1985)). Multiple cloning sites, e.g., with the restriction enzyme cleavage sites BamHI, XbaI and Asp718, facilitate the cloning of the gene of interest. The vectors also contain the 3′ intron, the polyadenylation and termination signal of the rat preproinsulin gene, and the mouse DHFR gene under control of the SV40 early promoter.

[0904] Specifically, the plasmid pC6, for example, is digested with appropriate restriction enzymes and then dephosphorylated using calf intestinal phosphates by procedures known in the art. The vector is then isolated from a 1% agarose gel.

[0905] A polynucleotide of the present invention is amplified according to the protocol outlined in Example 1. If a naturally occurring signal sequence is used to produce the polypeptide of the present invention, the vector does not need a second signal peptide. Alternatively, if a naturally occurring signal sequence is not used, the vector can be modified to include a heterologous signal sequence. (See, e.g., International Publication No. WO 96/34891.)

[0906] The amplified fragment is isolated from a 1% agarose gel using a commercially available kit (“Geneclean,” BIO 101 Inc., La Jolla, Calif.). The fragment then is digested with appropriate restriction enzymes and again purified on a 1% agarose gel.

[0907] The amplified fragment is then digested with the same restriction enzyme and purified on a 1% agarose gel. The isolated fragment and the dephosphorylated vector are then ligated with T4 DNA ligase. E. coli HB101 or XL-1 Blue cells are then transformed and bacteria are identified that contain the fragment inserted into plasmid pC6 using, for instance, restriction enzyme analysis.

[0908] Chinese hamster ovary cells lacking an active DHFR gene is used for transfection. Five μg of the expression plasmid pC6 or pC4 is cotransfected with 0.5 μg of the plasmid pSVneo using lipofectin (Feigner et al., supra). The plasmid pSV2-neo contains a dominant selectable marker, the neo gene from Tn5 encoding an enzyme that confers resistance to a group of antibiotics including G418. The cells are seeded in alpha minus MEM supplemented with 1 mg/ml G418. After 2 days, the cells are trypsinized and seeded in hybridoma cloning plates (Greiner, Germany) in alpha minus MEM supplemented with 10, 25, or 50 ng/ml of methotrexate plus 1 mg/ml G418. After about 10-14 days single clones are trypsinized and then seeded in 6-well petri dishes or 10 ml flasks using different concentrations of methotrexate (50 nM, 100 nM, 200 nM, 400 nM, 800 nM). Clones growing at the highest concentrations of methotrexate are then transferred to new 6-well plates containing even higher concentrations of methotrexate (1 μM, 2 μM, 5 μM, 10 mM, 20 mM). The same procedure is repeated until clones are obtained which grow at a concentration of 100-200 μM. Expression of the desired gene product is analyzed, for instance, by SDS-PAGE and Western blot or by reversed phase HPLC analysis.

### Example 9

### Protein Fusions

[0909] The polypeptides of the present invention are preferably fused to other proteins. These fusion proteins can be used for a variety of applications. For example, fusion of the present polypeptides to His-tag, HA-tag, protein A, IgG domains, and maltose binding protein facilitates purification. (See Example 5; see also EP A 394,827; Traunecker, et al., Nature 331:84-86 (1988)). Similarly, fusion to IgG-1, IgG-3, and albumin increases the halflife time in vivo. Nuclear localization signals fused to the polypeptides of the present invention can target the protein to a specific subcellular localization, while covalent heterodimer or homodimers can increase or decrease the activity of a fusion protein. Fusion proteins can also create chimeric molecules having more than one function. Finally, fusion proteins can increase solubility and/or stability of the fused protein compared to the non-fused protein. All of the types of fusion proteins described above can be made by modifying the following protocol, which outlines the fusion of a polypeptide to an IgG molecule, or the protocol described in Example 5.

[0910] Briefly, the human Fc portion of the IgG molecule can be PCR amplified, using primers that span the 5′ and 3′ ends of the sequence described below. These primers also should have convenient restriction enzyme sites that will facilitate cloning into an expression vector, preferably a mammalian expression vector.

[0911] For example, if pC4 (ATCC Accession No. 209646) is used, the human Fc portion can be ligated into the BamHI cloning site. Note that the 3′ BamHI site should be destroyed. Next, the vector containing the human Fc portion is re-restricted with BamHI, linearizing the vector, and a polynucleotide of the present invention, isolated by the PCR protocol described in Example 1, is ligated into this BamHI site. Note that the polynucleotide is cloned without a stop codon, otherwise a fusion protein will not be produced.

[0912] If the naturally occurring signal sequence is used to produce the polypeptide of the present invention, pC4 does not need a second signal peptide. Alternatively, if the naturally occurring signal sequence is not used, the vector can be modified to include a heterologous signal sequence. (See, e.g., International Publication No. WO 96/34891.)

Human IgG Fc region:

(SEQ ID NO: 1)

GGGATCCGGAGCCCAAATCTTCTGACAAAACTCACACATGCCCACCGTGC
CCAGCACCTGAATTCGAGGGTGCACCGTCAGTCTTCCTCTTCCCCCCAAA
ACCCAAGGACACCCTCATGATCTCCCGGACTCCTGAGGTCACATGCGTGG
TGGTGGACGTAAGCCACGAAGACCCTGAGGTCAAGTTCAACTGGTACGTG
GACGGCGTGGAGGTGCATAATGCCAAGACAAAGCCGCGGGAGGAGCAGTA
CAACAGCACGTACCGTGTGGTCAGCGTCCTCACCGTCCTGCACCAGGACT
GGCTGAATGGCAAGGAGTACAAGTGCAAGGTCTCCAACAAAGCCCTCCCA
ACCCCCATCGAGAAAACCATCTCCAAAGCCAAAGGGCAGCCCCGAGAACC
ACAGGTGTACACCCTGCCCCCATCCCGGGATGAGCTGACCAAGAACCAGG
TCAGCCTGACCTGCCTGGTCAAAGGCTTCTATCCAAGCGACATCGCCGTG
GAGTGGGAGAGCAATGGGCAGCCGGAGAACAACTACAAGACCACGCCTCC
CGTGCTGGACTCCGACGGCTCCTTCTTCCTCTACAGCAAGCTCACCGTGG
ACAAGAGCAGGTGGCAGCAGGGGAACGTCTTCTCATGCTCCGTGATGCAT
GAGGCTCTGCACAACCACTACACGCAGAAGAGCCTCTCCCTGTCTCCGGG
TAAATGAGTGCGACGGCCGCGACTCTAGAGGAT

### Example 10

### Production of an Antibody from a Polypeptide

[0913] a) Hybridoma Technology

[0914] The antibodies of the present invention can be prepared by a variety of methods. (See, Current Protocols, Chapter 2.) As one example of such methods, cells expressing a polypeptide of the present invention are administered to an animal to induce the production of sera containing polyclonal antibodies. In a preferred method, a preparation of a polypeptide of the present invention is prepared and purified to render it substantially free of natural contaminants. Such a preparation is then introduced into an animal in order to produce polyclonal antisera of greater specific activity.

[0915] Monoclonal antibodies specific for a polypeptide of the present invention are prepared using hybridoma technology (Kohler et al., Nature 256:495 (1975); Kohler et al., Eur. J. Immunol. 6:511 (1976); Kohler et al., Eur. J. Immunol. 6:292 (1976); Hammerling et al., in: Monoclonal Antibodies and T-Cell Hybridomas, Elsevier, N.Y., pp. 563-681 (1981)). In general, an animal (preferably a mouse) is immunized with a polypeptide of the present invention or, more preferably, with a secreted polypeptide-expressing cell. Such polypeptide-expressing cells are cultured in any suitable tissue culture medium, preferably in Earle's modified Eagle's medium supplemented with 10% fetal bovine serum (inactivated at about 56° C.), and supplemented with about 10 g/l of nonessential amino acids, about 1,000 U/ml of penicillin, and about 100 μg/ml of streptomycin.

[0916] The splenocytes of such mice are extracted and fused with a suitable myeloma cell line. Any suitable myeloma cell line may be employed in accordance with the present invention; however, it is preferable to employ the parent myeloma cell line (SP2O), available from the ATCC. After fusion, the resulting hybridoma cells are selectively maintained in HAT medium, and then cloned by limiting dilution as described by Wands et al. (Gastroenterology 80:225-232 (1981)). The hybridoma cells obtained through such a selection are then assayed to identify clones which secrete antibodies capable of binding the polypeptide of the present invention.

[0917] Alternatively, additional antibodies capable of binding to a polypeptide of the present invention can be produced in a two-step procedure using anti-idiotypic antibodies. Such a method makes use of the fact that antibodies are themselves antigens, and therefore, it is possible to obtain an antibody which binds to a second antibody. In accordance with this method, protein specific antibodies are used to immunize an animal, preferably a mouse. The splenocytes of such an animal are then used to produce hybridoma cells, and the hybridoma cells are screened to identify clones which produce an antibody whose ability to bind to the polypeptide-specific antibody can be blocked by said polypeptide. Such antibodies comprise anti-idiotypic antibodies to the polypeptide-specific antibody and are used to immunize an animal to induce formation of further polypeptide-specific antibodies.

[0918] For in vivo use of antibodies in humans, an antibody is “humanized”. Such antibodies can be produced using genetic constructs derived from hybridoma cells producing the monoclonal antibodies described above. Methods for producing chimeric and humanized antibodies are known in the art and are discussed herein. (See, for review, Morrison, Science 229:1202 (1985); Oi et al., BioTechniques 4:214 (1986); Cabilly et al., U.S. Pat. No. 4,816,567; Taniguchi et al., EP 171496; Morrison et al., EP 173494; Neuberger et al., WO 8601533; Robinson et al., International Publication No. WO 8702671; Boulianne et al., Nature 312:643 (1984); Neuberger et al., Nature 314:268 (1985)).

[0919] b) Isolation of Antibody Fragments Directed Against a Polypeptide of the Present Invention from a Library of scFvs

[0920] Naturally occurring V-genes isolated, from human PBLs are constructed into a library of antibody fragments which contain reactivities against a polypeptide of the present invention to which the donor may or may not have been exposed (see e.g., U.S. Pat. No. 5,885,793 incorporated herein by reference in its entirety).

[0921] Rescue of the Library. A library of scFvs is constructed from the RNA of human PBLs as described in International Publication No. WO 92/01047. To rescue phage displaying antibody fragments, approximately 10⁹ E. coli harboring the phagemid are used to inoculate 50 ml of 2×TY containing 1% glucose and 100 μg/ml of ampicillin (2×TY-AMP-GLU) and grown to an O.D. of 0.8 with shaking. Five ml of this culture is used to inoculate 50 ml of 2×TY-AMP-GLU, 2×108 TU of delta gene 3 helper (M13 delta gene III, see International Publication No. WO 92/01047) are added and the culture incubated at 37° C. for 45 minutes without shaking and then at 37° C. for 45 minutes with shaking. The culture is centrifuged at 4000 r.p.m. for 10 min. and the pellet resuspended in 2 liters of 2×TY containing 100 μg/ml ampicillin and 50 ug/ml kanamycin and grown overnight. Phage are prepared as described in International Publication No. WO 92/01047.

[0922] M13 delta gene III is prepared as follows: M13 delta gene III helper phage does not encode gene III protein, hence the phage(mid) displaying antibody fragments have a greater avidity of binding to antigen. Infectious M13 delta gene III particles are made by growing the helper phage in cells harboring a pUC19 derivative supplying the wild type gene III protein during phage morphogenesis. The culture is incubated for 1 hour at 37° C. without shaking and then for a further hour at 37° C. with shaking. Cells are spun down (EC-Centra 8,400 r.p.m. for 10 min), resuspended in 300 ml 2×TY broth containing 100 μg ampicillin/ml and 25 μg kanamycin/ml (2×TY-AMP-KAN) and grown overnight, shaking at 37° C. Phage particles are purified and concentrated from the culture medium by two PEG-precipitations (Sambrook et al., 1990), resuspended in 2 ml PBS and passed through a 0.45 pm filter (Minisart NML; Sartorius) to give a final concentration of approximately 10¹³ transducing units/ml (ampicillin-resistant clones).

[0923] Panning of the Library. Immunotubes (Nunc) are coated overnight in PBS with 4 ml of either 100 μg/ml or 10 μg/ml of a polypeptide of the present invention. Tubes are blocked with 2% Marvel-PBS for 2 hours at 37° C. and then washed 3 times in PBS. Approximately 10¹³ TU of phage is applied to the tube and incubated for 30 minutes at room temperature tumbling on an over and under turntable and then left to stand for another 1.5 hours. Tubes are washed 10 times with PBS 0.1% Tween-20 and 10 times with PBS. Phage are eluted by adding 1 ml of 100 mM triethylamine and rotating 15 minutes on an under and over turntable after which the solution is immediately neutralized with 0.5 ml of 1.0M Tris-HCl, pH 7.4. Phage are then used to infect 10 ml of mid-log E. coli TG1 by incubating eluted phage with bacteria for 30 minutes at 37° C. The E. coli are then plated on TYE plates containing 1% glucose and 100 μg/ml ampicillin. The resulting bacterial library is then rescued with delta gene 3 helper phage as described above to prepare phage for a subsequent round of selection. This process is then repeated for a total of 4 rounds of affinity purification with tube-washing increased to 20 times with PBS, 0.1% Tween-20 and 20 times with PBS for rounds 3 and 4.

[0924] Characterization of Binders. Eluted phage from the 3rd and 4th rounds of selection are used to infect E. coli HB 2151 and soluble scFv is produced (Marks, et al., 1991) from single colonies for assay. ELISAs are performed with microtitre plates coated with either 10 pg/ml of the polypeptide of the present invention in 50 mM bicarbonate pH 9.6. Clones positive in ELISA are further characterized by PCR fingerprinting (see, e.g., International Publication No. WO 92/01047) and then by sequencing. These ELISA positive clones may also be further characterized by techniques known in the art, such as, for example, epitope mapping, binding affinity, receptor signal transduction, ability to block or competitively inhibit antibody/antigen binding, and competitive agonistic or antagonistic activity.

### Example 11

### Method of Determining Alterations in a Gene Corresponding to a Polynucleotide

[0925] RNA isolated from entire families or individual patients presenting with cancer or a hyperproliferative disease or disorder is isolated. cDNA is then generated from these RNA samples using protocols known in the art. (See, Sambrook.) The cDNA is then used as a template for PCR, employing primers surrounding regions of interest in SEQ ID NO:X; and/or the nucleotide sequence of the cDNA contained in ATCC Deposit No:Z. Suggested PCR conditions consist of 35 cycles at 95 degrees C. for 30 seconds; 60-120 seconds at 52-58 degrees C.; and 60-120 seconds at 70 degrees C., using buffer solutions described in Sidransky et al., Science 252:706 (1991).

[0926] PCR products are then sequenced using primers labeled at their 5′ end with T4 polynucleotide kinase, employing SequiTherm Polymerase (Epicentre Technologies). The intron-exon boundaries of selected exons is also determined and genomic PCR products analyzed to confirm the results. PCR products harboring suspected mutations are then cloned and sequenced to validate the results of the direct sequencing.

[0927] PCR products are cloned into T-tailed vectors as described in Holton et al., Nucleic Acids Research, 19:1156 (1991) and sequenced with T7 polymerase (United States Biochemical). Affected individuals are identified by mutations not present in unaffected individuals.

[0928] Genomic rearrangements are also observed as a method of determining alterations in a gene corresponding to a polynucleotide. Genomic clones isolated according to Example 2 are nick-translated with digoxigenindeoxy-uridine 5′-triphosphate (Boehringer Manheim), and FISH performed as described in Johnson et al., Methods Cell Biol. 35:73-99 (1991). Hybridization with the labeled probe is carried out using a vast excess of human cot-1 DNA for specific hybridization to the corresponding genomic locus.

[0929] Chromosomes are counterstained with 4,6-diamino-2-phenylidole and propidium iodide, producing a combination of C- and R-bands. Aligned images for precise mapping are obtained using a triple-band filter set (Chroma Technology, Brattleboro, Vt.) in combination with a cooled charge-coupled device camera (Photometrics, Tucson, Ariz.) and variable excitation wavelength filters. (Johnson et al., Genet. Anal. Tech. Appl., 8:75 (1991)). Image collection, analysis and chromosomal fractional length measurements are performed using the ISee Graphical Program System. (Inovision Corporation, Durham, N.C.) Chromosome alterations of the genomic region hybridized by the probe are identified as insertions, deletions, and translocations. These alterations are used as a diagnostic marker for an associated disease.

### Example 12

### Method of Detecting Abnormal Levels of a Polypeptide in a Biological Sample

[0930] A polypeptide of the present invention can be detected in a biological sample, and if an increased or decreased level of the polypeptide is detected, this polypeptide is a marker for a particular phenotype. Methods of detection are numerous, and thus, it is understood that one skilled in the art can modify the following assay to fit their particular needs.

[0931] For example, antibody-sandwich ELISAs are used to detect polypeptides in a sample, preferably a biological sample. Wells of a microtiter plate are coated with specific antibodies, at a final concentration of 0.2 to 10 ug/ml. The antibodies are either monoclonal or polyclonal and are produced by the method described in Example 10. The wells are blocked so that non-specific binding of the polypeptide to the well is reduced.

[0932] The coated wells are then incubated for >2 hours at RT with a sample containing the polypeptide. Preferably, serial dilutions of the sample should be used to validate results. The plates are then washed three times with deionized or distilled water to remove unbound polypeptide.

[0933] Next, 50 ul of specific antibody-alkaline phosphatase conjugate, at a concentration of 25-400 ng, is added and incubated for 2 hours at room temperature. The plates are again washed three times with deionized or distilled water to remove unbound conjugate.

[0934] Add 75 ul of 4-methylumbelliferyl phosphate (MUP) or p-nitrophenyl phosphate (NPP) substrate solution to each well and incubate 1 hour at room temperature. Measure the reaction by a microtiter plate reader. Prepare a standard curve, using serial dilutions of a control sample, and plot polypeptide concentration on the X-axis (log scale) and fluorescence or absorbance of the Y-axis (linear scale). Interpolate the concentration of the polypeptide in the sample using the standard curve.

### Example 13

### Formulation

[0935] The invention also provides methods of preventing, treating and/or ameliorating cancer or other hyperproliferative disorders by administration to a subject of an effective amount of a Therapeutic. By therapeutic is meant polynucleotides or polypeptides of the invention (including fragments and variants), agonists or antagonists thereof, and/or antibodies thereto, in combination with a pharmaceutically acceptable carrier type (e.g., a sterile carrier).

[0936] The Therapeutic will be formulated and dosed in a fashion consistent with good medical practice, taking into account the clinical condition of the individual patient (especially the side effects of treatment with the Therapeutic alone), the site of delivery, the method of administration, the scheduling of administration, and other factors known to practitioners. The “effective amount” for purposes herein is thus determined by such considerations.

[0937] As a general proposition, the total pharmaceutically effective amount of the Therapeutic administered parenterally per dose will be in the range of about 1 ug/kg/day to 10 mg/kg/day of patient body weight, although, as noted above, this will be subject to therapeutic discretion. More preferably, this dose is at least 0.01 mg/kg/day, and most preferably for humans between about 0.01 and 1 mg/kg/day for the hormone. If given continuously, the Therapeutic is typically administered at a dose rate of about 1 ug/kg/hour to about 50 ug/kg/hour, either by 1-4 injections per day or by continuous subcutaneous infusions, for example, using a mini-pump. An intravenous bag solution may also be employed. The length of treatment needed to observe changes and the interval following treatment for responses to occur appears to vary depending on the desired effect.

[0938] Therapeutics can be are administered orally, rectally, parenterally, intracistemally, intravaginally, intraperitoneally, topically (as by powders, ointments, gels, drops or transdermal patch), bucally, or as an oral or nasal spray. “Pharmaceutically acceptable carrier” refers to a non-toxic solid, semisolid or liquid filler, diluent, encapsulating material or formulation auxiliary of any. The term “parenteral” as used herein refers to modes of administration which include intravenous, intramuscular, intraperitoneal, intrasternal, subcutaneous and intraarticular injection and infusion.

[0939] Therapeutics of the invention are also suitably administered by sustained-release systems. Suitable examples of sustained-release Therapeutics are administered orally, rectally, parenterally, intracistemally, intravaginally, intraperitoneally, topically (as by powders, ointments, gels, drops or transdermal patch), bucally, or as an oral or nasal spray. “Pharmaceutically acceptable carrier” refers to a non-toxic solid, semisolid or liquid filler, diluent, encapsulating material or formulation auxiliary of any type. The term “parenteral” as used herein refers to modes of administration which include intravenous, intramuscular, intraperitoneal, intrasternal, subcutaneous and intraarticular injection and infusion.

[0940] Therapeutics of the invention are also suitably administered by sustained-release systems. Suitable examples of sustained-release Therapeutics include suitable polymeric materials (such as, for example, semi-permeable polymer matrices in the form of shaped articles, e.g., films, or mirocapsules), suitable hydrophobic materials (for example as an emulsion in an acceptable oil) or ion exchange resins, and sparingly soluble derivatives (such as, for example, a sparingly soluble salt).

[0941] Sustained-release matrices include polylactides (U.S. Pat. No. 3,773,919, EP 58,481), copolymers of L-glutamic acid and gamma-ethyl-L-glutamate (Sidman et al., Biopolymers 22:547-556 (1983)), poly (2-hydroxyethyl methacrylate) (Langer et al., J. Biomed. Mater. Res. 15:167-277 (1981), and Langer, Chem. Tech. 12:98-105 (1982)), ethylene vinyl acetate (Langer et al., Id.) or poly-D-(−)-3-hydroxybutyric acid (EP 133,988).

[0942] In a preferred embodiment, polypeptide, polynucleotide, and antibody compositions of the invention are formulated in a biodegradable, polymeric drug delivery system, for example as described in U.S. Pat. Nos. 4,938,763; 5,278,201; 5,278,202; 5,324,519; 5,340,849; and 5,487,897 and in International Publication Numbers WO01/35929, WO00/24374, and WO00/06117 which are hereby incorporated by reference in their entirety. In specific preferred embodiments the polypeptide, polynucleotide, and antibody compositions of the invention are formulated using the ATRIGEL® Biodegradable System of Atrix Laboratories, Inc. (Fort Collins, Colo.).

[0943] Examples of biodegradable polymers which can be used in the formulation of polypeptide, polynucleotide, and antibody compositions, include but are not limited to, polylactides, polyglycolides, polycaprolactones, polyanhydrides, polyamides, polyurethanes, polyesteramides, polyorthoesters, polydioxanones, polyacetals, polyketals, polycarbonates, polyorthocarbonates, polyphosphazenes, polyhydroxybutyrates, polyhydroxyvalerates, polyalkylene oxalates, polyalkylene succinates, poly(malic acid), poly(amino acids), poly(methyl vinyl ether), poly(maleic anhydride), polyvinylpyrrolidone, polyethylene glycol, polyhydroxycellulose, chitin, chitosan, and copolymers, terpolymers, or combinations or mixtures of the above materials. The preferred polymers are those that have a lower degree of crystallization and are more hydrophobic. These polymers and copolymers are more soluble in the biocompatible solvents than the highly crystalline polymers such as polyglycolide and chitin which also have a high degree of hydrogen-bonding. Preferred materials with the desired solubility parameters are the polylactides, polycaprolactones, and copolymers of these with glycolide in which there are more amorphous regions to enhance solubility. In specific preferred embodiments, the biodegradable polymers which can be used in the formulation of polypeptide, polynucleotide, and antibody compositions are poly(lactide-co-glycolides). Polymer properties such as molecular weight, hydrophobicity, and lactide/glycolide ratio may be modified to obtain the desired polypeptide, polynucleotide, or antibody release profile (See, e.g., Ravivarapu et al., Journal of Pharmaceutical Sciences 89:732-741 (2000), which is hereby incorporated by reference in its entirety).

[0944] It is also preferred that the solvent for the biodegradable polymer be non-toxic, water miscible, and otherwise biocompatible. Examples of such solvents include, but are not limited to, N-methyl-2-pyrrolidone, 2-pyrrolidone, C2 to C6 alkanols, C1 to C15 alchohols, dils, triols, and tetraols such as ethanol, glycerine propylene glycol, butanol; C3 to C15 alkyl ketones such as acetone, diethyl ketone and methyl ethyl ketone; C3 to C15 esters such as methyl acetate, ethyl acetate, ethyl lactate; alkyl ketones such as methyl ethyl ketone, C1 to C15 amides such as dimethylformamide, dimethylacetamide and caprolactam; C3 to C20 ethers such as tetrahydrofuran, or solketal; tweens, triacetin, propylene carbonate, decylmethylsulfoxide, dimethyl sulfoxide, oleic acid, 1-dodecylazacycloheptan-2-one, Other preferred solvents are benzyl alchohol, benzyl benzoate, dipropylene glycol, tributyrin, ethyl oleate, glycerin, glycofural, isopropyl myristate, isopropyl palmitate, oleic acid, polyethylene glycol, propylene carbonate, and triethyl citrate. The most preferred solvents are N-methyl-2-pyrrolidone, 2-pyrrolidone, dimethyl sulfoxide, triacetin, and propylene carbonate because of the solvating ability and their compatibility.

[0945] Additionally, formulations comprising polypeptide, polynucleotide, and antibody compositions and a biodegradable polymer may also include release-rate modification agents and/or pore-forming agents. Examples of release-rate modification agents include, but are not limited to, fatty acids, triglycerides, other like hydrophobic compounds, organic solvents, plasticizing compounds and hydrophilic compounds. Suitable release rate modification agents include, for example, esters of mono-, di-, and tricarboxylic acids, such as 2-ethoxyethyl acetate, methyl acetate, ethyl acetate, diethyl phthalate, dimethyl phthalate, dibutyl phthalate, dimethyl adipate, dimethyl succinate, dimethyl oxalate, dimethyl citrate, triethyl citrate, acetyl tributyl citrate, acetyl triethyl citrate, glycerol triacetate, di(n-butyl)sebecate, and the like; polyhydroxy alcohols, such as propylene glycol, polyethylene glycol, glycerin, sorbitol, and the like; fatty acids; triesters of glycerol, such as triglycerides, epoxidized soybean oil, and other epoxidized vegetable oils; sterols, such as cholesterol; alcohols, such as C.sub.6-C.sub.12 alkanols, 2-ethoxyethanol. The release rate modification agent may be used singly or in combination with other such agents. Suitable combinations of release rate modification agents include, but are not limited to, glycerin/propylene glycol, sorbitol/glycerine, ethylene oxide/propylene oxide, butylene glycol/adipic acid, and the like. Preferred release rate modification agents include, but are not limited to, dimethyl citrate, triethyl citrate, ethyl heptanoate, glycerin, and hexanediol. Suitable pore-forming agents that may be used in the polymer composition include, but are not limited to, sugars such as sucrose and dextrose, salts such as sodium chloride and sodium carbonate, polymers such as hydroxylpropylcellulose, carboxymethylcellulose, polyethylene glycol, and polyvinylpyrrolidone. Solid crystals that will provide a defined pore size, such as salt or sugar, are preferred.

[0946] In specific preferred embodiments the polypeptide, polynucleotide, and antibody compositions of the invention are formulated using the BEMA™ BioErodible Mucoadhesive System, MCA™ MucoCutaneous Absorption System, SMP™ Solvent MicroParticle System, or BCP™ BioCompatible Polymer System of Atrix Laboratories, Inc. (Fort Collins, Colo.).

[0947] Sustained-release Therapeutics also include liposomally entrapped Therapeutics of the invention (see generally, Langer, Science 249:1527-1533 (1990); Treat et al., in Liposomes in the Therapy of Infectious Disease and Cancer, Lopez-Berestein and Fidler (eds.), Liss, New York, pp. 317-327 and 353-365 (1989)). Liposomes containing the Therapeutic are prepared by methods known per se: DE 3,218,121; Epstein et al., Proc. Natl. Acad. Sci. (USA) 82:3688-3692 (1985); Hwang et al., Proc. Natl. Acad. Sci. (USA) 77:4030-4034 (1980); EP 52,322; EP 36,676; EP 88,046; EP 143,949; EP 142,641; Japanese Pat. Appl. 83-118008; U.S. Pat. Nos. 4,485,045 and 4,544,545; and EP 102,324. Ordinarily, the liposomes are of the small (about 200-800 Angstroms) unilamellar type in which the lipid content is greater than about 30 mol. percent cholesterol, the selected proportion being adjusted for the optimal Therapeutic.

[0948] In yet an additional embodiment, the Therapeutics of the invention are delivered by way of a pump (see Langer, supra; Sefton, CRC Crit. Ref. Biomed. Eng. 14:201 (1987); Buchwald et al., Surgery 88:507 (1980); Saudek et al., N. Engl. J. Med. 321:574 (1989)).

[0949] Other controlled release systems are discussed in the review by Langer (Science 249:1527-1533 (1990)).

[0950] For parenteral administration, in one embodiment, the Therapeutic is formulated generally by mixing it at the desired degree of purity, in a unit dosage injectable form (solution, suspension, or emulsion), with a pharmaceutically acceptable carrier, i.e., one that is non-toxic to recipients at the dosages and concentrations employed and is compatible with other ingredients of the formulation. For example, the formulation preferably does not include oxidizing agents and other compounds that are known to be deleterious to the Therapeutic.

[0951] Generally, the formulations are prepared by contacting the Therapeutic uniformly and intimately with liquid carriers or finely divided solid carriers or both. Then, if necessary, the product is shaped into the desired formulation. Preferably the carrier is a parenteral carrier, more preferably a solution that is isotonic with the blood of the recipient. Examples of such carrier vehicles include water, saline, Ringer's solution, and dextrose solution. Non-aqueous vehicles such as fixed oils and ethyl oleate are also useful herein, as well as liposomes.

[0952] The carrier suitably contains minor amounts of additives such as substances that enhance isotonicity and chemical stability. Such materials are non-toxic to recipients at the dosages and concentrations employed, and include buffers such as phosphate, citrate, succinate, acetic acid, and other organic acids or their salts; antioxidants such as ascorbic acid; low molecular weight (less than about ten residues) polypeptides, e.g., polyarginine or tripeptides; proteins, such as serum albumin, gelatin, or immunoglobulins; hydrophilic polymers such as polyvinylpyrrolidone; amino acids, such as glycine, glutamic acid, aspartic acid, or arginine; monosaccharides, disaccharides, and other carbohydrates including cellulose or its derivatives, glucose, manose, or dextrins; chelating agents such as EDTA; sugar alcohols such as mannitol or sorbitol; counterions such as sodium; and/or nonionic surfactants such as polysorbates, poloxamers, or PEG.

[0953] The Therapeutic is typically formulated in such vehicles at a concentration of about 0.1 mg/ml to 100 mg/ml, preferably 1-10 mg/ml, at a pH of about 3 to 8. It will be understood that the use of certain of the foregoing excipients, carriers, or stabilizers will result in the formation of polypeptide salts.

[0954] Any pharmaceutical used for therapeutic administration can be sterile. Sterility is readily accomplished by filtration through sterile filtration membranes (e.g., 0.2 micron membranes). Therapeutics generally are placed into a container having a sterile access port, for example, an intravenous solution bag or vial having a stopper pierceable by a hypodermic injection needle.

[0955] Therapeutics ordinarily will be stored in unit or multi-dose containers, for example, sealed ampoules or vials, as an aqueous solution or as a lyophilized formulation for reconstitution. As an example of a lyophilized formulation, 10-ml vials are filled with 5 ml of sterile-filtered 1% (w/v) aqueous Therapeutic solution, and the resulting mixture is lyophilized. The infusion solution is prepared by reconstituting the lyophilized Therapeutic using bacteriostatic Water-for-Injection.

[0956] The invention also provides a pharmaceutical pack or kit comprising one or more containers filled with one or more of the ingredients of the Therapeutics of the invention. Associated with such container(s) can be a notice in the form prescribed by a governmental agency regulating the manufacture, use or sale of pharmaceuticals or biological products, which notice reflects approval by the agency of manufacture, use or sale for human administration. In addition, the Therapeutics may be employed in conjunction with other therapeutic compounds.

[0957] The Therapeutics of the invention may be administered alone or in combination with adjuvants. Adjuvants that may be administered with the Therapeutics of the invention include, but are not limited to, alum, alum plus deoxycholate (ImmunoAg), MTP-PE (Biocine Corp.), QS21 (Genentech, Inc.), BCG (e.g., THERACYS®), MPL and nonviable prepartions of Corynebacterium parvum. In a specific embodiment, Therapeutics of the invention are administered in combination with alum. In another specific embodiment, Therapeutics of the invention are administered in combination with QS-21. Further adjuvants that may be administered with the Therapeutics of the invention include, but are not limited to, Monophosphoryl lipid immunomodulator, AdjuVax 100a, QS-21, QS-18, CRL1005, Aluminum salts, MF-59, and Virosomal adjuvant technology. Vaccines that may be administered with the Therapeutics of the invention include, but are not limited to, vaccines directed toward protection against MMR (measles, mumps, rubella), polio, varicella, tetanus/diptheria, hepatitis A, hepatitis B, haemophilus influenzae B, whooping cough, pneumonia, influenza, Lyme's Disease, rotavirus, cholera, yellow fever, Japanese encephalitis, poliomyelitis, rabies, typhoid fever, and pertussis. Combinations may be administered either concomitantly, e.g., as an admixture, separately but simultaneously or concurrently; or sequentially. This includes presentations in which the combined agents are administered together as a therapeutic mixture, and also procedures in which the combined agents are administered separately but simultaneously, e.g., as through separate intravenous lines into the same individual. Administration “in combination” further includes the separate administration of one of the compounds or agents given first, followed by the second.

[0958] The Therapeutics of the invention may be administered alone or in combination with other therapeutic agents. Therapeutic agents that may be administered in combination with the Therapeutics of the invention, include but not limited to, chemotherapeutic agents, antibiotics, steroidal and non-steroidal anti-inflammatories, conventional immunotherapeutic agents, and/or therapeutic treatments described below. Combinations may be administered either concomitantly, e.g., as an admixture, separately but simultaneously or concurrently; or sequentially. This includes presentations in which the combined agents are administered together as a therapeutic mixture, and also procedures in which the combined agents are administered separately but simultaneously, e.g., as through separate intravenous lines into the same individual. Administration “in combination” further includes the separate administration of one of the compounds or agents given first, followed by the second.

[0959] In one embodiment, the Therapeutics of the invention are administered in combination with an anticoagulant. Anticoagulants that may be administered with the compositions of the invention include, but are not limited to, heparin, low molecular weight heparin, warfarin sodium (e.g., COUMADIN®), dicumarol, 4-hydroxycoumarin, anisindione (e.g., MIRADON™), acenocoumarol (e.g., nicoumalone, SINTHROME™), indan-1,3-dione, phenprocoumon (e.g., MARCUMAR™), ethyl biscoumacetate (e.g., TROMEXAN™), and aspirin. In a specific embodiment, compositions of the invention are administered in combination with heparin and/or warfarin. In another specific embodiment, compositions of the invention are administered in combination with warfarin. In another specific embodiment, compositions of the invention are administered in combination with warfarin and aspirin. In another specific embodiment, compositions of the invention are administered in combination with heparin. In another specific embodiment, compositions of the invention are administered in combination with heparin and aspirin.

[0960] In another embodiment, the Therapeutics of the invention are administered in combination with thrombolytic drugs. Thrombolytic drugs that may be administered with the compositions of the invention include, but are not limited to, plasminogen, lys-plasminogen, alpha2-antiplasmin, streptokinae (e.g., KABIKINASE™), antiresplace (e.g., EMINASE™), tissue plasminogen activator (t-PA, altevase, ACTIVASE™), urokinase (e.g., ABBOKINASE™), sauruplase, (Prourokinase, single chain urokinase), and aminocaproic acid (e.g., AMICAR™). In a specific embodiment, compositions of the invention are administered in combination with tissue plasminogen activator and aspirin.

[0961] In another embodiment, the Therapeutics of the invention are administered in combination with antiplatelet drugs. Antiplatelet drugs that may be administered with the compositions of the invention include, but are not limited to, aspirin, dipyridamole (e.g., PERSANTINE™), and ticlopidine (e.g., TICLID™).

[0962] In specific embodiments, the use of anti-coagulants, thrombolytic and/or antiplatelet drugs in combination with Therapeutics of the invention is contemplated for the detection, prevention, diagnosis, prognostication, treatment, and/or amelioration of thrombosis, arterial thrombosis, venous thrombosis, thromboembolism, pulmonary embolism, atherosclerosis, myocardial infarction, transient ischemic attack, unstable angina. In specific embodiments, the use of anticoagulants, thrombolytic drugs and/or antiplatelet drugs in combination with Therapeutics of the invention is contemplated for the prevention of occulsion of saphenous grafts, for reducing the risk of periprocedural thrombosis as might accompany angioplasty procedures, for reducing the risk of stroke in patients with atrial fibrillation including nonrheumatic atrial fibrillation, for reducing the risk of embolism associated with mechanical heart valves and or mitral valves disease. Other uses for the therapeutics of the invention, alone or in combination with antiplatelet, anticoagulant, and/or thrombolytic drugs, include, but are not limited to, the prevention of occlusions in extracorporeal devices (e.g., intravascular canulas, vascular access shunts in hemodialysis patients, hemodialysis machines, and cardiopulmonary bypass machines).

[0963] In certain embodiments, Therapeutics of the invention are administered in combination with antiretroviral agents, nucleoside/nucleotide reverse transcriptase inhibitors (NRTIs), non-nucleoside reverse transcriptase inhibitors (NNRTIs), and/or protease inhibitors (Pis). NRTIs that may be administered in combination with the Therapeutics of the invention, include, but are not limited to, RETROVIR™ (zidovudine/AZT), VIDEX™ (didanosine/ddl), HIVID™ (zalcitabine/ddC), ZERIT™ (stavudine/d4T), EPIVIR™ (lamivudine/3TC), and COMBIVIR™ (zidovudine/lamivudine). NNRTIs that may be administered in combination with the Therapeutics of the invention, include, but are not limited to, VIRAMUNE™ (nevirapine), RESCRIPTOR™ (delavirdine), and SUSTIVA™ (efavirenz). Protease inhibitors that may be administered in combination with the Therapeutics of the invention, include, but are not limited to, CRIXIVAN™ (indinavir), NORVIR™ (ritonavir), INVIRASE™ (saquinavir), and VIRACEPT™ (nelfinavir). In a specific embodiment, antiretroviral agents, nucleoside reverse transcriptase inhibitors, non-nucleoside reverse transcriptase inhibitors, and/or protease inhibitors may be used in any combination with Therapeutics of the invention to treat AIDS and/or to prevent or treat HIV infection.

[0964] Additional NRTIs include LODENOSINE™ (F-ddA; an acid-stable adenosine NRTI; Triangle/Abbott; COVIRACL™ (emtricitabine/FTC; structurally related to lamivudine (3TC) but with 3- to 10-fold greater activity in vitro; Triangle/Abbott); dOTC (BCH-10652, also structurally related to lamivudine but retains activity against a substantial proportion of lamivudine-resistant isolates; Biochem Pharma); Adefovir (refused approval for anti-HIV therapy by FDA; Gilead Sciences); PREVEON® (Adefovir Dipivoxil, the active prodrug of adefovir; its active form is PMEA-pp); TENOFOVIR™ (bis-POC PMPA, a PMPA prodrug; Gilead); DAPD/DXG (active metabolite of DAPD; Triangle/Abbott); D-D4FC (related to 3TC, with activity against AZT/3TC-resistant virus); GW420867X (Glaxo Wellcome); ZIAGEN™ (abacavir/159U89; Glaxo Wellcome Inc.); CS-87 (3′azido-2′,3′-dideoxyuridine; WO 99/66936); and S-acyl-2-thioethyl (SATE)-bearing prodrug forms of β-L-FD4C and β-L-FddC (WO 98/17281).

[0965] Additional NNRTIs include COACTINON™ (Emivirine/MKC-442, potent NNRTI of the HEPT class, Triangle/Abbott); CAPRAVIRINE™ (AG-1549/S-1153, a next generation NNRTI with activity against viruses containing the K103N mutation; Agouron); PNU-142721 (has 20- to 50-fold greater activity than its predecessor delavirdine and is active against K103N mutants; Pharmacia & Upjohn); DPC-961 and DPC-963 (second-generation derivatives of efavirenz, designed to be active against viruses with the K103N mutation; DuPont); GW-420867X (has 25-fold greater activity than HBY097 and is active against K103N mutants; Glaxo Wellcome); CALANOLIDE A (naturally occurring agent from the latex tree; active against viruses containing either or both the Y181C and K103N mutations); and Propolis (WO 99/49830).

[0966] Additional protease inhibitors include LOPINAVIR™ (ABT378/r; Abbott Laboratories); BMS-232632 (an azapeptide; Bristol-Myres Squibb); TIPRANAVIR™ (PNU-140690, a non-peptic dihydropyrone; Pbarmacia & Upjohn); PD-178390 (a nonpeptidic dihydropyrone; Parke-Davis); BMS 232632 (an azapeptide; Bristol-Myers Squibb); L-756,423 (an indinavir analog; Merck); DMP-450 (a cyclic urea compound; Avid & DuPont); AG-1776 (a peptidomimetic with in vitro activity against protease inhibitor-resistant viruses; Agouron); VX-175/GW-433908 (phosphate prodrug of amprenavir; Vertex & Glaxo Welcome); CGP61755 (Ciba); and AGENERASE™ (amprenavir; Glaxo Wellcome Inc.).

[0967] Additional antiretroviral agents include fusion inhibitors/gp41 binders. Fusion inhibitors/gp41 binders include T-20 (a peptide from residues 643-678 of the HIV gp41 transmembrane protein ectodomain which binds to gp41 in its resting state and prevents transformation to the fusogenic state; Trimeris) and T-1249 (a second-generation fusion inhibitor; Trimeris).

[0968] Additional antiretroviral agents include fusion inhibitors/chemokine receptor antagonists. Fusion inhibitors/chemokine receptor antagonists include CXCR4 antagonists such as AMD 3100 (a bicyclam), SDF-1 and its analogs, and ALX40-4C (a cationic peptide), T22 (an 18 amino acid peptide; Trimeris) and the T22 analogs T134 and T140; CCR5 antagonists such as RANTES (9-68), AOP-RANTES, NNY-RANTES, and TAK-779; and CCR5/CXCR4 antagonists such as NSC 651016 (a distamycin analog). Also included are CCR2B, CCR3, and CCR6 antagonists. Chemokine recpetor agonists such as RANTES, SDF-1, MIP-1α, MIP-1β, etc., may also inhibit fusion.

[0969] Additional antiretroviral agents include integrase inhibitors. Integrase inhibitors include dicaffeoylquinic (DFQA) acids; L-chicoric acid (a dicaffeoyltartaric (DCTA) acid); quinalizarin (QLC) and related anthraquinones; ZINTEVIR™ (AR 177, an oligonucleotide that probably acts at cell surface rather than being a true integrase inhibitor; Arondex); and naphthols such as those disclosed in WO 98/50347.

[0970] Additional antiretroviral agents include hydroxyurea-like compunds such as BCX-34 (a purine nucleoside phosphorylase inhibitor; Biocryst); ribonucleotide reductase inhibitors such as DIDOX™ (Molecules for Health); inosine monophosphate dehydrogenase (IMPDH) inhibitors sucha as VX-497 (Vertex); and mycopholic acids such as CellCept (mycophenolate mofetil; Roche).

[0971] Additional antiretroviral agents include inhibitors of viral integrase, inhibitors of viral genome nuclear translocation such as arylene bis(methylketone) compounds; inhibitors of HW entry such as AOP-RANTES, NNY-RANTES, RANTES-IgG fusion protein, soluble complexes of RANTES and glycosaminoglycans (GAG), and AMD-3100; nucleocapsid zinc finger inhibitors such as dithiane compounds; targets of HIV Tat and Rev; and phannacoenhancers such as ABT-378.

[0972] Other antiretroviral therapies and adjunct therapies include cytokines and lymphokines such as MIP-1α, MIP-1β, SDF-1α, IL-2, PROLEUKIN™ (aldesleukin/L2-7001; Chiron), IL-4, IL-10, IL-12, and IL-13; interferons such as IFN-α2a; antagonists of TNFs, NFκB, GM-CSF, M-CSF, and IL-10; agents that modulate immune activation such as cyclosporin and prednisone; vaccines such as Remune™ (HIV Immunogen), APL 400-003 (Apollon), recombinant gp 120 and fragments, bivalent (B/E) recombinant envelope glycoprotein, rgp120CM235, MN rgp120, SF-2 rgp120, gp120/soluble CD4 complex, Delta JR-FL protein, branched synthetic peptide derived from discontinuous gp120 C3/C4 domain, fusion-competent immunogens, and Gag, Pol, Nef, and Tat vaccines; gene-based therapies such as genetic suppressor elements (GSEs; WO 98/54366), and intrakines (genetically modified CC chemokines targetted to the ER to block surface expression of newly synthesized CCR5 (Yang et al., PNAS 94:11567-72 (1997); Chen et al., Nat. Med 3:1110-16 (1997)); antibodies such as the anti-CXCR4 antibody 12G5, the anti-CCR5 antibodies 2D7, 5C7, PA8, PA9, PA10, PA11, PA12, and PA14, the anti-CD4 antibodies Q4120 and RPA-T4, the anti-CCR3 antibody 7B11, the anti-gp120 antibodies 17b, 48d, 447-52D, 257-D, 268-D and 50.1, anti-Tat antibodies, anti-TNF-α antibodies, and monoclonal antibody 33A; aryl hydrocarbon (AH) receptor agonists and antagonists such as TCDD, 3,3′,4,4′,5-pentachlorobiphenyl, 3,3′,4,4′-tetrachlorobiphenyl, and α-naphthoflavone (WO 98/30213); and antioxidants such as γ-L-glutamyl-L-cysteine ethyl ester (γ-GCE; WO 99/56764).

[0973] In a further embodiment, the Therapeutics of the invention are administered in combination with an antiviral agent. Antiviral agents that may be administered with the Therapeutics of the invention include, but are not limited to, acyclovir, ribavirin, amantadine, and remantidine.

[0974] In other embodiments, Therapeutics of the invention may be administered in combination with anti-opportunistic infection agents. Anti-opportunistic agents that may be administered in combination with the Therapeutics of the invention, include, but are not limited to, TRIMETHOPRIM-SULFAMETHOXAZOLE™, DAPSONE™, PENTAMIDINE™, ATOVAQUONE™, ISONIAZID™, RIFAMPIN™, PYRAZINAMIDE™, ETHAMBUTOL™, RIFABUTIN™, CLARITHROMYCIN™, AZITHROMYCIN™, GANCICLOVIR™, FOSCARNET™, CIDOFOVIR™, FLUCONAZOLE™, ITRACONAZOLE™, KETOCONAZOLE™, ACYCLOVIR™, FAMCICOLVIR™, PYRIMETHAMINE™, LEUCOVORIN™, NEUPOGEN™ (filgrastim/G-CSF), and LEUKINE™ (sargramostim/GM-CSF). In a specific embodiment, Therapeutics of the invention are used in any combination with TRIMETHOPRIM-SULFAMETHOXAZOLE™, DAPSONE™, PENTAMIDINE™, and/or ATOVAQUONE™ to prophylactically treat or prevent an opportunistic Pneumocystis carinii pneumonia infection. In another specific embodiment, Therapeutics of the invention are used in any combination with ISONIAZID™, RIFAMPIN™, PYRAZINAMIDE™, and/or ETHAMBUTOL™ to prophylactically treat or prevent an opportunistic Mycobacterium avium complex infection. In another specific embodiment, Therapeutics of the invention are used in any combination with RIFABUTIN™, CLARITHROMYCIN™, and/or AZITHROMYCIN™ to prophylactically treat or prevent an opportunistic Mycobacterium tuberculosis infection. In another specific embodiment, Therapeutics of the invention are used in any combination with GANCICLOVIR™, FOSCARNET™, and/or CIDOFOVIR™ to prophylactically treat or prevent an opportunistic cytomegalovirus infection. In another specific embodiment, Therapeutics of the invention are used in any combination with FLUCONAZOLE™, ITRACONAZOLE™, and/or KETOCONAZOLE™ to prophylactically treat or prevent an opportunistic fungal infection. In another specific embodiment, Therapeutics of the invention are used in any combination with ACYCLOVIR™ and/or FAMCICOLVIR™ to prophylactically treat or prevent an opportunistic herpes simplex virus type I and/or type II infection. In another specific embodiment, Therapeutics of the invention are used in any combination with PYRIMETHAMINE™ and/or LEUCOVORIN™ to prophylactically treat or prevent an opportunistic Toxoplasma gondii infection. In another specific embodiment, Therapeutics of the invention are used in any combination with LEUCOVORIN™ and/or NEUPOGEN™ to prophylactically treat or prevent an opportunistic bacterial infection.

[0975] In a further embodiment, the Therapeutics of the invention are administered in combination with an antibiotic agent. Antibiotic agents that may be administered with the Therapeutics of the invention include, but are not limited to, amoxicillin, beta-lactamases, aminoglycosides, beta-lactam (glycopeptide), beta-lactamases, Clindamycin, chloramphenicol, cephalosporins, ciprofloxacin, erythromycin, fluoroquinolones, macrolides, metronidazole, penicillins, quinolones, rapamycin, rifampin, streptomycin, sulfonamide, tetracyclines, trimethoprim, trimethoprim-sulfamethoxazole, and vancomycin.

[0976] In other embodiments, the Therapeutics of the invention are administered in combination with immunestimulants. Immunostimulants that may be administered in combination with the Therapeutics of the invention include, but are not limited to, levamisole (e.g., ERGAMISOL™), isoprinosine (e.g. INOSIPLEX™), interferons (e.g. interferon alpha), and interleukins (e.g., IL-2).

[0977] In other embodiments, Therapeutics of the invention are administered in combination with immunosuppressive agents. Immunosuppressive agents that may be administered in combination with the Therapeutics of the invention include, but are not limited to, steroids, cyclosporine, cyclosporine analogs, cyclophosphamide methylprednisone, prednisone, azathioprine, FK-506, 15-deoxyspergualin, and other immunosuppressive agents that act by suppressing the function of responding T cells. Other immunosuppressive agents that may be administered in combination with the Therapeutics of the invention include, but are not limited to, prednisolone, methotrexate, thalidomide, methoxsalen, rapamycin, leflunomide, mizoribine (BREDININ™), brequinar, deoxyspergualin, and azaspirane (SKF 105685), ORTHOCLONE OKT® 3 (muromonab-CD3), SANDIMMUNE™, NEORAL™, SANGDYA™ (cyclosporine), PROGRAF® (FK506, tacrolimus), CELLCEPT® (mycophenolate motefil, of which the active metabolite is mycophenolic acid), IMURAN™ (azathioprine), glucocorticosteroids, adrenocortical steroids such as DELTASONE™ (prednisone) and HYDELTRASOL™ (prednisolone), FOLEX™ and MEXATE™ (methotrxate), OXSORALEN-ULTRA™ (methoxsalen) and RAPAMUNE™ (sirolimus). In a specific embodiment, immunosuppressants may be used to prevent rejection of organ or bone marrow transplantation.

[0978] In an additional embodiment, Therapeutics of the invention are administered alone or in combination with one or more intravenous immune globulin preparations. Intravenous immune globulin preparations that may be administered with the Therapeutics of the invention include, but not limited to, GAMMAR™, IVEEGAM™, SANDOGLOBULIN™, GAMMAGARD S/D™, ATGAM™ (antithymocyte glubulin), and GAMIMUNE™. In a specific embodiment, Therapeutics of the invention are administered in combination with intravenous immune globulin preparations in transplantation therapy (e.g., bone marrow transplant).

[0979] In certain embodiments, the Therapeutics of the invention are administered alone or in combination with an anti-inflammatory agent. Anti-inflammatory agents that may be administered with the Therapeutics of the invention include, but are not limited to, corticosteroids (e.g. betamethasone, budesonide, cortisone, dexamethasone, hydrocortisone, methylprednisolone, prednisolone, prednisone, and triamcinolone), nonsteroidal anti-inflammatory drugs (e.g., diclofenac, diflunisal, etodolac, fenoprofen, floctafenine, flurbiprofen, ibuprofen, indomethacin, ketoprofen, meclofenamate, mefenamic acid, meloxicam, nabumetone, naproxen, oxaprozin, phenylbutazone, piroxicam, sulindac, tenoxicam, tiaprofenic acid, and tolmetin.), as well as antihistamines, aminoarylcarboxylic acid derivatives, arylacetic acid derivatives, arylbutyric acid derivatives, arylcarboxylic acids, arylpropionic acid derivatives, pyrazoles, pyrazolones, salicylic acid derivatives, thiazinecarboxamides, e-acetamidocaproic acid, S-adenosylmethionine, 3-amino-4-hydroxybutyric acid, amixetrine, bendazac, benzydamine, bucolome, difenpiramide, ditazol, emorfazone, guaiazulene, nabumetone, nimesulide, orgotein, oxaceprol, paranyline, perisoxal, pifoxime, proquazone, proxazole, and tenidap.

[0980] In an additional embodiment, the compositions of the invention are administered alone or in combination with an anti-angiogenic agent. Anti-angiogenic agents that may be administered with the compositions of the invention include, but are not limited to, Angiostatin (Entremed, Rockville, Md.), Troponin-1 (Boston Life Sciences, Boston, Mass.), anti-Invasive Factor, retinoic acid and derivatives thereof, paclitaxel (Taxol), Suramin, Tissue Inhibitor of Metalloproteinase-1, Tissue Inhibitor of Metalloproteinase-2, VEGI, Plasminogen Activator Inhibitor-1, Plasminogen Activator Inhibitor-2, and various forms of the lighter “d group” transition metals.

[0981] Lighter “d group” transition metals include, for example, vanadium, molybdenum, tungsten, titanium, niobium, and tantalum species. Such transition metal species may form transition metal complexes. Suitable complexes of the above-mentioned transition metal species include oxo transition metal complexes.

[0982] Representative examples of vanadium complexes include oxo vanadium complexes such as vanadate and vanadyl complexes. Suitable vanadate complexes include metavanadate and orthovanadate complexes such as, for example, ammonium metavanadate, sodium metavanadate, and sodium orthovanadate. Suitable vanadyl complexes include, for example, vanadyl acetylacetonate and vanadyl sulfate including vanadyl sulfate hydrates such as vanadyl sulfate mono- and trihydrates.

[0983] Representative examples of tungsten and molybdenum complexes also include oxo complexes. Suitable oxo tungsten complexes include tungstate and tungsten oxide complexes. Suitable tungstate complexes include ammonium tungstate, calcium tungstate, sodium tungstate dihydrate, and tungstic acid. Suitable tungsten oxides include tungsten (IV) oxide and tungsten (VI) oxide. Suitable oxo molybdenum complexes include molybdate, molybdenum oxide, and molybdenyl complexes. Suitable molybdate complexes include ammonium molybdate and its hydrates, sodium molybdate and its hydrates, and potassium molybdate and its hydrates. Suitable molybdenum oxides include molybdenum (VI) oxide, molybdenum (VI) oxide, and molybdic acid. Suitable molybdenyl complexes include, for example, molybdenyl acetylacetonate. Other suitable tungsten and molybdenum complexes include hydroxo derivatives derived from, for example, glycerol, tartaric acid, and sugars.

[0984] A wide variety of other anti-angiogenic factors may also be utilized within the context of the present invention. Representative examples include, but are not limited to, platelet factor 4; protamine sulphate; sulphated chitin derivatives (prepared from queen crab shells), (Murata et al., Cancer Res. 51:22-26, (1991)); Sulphated Polysaccharide Peptidoglycan Complex (SP-PG) (the function of this compound may be enhanced by the presence of steroids such as estrogen, and tamoxifen citrate); Staurosporine; modulators of matrix metabolism, including for example, proline analogs, cishydroxyproline, d,L-3,4-dehydroproline, Thiaproline, alpha,alpha-dipyridyl, aminopropionitrile fumarate; 4-propyl-5-(4-pyridinyl)-2(3H)-oxazolone; Methotrexate; Mitoxantrone; Heparin; Interferons; 2 Macroglobulin-serum; ChIMP-3 (Pavloff et al., J. Bio. Chem. 267:17321-17326, (1992)); Chymostatin (Tomkinson et al., Biochem J. 286:475-480, (1992)); Cyclodextrin Tetradecasulfate; Eponemycin; Camptothecin; Fumagillin (Ingber et al., Nature 348:555-557, (1990)); Gold Sodium Thiomalate (“GST”; Matsubara and Ziff, J. Clin. Invest. 79:1440-1446, (1987)); anticollagenase-serum; alpha2-antiplasmin (Holmes et al., J. Biol. Chem. 262(4):1659-1664, (1987)); Bisantrene (National Cancer Institute); Lobenzarit disodium (N-(2)-carboxyphenyl-4-chloroanthronilic acid disodium or “CCA”; (Takeuchi et al., Agents Actions 36:312-316, (1992)); and metalloproteinase inhibitors such as BB94.

[0985] Additional anti-angiogenic factors that may also be utilized within the context of the present invention include Thalidomide, (Celgene, Warren, N.J.); Angiostatic steroid; AGM-1470 (H. Brem and J. Folkman J Pediatr. Surg. 28:445-51 (1993)); an integrin alpha v beta 3 antagonist (C. Storgard et al., J Clin. Invest. 103:47-54 (1999)); carboxynaminolmidazole; Carboxyamidotriazole (CAI) (National Cancer Institute, Bethesda, Md.); Conbretastatin A-4 (CA4P) (OXiGENE, Boston, Mass.); Squalamine (Magainin Pharmaceuticals, Plymouth Meeting, Pa.); TNP-470, (Tap Pharmaceuticals, Deerfield, Ill.); ZD-0101 AstraZeneca (London, UK); APRA (CT2584); Benefin, Byrostatin-1 (SC339555); CGP-41251 (PKC 412); CM101; Dexrazoxane (ICRF187); DMXAA; Endostatin; Flavopridiol; Genestein; GTE; ImmTher; Iressa (ZD1839); Octreotide (Somatostatin); Panretin; Penacillamine; Photopoint; PI-88; Prinomastat (AG-3340) Purlytin; Suradista (FCE26644); Tamoxifen (Nolvadex); Tazarotene; Tetrathiomolybdate; Xeloda (Capecitabine); and 5-Fluorouracil.

[0986] Anti-angiogenic agents that may be administed in combination with the compounds of the invention may work through a variety of mechanisms including, but not limited to, inhibiting proteolysis of the extracellular matrix, blocking the function of endothelial cell-extracellular matrix adhesion molecules, by antagonizing the function of angiogenesis inducers such as growth factors, and inhibiting integrin receptors expressed on proliferating endothelial cells. Examples of anti-angiogenic inhibitors that interfere with extracellular matrix proteolysis and which may be administered in combination with the compositons of the invention include, but are not lmited to, AG-3340 (Agouron, La Jolla, Calif.), BAY-12-9566 (Bayer, West Haven, Conn.), BMS-275291 (Bristol Myers Squibb, Princeton, N.J.), CGS-27032A (Novartis, East Hanover, N.J.), Marimastat (British Biotech, Oxford, UK), and Metastat (Aeterna, St-Foy, Quebec). Examples of anti-angiogenic inhibitors that act by blocking the function of endothelial cell-extracellular matrix adhesion molecules and which may be administered in combination with the compositons of the invention include, but are not lmited to, EMD-121974 (Merck KcgaA Darmstadt, Germany) and Vitaxin (lxsys, La Jolla, Calif./Medimmune, Gaithersburg, Md.). Examples of anti-angiogenic agents that act by directly antagonizing or inhibiting angiogenesis inducers and which may be administered in combination with the compositons of the invention include, but are not lmited to, Angiozyme (Ribozyme, Boulder, Colo.), Anti-VEGF antibody (Genentech, S. San Francisco, Calif.), PTK-787/ZK-225846 (Novartis, Basel, Switzerland), SU-101 (Sugen, S. San Francisco, Calif.), SU-5416 (Sugen/Pharmacia Upjohn, Bridgewater, N.J.), and SU-6668 (Sugen). Other anti-angiogenic agents act to indirectly inhibit angiogenesis. Examples of indirect inhibitors of angiogenesis which may be administered in combination with the compositons of the invention include, but are not limited to, IM-862 (Cytran, Kirkland, Wash.), Interferon-alpha, IL-12 (Roche, Nutley, N.J.), and Pentosan polysulfate (Georgetown University, Washington, D.C.).

[0987] In particular embodiments, the use of compositions of the invention in combination with anti-angiogenic agents is contemplated for the treatment, prevention, and/or amelioration of an autoimmune disease, such as for example, an autoimmune disease described herein.

[0988] In a particular embodiment, the use of compositions of the invention in combination with anti-angiogenic agents is contemplated for the treatment, prevention, and/or amelioration of arthritis. In a more particular embodiment, the use of compositions of the invention in combination with anti-angiogenic agents is contemplated for the treatment, prevention, and/or amelioration of rheumatoid arthritis.

[0989] In another embodiment, the polynucleotides encoding a polypeptide of the present invention are administered in combination with an angiogenic protein, or polynucleotides encoding an angiogenic protein. Examples of angiogenic proteins that may be administered with the compositions of the invention include, but are not limited to, acidic and basic fibroblast growth factors, VEGF-1, VEGF-2, VEGF-3, epidermal growth factor alpha and beta, platelet-derived endothelial cell growth factor, platelet-derived growth factor, tumor necrosis factor alpha, hepatocyte growth factor, insulin-like growth factor, colony stimulating factor, macrophage colony stimulating factor, granulocyte/macrophage colony stimulating factor, and nitric oxide synthase.

[0990] In additional embodiments, compositions of the invention are administered in combination with a chemotherapeutic agent. Chemotherapeutic agents that may be administered with the Therapeutics of the invention include, but are not limited to alkylating agents such as nitrogen mustards (for example, Mechlorethamine, cyclophosphamide, Cyclophosphamide Ifosfamide, Melphalan (L-sarcolysin), and Chlorambucil), ethylenimines and methylmelamines (for example, Hexamethylmelamine and Thiotepa), alkyl sulfonates (for example, Busulfan), nitrosoureas (for example, Carmustine (BCNU), Lomustine (CCNU), Semustine (methyl-CCNU), and Streptozocin (streptozotocin)), triazenes (for example, Dacarbazine (DTIC; dimethyltriazenoimidazolecarboxamide)), folic acid analogs (for example, Methotrexate (amethopterin)), pyrimidine analogs (for example, Fluorouacil (5-fluorouracil; 5-FU), Floxuridine (fluorodeoxyuridine; FudR), and Cytarabine (cytosine arabinoside)), purine analogs and related inhibitors (for example, Mercaptopurine (6-mercaptopurine; 6-MP), Thioguanine (6-thioguanine; TG), and Pentostatin (2′-deoxycoformycin)), vinca alkaloids (for example, Vinblastine (VLB, vinblastine sulfate)) and Vincristine (vincristine sulfate)), epipodophyllotoxins (for example, Etoposide and Teniposide), antibiotics (for example, Dactinomycin (actinomycin D), Daunorubicin (daunomycin; rubidomycin), Doxorubicin, Bleomycin, Plicamycin (mithramycin), and Mitomycin (mitomycin C), enzymes (for example, L-Asparaginase), biological response modifiers (for example, Interferon-alpha and interferon-alpha-2b), platinum coordination compounds (for example, Cisplatin (cis-DDP) and Carboplatin), anthracenedione (Mitoxantrone), substituted ureas (for example, Hydroxyurea), methylhydrazine derivatives (for example, Procarbazine (N-methylhydrazine; MIH), adrenocorticosteroids (for example, Prednisone), progestins (for example, Hydroxyprogesterone caproate, Medroxyprogesterone, Medroxyprogesterone acetate, and Megestrol acetate), estrogens (for example, Diethylstilbestrol (DES), Diethylstilbestrol diphosphate, Estradiol, and Ethinyl estradiol), antiestrogens (for example, Tamoxifen), androgens (Testosterone proprionate, and Fluoxymesterone), antiandrogens (for example, Flutamide), gonadotropin-releasing horomone analogs (for example, Leuprolide), other hormones and hormone analogs (for example, methyltestosterone, estramustine, estramustine phosphate sodium, chlorotrianisene, and testolactone), and others (for example, dicarbazine, glutamic acid, and mitotane).

[0991] In one embodiment, the compositions of the invention are administered in combination with one or more of the following drugs: infliximab (also known as Remicade™ Centocor, Inc.), Trocade (Roche, RO-32-3555), Leflunomide (also known as Arava™ from Hoechst Marion Roussel), Kineret™ (an IL-1 Receptor antagonist also known as Anakinra from Amgen, Inc.)

[0992] In a specific embodiment, compositions of the invention are administered in combination with CHOP (cyclophosphamide, doxorubicin, vincristine, and prednisone) or combination of one or more of the components of CHOP. In one embodiment, the compositions of the invention are administered in combination with anti-CD20 antibodies, human monoclonal anti-CD20 antibodies. In another embodiment, the compositions of the invention are administered in combination with anti-CD20 antibodies and CHOP, or anti-CD20 antibodies and any combination of one or more of the components of CHOP, particularly cyclophosphamide and/or prednisone. In a specific embodiment, compositions of the invention are administered in combination with Rituximab. In a further embodiment, compositions of the invention are administered with Rituximab and CHOP, or Rituximab and any combination of one or more of the components of CHOP, particularly cyclophosphamide and/or prednisone. In a specific embodiment, compositions of the invention are administered in combination with tositumomab. In a further embodiment, compositions of the invention are administered with tositumomab and CHOP, or tositumomab and any combination of one or more of the components of CHOP, particularly cyclophosphamide and/or prednisone. The anti-CD20 antibodies may optionally be associated with radioisotopes, toxins or cytotoxic prodrugs.

[0993] In another specific embodiment, the compositions of the invention are administered in combination Zevalin™. In a further embodiment, compositions of the invention are administered with Zevalin™ and CHOP, or Zevalin™ and any combination of one or more of the components of CHOP, particularly cyclophosphamide and/or prednisone. Zevalin™ may be associated with one or more radisotopes. Particularly preferred isotopes are ⁹⁰Y and ¹¹¹In.

[0994] In an additional embodiment, the Therapeutics of the invention are administered in combination with cytokines. Cytokines that may be administered with the Therapeutics of the invention include, but are not limited to, IL2, IL3, IL4, IL5, IL6, IL7, IL10, IL12, IL13, IL15, anti-CD40, CD40L, IFN-gamma and TNF-alpha. In another embodiment, Therapeutics of the invention may be administered with any interleukin, including, but not limited to, IL-1alpha, IL-1beta, IL-2, IL-3, IL-4, IL-5, IL-6, IL-7, IL-8, IL-9, IL-10, IL-11, IL-12, IL-13, IL-14, IL-15, IL-16, IL-17, IL-18, IL-19, IL-20, and IL-21.

[0995] In one embodiment, the Therapeutics of the invention are administered in combination with members of the TNF family. TNF, TNF-related or TNF-like molecules that may be administered with the Therapeutics of the invention include, but are not limited to, soluble forms of TNF-alpha, lymphotoxin-alpha (LT-alpha, also known as TNF-beta), LT-beta (found in complex heterotrimer LT-alpha2-beta), OPGL, FasL, CD27L, CD30L, CD40L, 4-1BBL, DcR3, OX40L, TNF-gamma (International Publication No. WO 96/14328), AIM-I (International Publication No. WO 97/33899), endokine-alpha (International Publication No. WO 98/07880), OPG, and neutrokine-alpha (International Publication No. WO 98/18921, OX40, and nerve growth factor (NGF), and soluble forms of Fas, CD30, CD27, CD40 and 4-IBB, TR2 (International Publication No. WO 96/34095), DR3 (International Publication No. WO 97/33904), DR4 (International Publication No. WO 98/32856), TR5 (International Publication No. WO 98/30693), TRANK, TR9 (International Publication No. WO 98/56892),TR10 (International Publication No. WO 98/54202), 312C2 (International Publication No. WO 98/06842), and TR12, and soluble forms CD154, CD70, and CD153.

[0996] In an additional embodiment, the Therapeutics of the invention are administered in combination with angiogenic proteins. Angiogenic proteins that may be administered with the Therapeutics of the invention include, but are not limited to, Glioma Derived Growth Factor (GDGF), as disclosed in European Patent Number EP-399816; Platelet Derived Growth Factor-A (PDGF-A), as disclosed in European Patent Number EP-682110; Platelet Derived Growth Factor-B (PDGF-B), as disclosed in European Patent Number EP-282317; Placental Growth Factor (PlGF), as disclosed in International Publication Number WO 92/06194; Placental Growth Factor-2 (PlGF-2), as disclosed in Hauser et al., Growth Factors, 4:259-268 (1993); Vascular Endothelial Growth Factor (VEGF), as disclosed in International Publication Number WO 90/13649; Vascular Endothelial Growth Factor-A (VEGF-A), as disclosed in European Patent Number EP-506477; Vascular Endothelial Growth Factor-2 (VEGF-2), as disclosed in International Publication Number WO 96/39515; Vascular Endothelial Growth Factor B (VEGF-3); Vascular Endothelial Growth Factor B-186 (VEGF-B186), as disclosed in International Publication Number WO 96/26736; Vascular Endothelial Growth Factor-D (VEGF-D), as disclosed in International Publication Number WO 98/02543; Vascular Endothelial Growth Factor-D (VEGF-D), as disclosed in International Publication Number WO 98/07832; and Vascular Endothelial Growth Factor-E (VEGF-E), as disclosed in German Patent Number DE19639601. The above mentioned references are herein incorporated by reference in their entireties.

[0997] In an additional embodiment, the Therapeutics of the invention are administered in combination with Fibroblast Growth Factors. Fibroblast Growth Factors that may be administered with the Therapeutics of the invention include, but are not limited to, FGF-1, FGF-2, FGF-3, FGF-4, FGF-5, FGF-6, FGF-7, FGF-8, FGF-9, FGF-10, FGF-11, FGF-12, FGF-13, FGF-14, and FGF-15.

[0998] In an additional embodiment, the Therapeutics of the invention are administered in combination with hematopoietic growth factors. Hematopoietic growth factors that may be administered with the Therapeutics of the invention include, but are not limited to, granulocyte macrophage colony stimulating factor (GM-CSF) (sargramostim, LEUKINE™, PROKINE™), granulocyte colony stimulating factor (G-CSF) (filgrastim, NEUPOGEN™), macrophage colony stimulating factor (M-CSF, CSF-1) erythropoietin (epoetin alfa, EPOGEN™, PROCRIT™), stem cell factor (SCF, c-kit ligand, steel factor), megakaryocyte colony stimulating factor, PIXY321 (a GMCSF/IL-3 fusion protein), interleukins, especially any one or more of IL-1 through IL-12, interferon-gamma, or thrombopoietin.

[0999] In certain embodiments, Therapeutics of the present invention are administered in combination with adrenergic blockers, such as, for example, acebutolol, atenolol, betaxolol, bisoprolol, carteolol, labetalol, metoprolol, nadolol, oxprenolol, penbutolol, pindolol, propranolol, sotalol, and timolol.

[1000] In another embodiment, the Therapeutics of the invention are administered in combination with an antiarrhythmic drug (e.g., adenosine, amidoarone, bretylium, digitalis, digoxin, digitoxin, diliazem, disopyramide, esmolol, flecainide, lidocaine, mexiletine, moricizine, phenyloin, procainamide, N-acetyl procainamide, propafenone, propranolol, quinidine, sotalol, tocainide, and verapamil).

[1001] In another embodiment, the Therapeutics of the invention are administered in combination with diuretic agents, such as carbonic anhydrase-inhibiting agents (e.g., acetazolamide, dichlorphenamide, and methazolamide), osmotic diuretics (e.g., glycerin, isosorbide, mannitol, and urea), diuretics that inhibit Na⁺—K⁺-2Cl⁻ symport (e.g., furosemide, bumetanide, azosemide, piretanide, tripamide, ethacrynic acid, muzolimine, and torsemide), thiazide and thiazide-like diuretics (e.g., bendroflumethiazide, benzthiazide, chlorothiazide, hydrochlorothiazide, hydroflumethiazide, methyclothiazide, polythiazide, trichormethiazide, chlorthalidone, indapamide, metolazone, and quinethazone), potassium sparing diuretics (e.g., amiloride and triamterene), and mineral corticoid receptor antagonists (e.g., spironolactone, canrenone, and potassium canrenoate).

[1002] In one embodiment, the Therapeutics of the invention are administered in combination with treatments for endocrine and/or hormone imbalance disorders. Treatments for endocrine and/or hormone imbalance disorders include, but are not limited to, ¹²⁷I, radioactive isotopes of iodine such as ¹³¹I and ¹²³I; recombinant growth hormone, such as HUMATROPE™ (recombinant somatropin); growth hormone analogs such as PROTROPIN™ (somatrem); dopamine agonists such as PARLODEL™ (bromocriptine); somatostatin analogs such as SANDOSTATIN™ (octreotide); gonadotropin preparations such as PREGNYL™, A.P.L.™ and PROFASI™ (chorionic gonadotropin (CG)), PERGONAL™ (menotropins), and METRODIN™ (urofollitropin (uFSH)); synthetic human gonadotropin releasing hormone preparations such as FACTREL™ and LUTREPULSE™ (gonadorelin hydrochloride); synthetic gonadotropin agonists such as LUPRON™ (leuprolide acetate), SUPPRELIN™ (histrelin acetate), SYNAREL™ (nafarelin acetate), and ZOLADEX™ (goserelin acetate); synthetic preparations of thyrotropin-releasing hormone such as RELEFACT TRH™ and THYPINONE™ (protirelin); recombinant human TSH such as THYROGEN™; synthetic preparations of the sodium salts of the natural isomers of thyroid hormones such as L-T₄™, SYNTHROID™ and LEVOTHROID™ (levothyroxine sodium), L-T₃™, CYTOMEL™ and TRIOSTAT™ (liothyroine sodium), and THYROLAR™ (liotrix); antithyroid compounds such as 6-n-propylthiouracil (propylthiouracil), 1-methyl-2-mercaptoimidazole and TAPAZOLE™ (methimazole), NEO-MERCAZOLE™ (carbimazole); beta-adrenergic receptor antagonists such as propranolol and esmolol; Ca²⁺ channel blockers; dexamethasone and iodinated radiological contrast agents such as TELEPAQUE™ (iopanoic acid) and ORAGRAFIN™ (sodium ipodate).

[1003] Additional treatments for endocrine and/or hormone imbalance disorders include, but are not limited to, estrogens or congugated estrogens such as ESTRACE™ (estradiol), ESTINYL™ (ethinyl estradiol), PREMARIN™, ESTRATAB™, ORTHO-EST™, OGEN™ and estropipate (estrone), ESTROVIS™ (quinestrol), ESTRADERM™ (estradiol), DELESTROGEN™ and VALERGEN™ (estradiol valerate), DEPO-ESTRADIOL CYPIONATE™ and ESTROJECT LA™ (estradiol cypionate); antiestrogens such as NOLVADEX™ (tamoxifen), SEROPHENE™ and CLOMID™ (clomiphene); progestins such as DURALUTIN™ (hydroxyprogesterone caproate), MPA™ and DEPO-PROVERA™ (medroxyprogesterone acetate), PROVERA™ and CYCRIN™ (MPA), MEGACE™ (megestrol acetate), NORLUTIN™ (norethindrone), and NORLUTATE™ and AYGESTIN™ (norethindrone acetate); progesterone implants such as NORPLANT SYSTEM™ (subdermal implants of norgestrel); antiprogestins such as RU 486™ (mifepristone); hormonal contraceptives such as ENOVID™ (norethynodrel plus mestranol), PROGESTASERT™ (intrauterine device that releases progesterone), LOESTRIN™, BREVICON™, MODICON™, GENORA™, NELONA™, NORINYL™, OVACON-35™ and OVACON-50™ (ethinyl estradiol/norethindrone), LEVLEN™, NORDETTE™, TRI-LEVLEN™ and TRIPHASIL-21™ (ethinyl estradiol/levonorgestrel) LO/OVRAL™ and OVRAL™ (ethinyl estradiol/norgestrel), DEMULEN™ (ethinyl estradiol/ethynodiol diacetate), NORINYL™, ORTHO-NOVUM™, NORETHIN™, GENORA™, and NELOVA™ (norethindrone/mestranol), DESOGEN™ and ORTHO-CEPT™ (ethinyl estradiol/desogestrel), ORTHO-CYCLEN™ and ORTHO-TRICYCLEN™ (ethinyl estradiol/norgestimate), MICRONOR™ and NOR-QD™ (norethindrone), and OVRETTE™ (norgestrel).

[1004] Additional treatments for endocrine and/or hormone imbalance disorders include, but are not limited to, testosterone esters such as methenolone acetate and testosterone undecanoate; parenteral and oral androgens such as TESTOJECT-50™ (testosterone), TESTEX™ (testosterone propionate), DELATESTRYL™ (testosterone enanthate), DEPO-TESTOSTERONE™ (testosterone cypionate), DANOCRINE™ (danazol), HALOTESTIN™ (fluoxymesterone), ORETON METHYL™, TESTRED™ and VIRILON™ (methyltestosterone), and OXANDRIN” (oxandrolone); testosterone transdermal systems such as TESTODERM™; androgen receptor antagonist and 5-alpha-reductase inhibitors such as ANDROCUR™ (cyproterone acetate), EULEXIN™ (flutamide), and PROSCAR™ (finasteride); adrenocorticotropic hormone preparations such as CORTROSYN™ (cosyntropin); adrenocortical steroids and their synthetic analogs such as ACLOVATE™ (alclometasone dipropionate), CYCLOCORT™ (amcinonide), BECLOVENT™ and VANCERIL™ (beclomethasone dipropionate), CELESTONE™ (betamethasone), BENISONE™ and UTICORT™ (betamethasone benzoate), DIPROSONE™ (betamethasone dipropionate), CELESTONE PHOSPHATE™ (betamethasone sodium phosphate), CELESTONE SOLUSPAN™ (betamethasone sodium phosphate and acetate), BETA-VAL™ and VALISONE™ (betamethasone valerate), TEMOVATE™ (clobetasol propionate), CLODERM™ (clocortolone pivalate), CORTEF™ and HYDROCORTONE™ (cortisol (hydrocortisone)), HYDROCORTONE ACETATE™ (cortisol (hydrocortisone) acetate), LOCOID™ (cortisol (hydrocortisone) butyrate), HYDROCORTONE PHOSPHATE™ (cortisol (hydrocortisone) sodium phosphate), A-HYDROCORT™ and SOLU CORTEF™ (cortisol (hydrocortisone) sodium succinate), WESTCORT™ (cortisol (hydrocortisone) valerate), CORTISONE ACETATE™ (cortisone acetate), DESOWEN™ and TRIDESILON™ (desonide), TOPICORT™ (desoximetasone), DECADRON™ (dexamethasone), DECADRON LA™ (dexamethasone acetate), DECADRON PHOSPHATE™ and HEXADROL PHOSPHATE™ (dexamethasone sodium phosphate), FLORONE™ and MAXIFLOR™ (diflorasone diacetate), FLORINEF ACETATE™ (fludrocortisone acetate), AEROBID™ and NASALIDE™ (flunisolide), FLUONID™ and SYNALAR™ (fluocinolone acetonide), LIDEX™ (fluocinonide), FLUOR-OP™ and FML™ (fluorometholone), CORDRAN™ (flurandrenolide), HALOG™ (halcinonide), HMS LIZUIFILM™ (medrysone), MEDROL™ (methylprednisolone), DEPO-MEDROL™ and MEDROL ACETATE™ (methylprednisone acetate), A-METHAPRED™ and SOLUMEDROL™ (methylprednisolone sodium succinate), ELOCON™ (mometasone furoate), HALDRONE™ (paramethasone acetate), DELTA-CORTEF™ (prednisolone), ECONOPRED™ (prednisolone acetate), HYDELTRASOL™ (prednisolone sodium phosphate), HYDELTRA-T.B.A™ (prednisolone tebutate), DELTASONE™ (prednisone), ARISTOCORT™ and KENACORT™ (triamcinolone), KENALOG™ (triamcinolone acetonide), ARISTOCORT™ and KENACORT DIACETATE™ (triamcinolone diacetate), and ARISTOSPAN™ (triamcinolone hexacetonide); inhibitors of biosynthesis and action of adrenocortical steroids such as CYTADREN™ (aminoglutethimide), NIZORAL™ (ketoconazole), MODRASTANE™ (trilostane), and METOPIRONE™ (metyrapone); bovine, porcine or human insulin or mixtures thereof; insulin analogs; recombinant human insulin such as HUMULIN™ and NOVOLIN™; oral hypoglycemic agents such as ORAMIDE™ and ORINASE™ (tolbutamide), DIABINESE™ (chlorpropamide), TOLAMIDE™ and TOLINASE™ (tolazamide), DYMELOR™ (acetohexamide), glibenclamide, MICRONASE™, DIBETA™ and GLYNASE™ (glyburide), GLUCOTROL™ (glipizide), and DIAMICRON™ (gliclazide), GLUCOPHAGE™ (metformin), ciglitazone, pioglitazone, and alpha-glucosidase inhibitors; bovine or porcine glucagon; somatostatins such as SANDOSTATIN™ (octreotide); and diazoxides such as PROGLYCEM™ (diazoxide).

[1005] In one embodiment, the Therapeutics of the invention are administered in combination with treatments for uterine motility disorders. Treatments for uterine motility disorders include, but are not limited to, estrogen drugs such as conjugated estrogens (e.g., PREMARIN® and ESTRATAB®), estradiols (e.g., CLIMARA® and ALORA®), estropipate, and chlorotrianisene; progestin drugs (e.g., AMEN® (medroxyprogesterone), MICRONOR® (norethidrone acetate), PROMETRIUM® progesterone, and megestrol acetate); and estrogen/progesterone combination therapies such as, for example, conjugated estrogens/medroxyprogesterone (e.g., PREMPRO™ and PREMPHASE®) and norethindrone acetate/ethinyl estsradiol (e.g., FEMHRT™).

[1006] In an additional embodiment, the Therapeutics of the invention are administered in combination with drugs effective in treating iron deficiency and hypochromic anemias, including but not limited to, ferrous sulfate (iron sulfate, FEOSOL™), ferrous fumarate (e.g., FEOSTA™), ferrous gluconate (e.g., FERGON™), polysaccharide-iron complex (e.g., NIFEREX™), iron dextran injection (e.g., INFED™), cupric sulfate, pyroxidine, riboflavin, Vitamin B₁₂, cyancobalamin injection (e.g., REDISOL™, RUBRAMIN PC™), hydroxocobalamin, folic acid (e.g., FOLVITE™), leucovorin (folinic acid, 5-CHOH4PteGlu, citrovorum factor) or WELLCOVORIN (Calcium salt of leucovorin), transferrin or ferritin.

[1007] In certain embodiments, the Therapeutics of the invention are administered in combination with agents used to treat psychiatric disorders. Psychiatric drugs that may be administered with the Therapeutics of the invention include, but are not limited to, antipsychotic agents (e.g., chlorpromazine, chlorprothixene, clozapine, fluphenazine, haloperidol, loxapine, mesoridazine, molindone, olanzapine, perphenazine, pimozide, quetiapine, risperidone, thioridazine, thiothixene, trifluoperazine, and triflupromazine), antimanic agents (e.g., carbamazepine, divalproex sodium, lithium carbonate, and lithium citrate), antidepressants (e.g., amitriptyline, amoxapine, bupropion, citalopram, clomipramine, desipramine, doxepin, fluvoxamine, fluoxetine, imipramine, isocarboxazid, maprotiline, mirtazapine, nefazodone, nortriptyline, paroxetine, phenelzine, protriptyline, sertraline, tranylcypromine, trazodone, trimipramine, and venlafaxine), antianxiety agents (e.g., alprazolam, buspirone, chlordiazepoxide, clorazepate, diazepam, halazepam, lorazepam, oxazepam, and prazepam), and stimulants (e.g., d-amphetamine, methylphenidate, and pemoline).

[1008] In other embodiments, the Therapeutics of the invention are administered in combination with agents used to treat neurological disorders. Neurological agents that may be administered with the Therapeutics of the invention include, but are not limited to, antiepileptic agents (e.g., carbamazepine, clonazepam, ethosuximide, phenobarbital, phenyloin, primidone, valproic acid, divalproex sodium, felbamate, gabapentin, lamotrigine, levetiracetam, oxcarbazepine, tiagabine, topiramate, zonisamide, diazepam, lorazepam, and clonazepam), antiparkinsonian agents (e.g., levodopa/carbidopa, selegiline, amantidine, bromocriptine, pergolide, ropinirole, pramipexole, benztropine; biperiden; ethopropazine; procyclidine; trihexyphenidyl, tolcapone), and ALS therapeutics (e.g. riluzole).

[1009] In another embodiment, Therapeutics of the invention are administered in combination with vasodilating agents and/or calcium channel blocking agents. Vasodilating agents that may be administered with the Therapeutics of the invention include, but are not limited to, Angiotensin Converting Enzyme (ACE) inhibitors (e.g., papaverine, isoxsuprine, benazepril, captopril, cilazapril, enalapril, enalaprilat, fosinopril, lisinopril, moexipril, perindopril, quinapril, ramipril, spirapril, trandolapril, and nylidrin), and nitrates (e.g., isosorbide dinitrate, isosorbide mononitrate, and nitroglycerin). Examples of calcium channel blocking agents that may be administered in combination with the Therapeutics of the invention include, but are not limited to amlodipine, bepridil, diltiazem, felodipine, flunarizine, isradipine, nicardipine, nifedipine, nimodipine, and verapamil.

[1010] In certain embodiments, the Therapeutics of the invention are administered in combination with treatments for gastrointestinal disorders. Treatments for gastrointestinal disorders that may be administered with the Therapeutic of the invention include, but are not limited to, H₂ histamine receptor antagonists (e.g., TAGAMET™ (cimetidine), ZANTAC™ (ranitidine), PEPCID™ (famotidine), and AXID™ (nizatidine)); inhibitors of H⁺, K⁺ ATPase (e.g., PREVACID™ (lansoprazole) and PRILOSEC™ (omeprazole)); Bismuth compounds (e.g., PEPTO-BISMOL™ (bismuth subsalicylate) and DE-NOL™ (bismuth subcitrate)); various antacids; sucralfate; prostaglandin analogs (e.g. CYTOTEC™ (misoprostol)); muscarinic cholinergic antagonists; laxatives (e.g., surfactant laxatives, stimulant laxatives, saline and osmotic laxatives); antidiarrheal agents (e.g., LOMOTIL™ (diphenoxylate), MOTOFEN™ (diphenoxin), and IMODIUM™ (loperamide hydrochloride)), synthetic analogs of somatostatin such as SANDOSTATIN™ (octreotide), antiemetic agents (e.g., ZOFRAN™ (ondansetron), KYTRIL™ (granisetron hydrochloride), tropisetron, dolasetron, metoclopramide, chlorpromazine, perphenazine, prochlorperazine, promethazine, thiethylperazine, triflupromazine, domperidone, haloperidol, droperidol, trimethobenzamide, dexamethasone, methylprednisolone, dronabinol, and nabilone); D2 antagonists (e.g., metoclopramide, trimethobenzamide and chlorpromazine); bile salts; chenodeoxycholic acid; ursodeoxycholic acid; and pancreatic enzyme preparations such as pancreatin and pancrelipase.

[1011] In additional embodiments, the Therapeutics of the invention are administered in combination with other therapeutic or prophylactic regimens, such as, for example, radiation therapy.

### Example 14

### Method of Treating Decreased Levels of the Polypeptide

[1012] The present invention relates to a method for treating an individual in need of an increased level of a polypeptide of the invention in the body comprising administering to such an individual a composition comprising a therapeutically effective amount of polypeptides (including agonists thereto), and/or antibodies of the invention. Moreover, it will be appreciated that conditions caused by a decrease in the standard or normal expression level of a polypeptide of the present invention in an individual may be treated by administering agonists of said polypeptide. Thus, the invention also provides a method of treatment of an individual in need of an increased level of the polypeptide comprising administering to such an individual a Therapeutic comprising an amount of the agonist (including polypeptides and antibodies of the present invention) to increase the activity level of the polypeptide in such an individual.

[1013] For example, a patient with decreased levels of a polypeptide receives a daily dose 0.1-100 ug/kg of the agonist for six consecutive days. The exact details of the dosing scheme, based on administration and formulation, are provided in Example 13.

### Example 15

### Method of Treating Increased Levels of the Polypeptide

[1014] The present invention also relates to a method of treating an individual in need of a decreased level of a polypeptide of the invention in the body comprising administering to such an individual a composition comprising a therapeutically effective amount of an antagonist of the invention (including polypeptides and antibodies of the invention).

[1015] In one example, antisense technology is used to inhibit production of a polypeptide of the present invention. This technology is one example of a method of decreasing levels of a polypeptide, due to a variety of etiologies, such as cancer.

[1016] For example, a patient diagnosed with abnormally increased levels of a polypeptide is administered intravenously antisense polynucleotides at 0.5, 1.0, 1.5, 2.0 and 3.0 mg/kg day for 21 days. This treatment is repeated after a 7-day rest period if the treatment was well tolerated. The antisense polynucleotides of the present invention can be formulated using techniques and formulations described herein (e.g. see Example 13), or otherwise known in the art.

### Example 16

### Method of Treatment Using Gene Therapy-Ex Vivo

[1017] One method of gene therapy transplants fibroblasts, which are capable of expressing a polypeptide, onto a patient. Generally, fibroblasts are obtained from a subject by skin biopsy. The resulting tissue is placed in tissue-culture medium and separated into small pieces. Small chunks of the tissue are placed on a wet surface of a tissue culture flask, approximately ten pieces are placed in each flask. The flask is turned upside down, closed tight and left at room temperature over night. After 24 hours at room temperature, the flask is inverted and the chunks of tissue remain fixed to the bottom of the flask and fresh media (e.g., Ham's F12 media, with 10% FBS, penicillin and streptomycin) is added. The flasks are then incubated at 37 degree C. for approximately one week.

[1018] At this time, fresh media is added and subsequently changed every several days. After an additional two weeks in culture, a monolayer of fibroblasts emerge. The monolayer is trypsinized and scaled into larger flasks.

[1019] pMV-7 (Kirschmeier, P. T. et al., DNA, 7:219-25 (1988)), flanked by the long terminal repeats of the Moloney murine sarcoma virus, is digested with EcoRI and HindIII and subsequently treated with calf intestinal phosphatase. The linear vector is fractionated on agarose gel and purified, using glass beads.

[1020] The cDNA encoding a polypeptide of the present invention can be amplified using PCR primers which correspond to the 5′ and 3′ end sequences respectively as set forth in Example 1 using primers and having appropriate restriction sites and initiation/stop codons, if necessary. Preferably, the 5′ primer contains an EcoRI site and the 3′ primer includes a HindIII site. Equal quantities of the Moloney murine sarcoma virus linear backbone and the amplified EcoRI and HindIII fragment are added together, in the presence of T4 DNA ligase. The resulting mixture is maintained under conditions appropriate for ligation of the two fragments. The ligation mixture is then used to transform bacteria HB101, which are then plated onto agar containing kanamycin for the purpose of confirming that the vector has the gene of interest properly inserted.

[1021] The amphotropic pA317 or GP+am12 packaging cells are grown in tissue culture to confluent density in Dulbecco's Modified Eagles Medium (DMEM) with 10% calf serum (CS), penicillin and streptomycin. The MSV vector containing the gene is then added to the media and the packaging cells transduced with the vector. The packaging cells now produce infectious viral particles containing the gene (the packaging cells are now referred to as producer cells).

[1022] Fresh media is added to the transduced producer cells, and subsequently, the media is harvested from a 10 cm plate of confluent producer cells. The spent media, containing the infectious viral particles, is filtered through a millipore filter to remove detached producer cells and this media is then used to infect fibroblast cells. Media is removed from a sub-confluent plate of fibroblasts and quickly replaced with the media from the producer cells. This media is removed and replaced with fresh media. If the titer of virus is high, then virtually all fibroblasts will be infected and no selection is required. If the titer is very low, then it is necessary to use a retroviral vector that has a selectable marker, such as neo or his. Once the fibroblasts have been efficiently infected, the fibroblasts are analyzed to determine whether protein is produced.

[1023] The engineered fibroblasts are then transplanted onto the host, either alone or after having been grown to confluence on cytodex 3 microcarrier beads.

### Example 17

### Gene Therapy Using Endogenous Genes Corresponding to Polynucleotides of the Invention

[1024] Another method of gene therapy according to the present invention involves operably associating the endogenous polynucleotide sequence of the invention with a promoter via homologous recombination as described, for example, in U.S. Pat. No. 5,641,670, issued Jun. 24, 1997; International Publication NO: WO 96/29411, published Sep. 26, 1996; International Publication NO: WO 94/12650, published Aug. 4, 1994; Koller et al., Proc. Natl. Acad. Sci. USA, 86:8932-8935 (1989); and Zijlstra et al., Nature, 342:435-438 (1989). This method involves the activation of a gene which is present in the target cells, but which is not expressed in the cells, or is expressed at a lower level than desired.

[1025] Polynucleotide constructs are made which contain a promoter and targeting sequences, which are homologous to the 5′ non-coding sequence of endogenous polynucleotide sequence, flanking the promoter. The targeting sequence will be sufficiently near the 5′ end of the polynucleotide sequence so the promoter will be operably linked to the endogenous sequence upon homologous recombination. The promoter and the targeting sequences can be amplified using PCR. Preferably, the amplified promoter contains distinct restriction enzyme sites on the 5′ and 3′ ends. Preferably, the 3′ end of the first targeting sequence contains the same restriction enzyme site as the 5′ end of the amplified promoter and the 5′ end of the second targeting sequence contains the same restriction site as the 3′ end of the amplified promoter.

[1026] The amplified promoter and the amplified targeting sequences are digested with the appropriate restriction enzymes and subsequently treated with calf intestinal phosphatase. The digested promoter and digested targeting sequences are added together in the presence of T4 DNA ligase. The resulting mixture is maintained under conditions appropriate for ligation of the two fragments. The construct is size fractionated on an agarose gel, then purified by phenol extraction and ethanol precipitation.

[1027] In this Example, the polynucleotide constructs are administered as naked polynucleotides via electroporation. However, the polynucleotide constructs may also be administered with transfection-facilitating agents, such as liposomes, viral sequences, viral particles, precipitating agents, etc. Such methods of delivery are known in the art.

[1028] Once the cells are transfected, homologous recombination will take place which results in the promoter being operably linked to the endogenous polynucleotide sequence. This results in the expression of polynucleotide corresponding to the polynucleotide in the cell. Expression may be detected by immunological staining, or any other method known in the art.

[1029] Fibroblasts are obtained from a subject by skin biopsy. The resulting tissue is placed in DMEM+10% fetal calf serum. Exponentially growing or early stationary phase fibroblasts are trypsinized and rinsed from the plastic surface with nutrient medium. An aliquot of the cell suspension is removed for counting, and the remaining cells are subjected to centrifugation. The supernatant is aspirated and the pellet is resuspended in 5 ml of electroporation buffer (20 mM HEPES pH 7.3, 137 mM NaCl, 5 mM KCl, 0.7 mM Na₂ HPO₄, 6 mM dextrose). The cells are recentrifuged, the supernatant aspirated, and the cells resuspended in electroporation buffer containing 1 mg/ml acetylated bovine serum albumin. The final cell suspension contains approximately 3×10⁶ cells/ml. Electroporation should be performed immediately following resuspension.

[1030] Plasmid DNA is prepared according to standard techniques. For example, to construct a plasmid for targeting to the locus corresponding to the polynucleotide of the invention, plasmid pUC18 (MBI Fermentas, Amherst, N.Y.) is digested with HindIII. The CMV promoter is amplified by PCR with an XbaI site on the 5′ end and a BamHI site on the 3′ end. Two non-coding sequences are amplified via PCR: one non-coding sequence (fragment 1) is amplified with a HindIII site at the 5′ end and an Xba site at the 3′end; the other non-coding sequence (fragment 2) is amplified with a BamHI site at the 5′end and a HindIII site at the 3′end. The CMV promoter and the fragments (1 and 2) are digested with the appropriate enzymes (CMV promoter—XbaI and BamHI; fragment 1—XbaI; fragment 2—BamHI) and ligated together. The resulting ligation product is digested with HindIII, and ligated with the HindIII-digested pUC18 plasmid.

[1031] Plasmid DNA is added to a sterile cuvette with a 0.4 cm electrode gap (Bio-Rad). The final DNA concentration is generally at least 120 μg/ml. 0.5 ml of the cell suspension (containing approximately 1.5.×10⁶ cells) is then added to the cuvette, and the cell suspension and DNA solutions are gently mixed. Electroporation is performed with a Gene-Pulser apparatus (Bio-Rad). Capacitance and voltage are set at 960 μF and 250-300 V, respectively. As voltage increases, cell survival decreases, but the percentage of surviving cells that stably incorporate the introduced DNA, into their genome increases dramatically. Given these parameters, a pulse time of approximately 14-20 mSec should be observed.

[1032] Electroporated cells are maintained at room temperature for approximately 5 min, and the contents of the cuvette are then gently removed with a sterile transfer pipette. The cells are added directly to 10 ml of prewarmed nutrient media (DMEM with 15% calf serum) in a 10 cm dish and incubated at 37 degree C. The following day, the media is aspirated and replaced with 10 ml of fresh media and incubated for a further 16-24 hours.

[1033] The engineered fibroblasts are then injected into the host, either alone or after having been grown to confluence on cytodex 3 microcarrier beads. The fibroblasts now produce the protein product. The fibroblasts can then be introduced into a patient as described above.

### Example 18

### Method of Treatment Using Gene Therapy—In Vivo

[1034] Another aspect of the present invention is using in vivo gene therapy methods to prevent, treat, and/or ameliorate cancer or other hyperproliferative diseases and disorders. The gene therapy method relates to the introduction of naked nucleic acid (DNA, RNA, and antisense DNA or RNA) sequences into an animal to increase or decrease the expression of the polypeptide. The polynucleotide of the present invention may be operatively linked to (i.e., associated with) a promoter or any other genetic elements necessary for the expression of the polypeptide by the target tissue. Such gene therapy and delivery techniques and methods are known in the art, see, for example, WO90/11092, WO98/11779; U.S. Pat. Nos. 5,693,622, 5,705,151, 5,580,859; Tabata et al., Cardiovasc. Res. 35(3):470-479 (1997); Chao et al., Pharmacol. Res. 35(6):517-522 (1997); Wolff, Neuromuscul. Disord. 7(5):314-318 (1997); Schwartz et al., Gene Ther. 3(5):405-411 (1996); Tsurumi et al., Circulation 94(12):3281-3290 (1996) (incorporated herein by reference).

[1035] The polynucleotide constructs may be delivered by any method that delivers injectable materials to the cells of an animal, such as, injection into the interstitial space of tissues (heart, muscle, skin, lung, liver, intestine and the like). The polynucleotide constructs can be delivered in a pharmaceutically acceptable liquid or aqueous carrier.

[1036] The term “naked” polynucleotide, DNA or RNA, refers to sequences that are free from any delivery vehicle that acts to assist, promote, or facilitate entry into the cell, including viral sequences, viral particles, liposome formulations, lipofectin or precipitating agents and the like. However, the polynucleotides of the present invention may also be delivered in liposome formulations (such as those taught in Felgner P. L. et al. (1995) Ann. NY Acad. Sci. 772:126-139 and Abdallah B. et al. (1995) Biol. Cell 85(1):1-7) which can be prepared by methods well known to those skilled in the art.

[1037] The polynucleotide vector constructs used in the gene therapy method are preferably constructs that will not integrate into the host genome nor will they contain sequences that allow for replication. Any strong promoter known to those skilled in the art can be used for driving the expression of DNA. Unlike other gene therapy techniques, one major advantage of introducing naked nucleic acid sequences into target cells is the transitory nature of the polynucleotide synthesis in the cells. Studies have shown that non-replicating DNA sequences can be introduced into cells to provide production of the desired polypeptide for periods of up to six months.

[1038] The polynucleotide construct can be delivered to the interstitial space of tissues within an animal, including muscle, skin, brain, lung, liver, spleen, bone marrow, thymus, heart, lymph, blood, bone, cartilage, pancreas, kidney, gall bladder, stomach, intestine, testis, ovary, uterus, rectum, nervous system, eye, gland, and connective tissue. Interstitial space of the tissues comprises the intercellular fluid, mucopolysaccharide matrix among the reticular fibers of organ tissues, elastic fibers in the walls of vessels or chambers, collagen fibers of fibrous tissues, or that same matrix within connective tissue ensheathing muscle cells or in the lacunae of bone. It is similarly the space occupied by the plasma of the circulation and the lymph fluid of the lymphatic channels. Delivery to the interstitial space of muscle tissue is preferred for the reasons discussed below. They may be conveniently delivered by injection into the tissues comprising these cells. They are preferably delivered to and expressed in persistent, non-dividing cells which are differentiated, although delivery and expression may be achieved in non-differentiated or less completely differentiated cells, such as, for example, stem cells of blood or skin fibroblasts. In vivo muscle cells are particularly competent in their ability to take up and express polynucleotides.

[1039] For the naked polynucleotide injection, an effective dosage amount of DNA or RNA will be in the range of from about 0.05 g/kg body weight to about 50 mg/kg body weight. Preferably the dosage will be from about 0.005 mg/kg to about 20 mg/kg and more preferably from about 0.05 mg/kg to about 5 mg/kg. Of course, as the artisan of ordinary skill will appreciate, this dosage will vary according to the tissue site of injection. The appropriate and effective dosage of nucleic acid sequence can readily be determined by those of ordinary skill in the art and may depend on the condition being treated and the route of administration. The preferred route of administration is by the parenteral route of injection into the interstitial space of tissues. However, other parenteral routes may also be used, such as, inhalation of an aerosol formulation particularly for delivery to lungs or bronchial tissues, throat or mucous membranes of the nose. In addition, naked polynucleotide constructs can be delivered to arteries during angioplasty by the catheter used in the procedure.

[1040] The dose response effects of injected polynucleotide in muscle in vivo is determined as follows. Suitable template DNA for production of mRNA coding for polypeptide of the present invention is prepared in accordance with a standard recombinant DNA methodology. The template DNA, which may be either circular or linear, is either used as naked DNA or complexed with liposomes. The quadriceps muscles of mice are then injected with various amounts of the template DNA.

[1041] Five to six week old female and male Balb/C mice are anesthetized by intraperitoneal injection with 0.3 ml of 2.5% Avertin. A 1.5 cm incision is made on the anterior thigh, and the quadriceps muscle is directly visualized. The template DNA is injected in 0.1 ml of carrier in a 1 cc syringe through a 27 gauge needle over one minute, approximately 0.5 cm from the distal insertion site of the muscle into the knee and about 0.2 cm deep. A suture is placed over the injection site for future localization, and the skin is closed with stainless steel clips.

[1042] After an appropriate incubation time (e.g., 7 days) muscle extracts are prepared by excising the entire quadriceps. Every fifth 15 um cross-section of the individual quadriceps muscles is histochemically stained for protein expression. A time course for protein expression may be done in a similar fashion except that quadriceps from different mice are harvested at different times. Persistence of DNA in muscle following injection may be determined by Southern blot analysis after preparing total cellular DNA and HIRT supernatants from injected and control mice. The results of the above experimentation in mice can be used to extrapolate proper dosages and other treatment parameters in humans and other animals using naked DNA.

### Example 19

### Transgenic Animals

[1043] The polypeptides of the invention can also be expressed in transgenic animals. Animals of any species, including, but not limited to, mice, rats, rabbits, hamsters, guinea pigs, pigs, micro-pigs, goats, sheep, cows and non-human primates, e.g., baboons, monkeys, and chimpanzees may be used to generate transgenic animals. In a specific embodiment, techniques described herein or otherwise known in the art, are used to express polypeptides of the invention in humans, as part of a gene therapy protocol.

[1044] Any technique known in the art may be used to introduce the transgene (i.e., polynucleotides of the invention) into animals to produce the founder lines of transgenic animals. Such techniques include, but are not limited to, pronuclear microinjection (Paterson et al., Appl. Microbiol. Biotechnol. 40:691-698 (1994); Carver et al., Biotechnology (NY) 11:1263-1270 (1993); Wright et al., Biotechnology (NY) 9:830-834 (1991); and Hoppe et al., U.S. Pat. No. 4,873,191 (1989)); retrovirus mediated gene transfer into germ lines (Van der Putten et al., Proc. Natl. Acad. Sci., USA 82:6148-6152 (1985)), blastocysts or embryos; gene targeting in embryonic stem cells (Thompson et al., Cell 56:313-321 (1989)); electroporation of cells or embryos (Lo, 1983, Mol Cell. Biol. 3:1803-1814 (1983)); introduction of the polynucleotides of the invention using a gene gun (see, e.g., Ulmer et al., Science 259:1745 (1993); introducing nucleic acid constructs into embryonic pleuripotent stem cells and transferring the stem cells back into the blastocyst; and sperm-mediated gene transfer (Lavitrano et al., Cell 57:717-723 (1989); etc. For a review of such techniques, see Gordon, “Transgenic Animals,” Intl. Rev. Cytol. 115:171-229 (1989), which is incorporated by reference herein in its entirety.

[1045] Any technique known in the art may be used to produce transgenic clones containing polynucleotides of the invention, for example, nuclear transfer into enucleated oocytes of nuclei from cultured embryonic, fetal, or adult cells induced to quiescence (Campell et al., Nature 380:64-66 (1996); Wilmut et al., Nature 385:810-813 (1997)).

[1046] The present invention provides for transgenic animals that carry the transgene in all their cells, as well as animals which carry the transgene in some, but not all their cells, i.e., mosaic animals or chimeric. The transgene may be integrated as a single transgene or as multiple copies such as in concatamers, e.g., head-to-head tandems or head-to-tail tandems. The transgene may also be selectively introduced into and activated in a particular cell type by following, for example, the teaching of Lasko et al. (Lasko et al., Proc. Natl. Acad. Sci. USA 89:6232-6236 (1992)). The regulatory sequences required for such a cell-type specific activation will depend upon the particular cell type of interest, and will be apparent to those of skill in the art. When it is desired that the polynucleotide transgene be integrated into the chromosomal site of the endogenous gene, gene targeting is preferred. Briefly, when such a technique is to be utilized, vectors containing some nucleotide sequences homologous to the endogenous gene are designed for the purpose of integrating, via homologous recombination with chromosomal sequences, into and disrupting the function of the nucleotide sequence of the endogenous gene. The transgene may also be selectively introduced into a particular cell type, thus inactivating the endogenous gene in only that cell type, by following, for example, the teaching of Gu et al. (Gu et al., Science 265:103-106 (1994)). The regulatory sequences required for such a cell-type specific inactivation will depend upon the particular cell type of interest, and will be apparent to those of skill in the art.

[1047] Once transgenic animals have been generated, the expression of the recombinant gene may be assayed utilizing standard techniques. Initial screening may be accomplished by Southern blot analysis or PCR techniques to analyze animal tissues to verify that integration of the transgene has taken place. The level of mRNA expression of the transgene in the tissues of the transgenic animals may also be assessed using techniques which include, but are not limited to, Northern blot analysis of tissue samples obtained from the animal, in situ hybridization analysis, and reverse transcriptase-PCR (rt-PCR). Samples of transgenic gene-expressing tissue may also be evaluated immunocytochemically or immunohistochemically using antibodies specific for the transgene product.

[1048] Once the founder animals are produced, they may be bred, inbred, outbred, or crossbred to produce colonies of the particular animal. Examples of such breeding strategies include, but are not limited to: outbreeding of founder animals with more than one integration site in order to establish separate lines; inbreeding of separate lines in order to produce compound transgenics that express the transgene at higher levels because of the effects of additive expression of each transgene; crossing of heterozygous transgenic animals to produce animals homozygous for a given integration site in order to both augment expression and eliminate the need for screening of animals by DNA analysis; crossing of separate homozygous lines to produce compound heterozygous or homozygous lines; and breeding to place the transgene on a distinct background that is appropriate for an experimental model of interest.

[1049] Transgenic animals of the invention have uses which include, but are not limited to, animal model systems useful in elaborating the biological function of polypeptides of the present invention, studying conditions and/or disorders associated with aberrant expression, and in screening for compounds effective in ameliorating such conditions and/or disorders.

### Example 20

### Knock-Out Animals

[1050] Endogenous gene expression can also be reduced by inactivating or “knocking out” the gene and/or its promoter using targeted homologous recombination. (e.g., see Smithies et al., Nature 317:230-234 (1985); Thomas & Capecchi, Cell 51:503-512 (1987); Thompson et al., Cell 5:313-321 (1989); each of which is incorporated by reference herein in its entirety). For example, a mutant, non-functional polynucleotide of the invention (or a completely unrelated DNA sequence) flanked by DNA homologous to the endogenous polynucleotide sequence (either the coding regions or regulatory regions of the gene) can be used, with or without a selectable marker and/or a negative selectable marker, to transfect cells that express polypeptides of the invention in vivo. In another embodiment, techniques known in the art are used to generate knockouts in cells that contain, but do not express the gene of interest. Insertion of the DNA construct, via targeted homologous recombination, results in inactivation of the targeted gene. Such approaches are particularly suited in research and agricultural fields where modifications to embryonic stem cells can be used to generate animal offspring with an inactive targeted gene (e.g., see Thomas & Capecchi 1987 and Thompson 1989, supra). However this approach can be routinely adapted for use in humans provided the recombinant DNA constructs are directly administered or targeted to the required site in vivo using appropriate viral vectors that will be apparent to those of skill in the art.

[1051] In further embodiments of the invention, cells that are genetically engineered to express the polypeptides of the invention, or alternatively, that are genetically engineered not to express the polypeptides of the invention (e.g., knockouts) are administered to a patient in vivo. Such cells may be obtained from the patient (i.e., animal, including human) or an MHC compatible donor and can include, but are not limited to fibroblasts, bone marrow cells, blood cells (e.g., lymphocytes), adipocytes, muscle cells, endothelial cells etc. The cells are genetically engineered in vitro using recombinant DNA techniques to introduce the coding sequence of polypeptides of the invention into the cells, or alternatively, to disrupt the coding sequence and/or endogenous regulatory sequence associated with the polypeptides of the invention, e.g., by transduction (using viral vectors, and preferably vectors that integrate the transgene into the cell genome) or transfection procedures, including, but not limited to, the use of plasmids, cosmids, YACs, naked DNA, electroporation, liposomes, etc. The coding sequence of the polypeptides of the invention can be placed under the control of a strong constitutive or inducible promoter or promoter/enhancer to achieve expression, and preferably secretion, of the polypeptides of the invention. The engineered cells which express and preferably secrete the polypeptides of the invention can be introduced into the patient systemically, e.g., in the circulation, or intraperitoneally.

[1052] Alternatively, the cells can be incorporated into a matrix and implanted in the body, e.g., genetically engineered fibroblasts can be implanted as part of a skin graft; genetically engineered endothelial cells can be implanted as part of a lymphatic or vascular graft. (See, for example, Anderson et al. U.S. Pat. No. 5,399,349; and Mulligan & Wilson, U.S. Pat. No. 5,460,959 each of which is incorporated by reference herein in its entirety).

[1053] When the cells to be administered are non-autologous or non-MHC compatible cells, they can be administered using well known techniques which prevent the development of a host immune response against the introduced cells. For example, the cells may be introduced in an encapsulated form which, while allowing for an exchange of components with the immediate extracellular environment, does not allow the introduced cells to be recognized by the host immune system.

[1054] Transgenic and “knock-out” animals of the invention have uses which include, but are not limited to, animal model systems useful in elaborating the biological function of polypeptides of the present invention, studying conditions and/or disorders associated with aberrant expression, and in screening for compounds effective in ameliorating such conditions and/or disorders.

### Example 21

### Assays Detecting Stimulation or Inhibition of B Cell Proliferation and Differentiation

[1055] Generation of functional humoral immune responses requires both soluble and cognate signaling between B-lineage cells and their microenvironment. Signals may impart a positive stimulus that allows a B-lineage cell to continue its programmed development, or a negative stimulus that instructs the cell to arrest its current developmental pathway. To date, numerous stimulatory and inhibitory signals have been found to influence B cell responsiveness including IL-2, IL-4, IL-5, IL-6, IL-7, IL-10, IL-13, IL-14 and IL-15. Interestingly, these signals are by themselves weak effectors but can, in combination with various co-stimulatory proteins, induce activation, proliferation, differentiation, homing, tolerance and death among B cell populations.

[1056] One of the best studied classes of B-cell co-stimulatory proteins is the TNF-superfamily. Within this family CD40, CD27, and CD30 along with their respective ligands CD154, CD70, and CD153 have been found to regulate a variety of immune responses. Assays which allow for the detection and/or observation of the proliferation and differentiation of these B-cell populations and their precursors are valuable tools in determining the effects various proteins may have on these B-cell populations in terms of proliferation and differentiation. Listed below are two assays designed to allow for the detection of the differentiation, proliferation, or inhibition of B-cell populations and their precursors.

[1057] In Vitro Assay—Agonists or antagonists of the invention can be assessed for its ability to induce activation, proliferation, differentiation or inhibition and/or death in B-cell populations and their precursors. The activity of the agonists or antagonists of the invention on purified human tonsillar B cells, measured qualitatively over the dose range from 0.1 to 10,000 ng/mL, is assessed in a standard B-lymphocyte co-stimulation assay in which purified tonsillar B cells are cultured in the presence of either formalin-fixed Staphylococcus aureus Cowan I (SAC) or immobilized anti-human IgM antibody as the priming agent. Second signals such as IL-2 and IL-15 synergize with SAC and IgM crosslinking to elicit B cell proliferation as measured by tritiated-thymidine incorporation. Novel synergizing agents can be readily identified using this assay. The assay involves isolating human tonsillar B cells by magnetic bead (MACS) depletion of CD3-positive cells. The resulting cell population is greater than 95% B cells as assessed by expression of CD45R(B220).

[1058] Various dilutions of each sample are placed into individual wells of a 96-well plate to which are added 10⁵ B-cells suspended in culture medium (RPMI 1640 containing 10% FBS, 5×10⁻⁵M 2ME, 100 U/ml penicillin, 10 ug/ml streptomycin, and 10⁻⁵ dilution of SAC) in a total volume of 150 ul. Proliferation or inhibition is quantitated by a 20 h pulse (1 uCi/well) with 3H-thymidine (6.7 Ci/mM) beginning 72 h post factor addition. The positive and negative controls are IL2 and medium respectively.

[1059] In vivo Assay—BALB/c mice are injected (i.p.) twice per day with buffer only, or 2 mg/Kg of agonists or antagonists of the invention, or truncated forms thereof. Mice receive this treatment for 4 consecutive days, at which time they are sacrificed and various tissues and serum collected for analyses. Comparison of H&E sections from normal spleens and spleens treated with agonists or antagonists of the invention identify the results of the activity of the agonists or antagonists on spleen cells, such as the diffusion of peri-arterial lymphatic sheaths, and/or significant increases in the nucleated cellularity of the red pulp regions, which may indicate the activation of the differentiation and proliferation of B-cell populations. Immunohistochemical studies using a B cell marker, anti-CD45R(B220), are used to determine whether any physiological changes to splenic cells, such as splenic disorganization, are due to increased B-cell representation within loosely defined B-cell zones that infiltrate established T-cell regions.

[1060] Flow cytometric analyses of the spleens from mice treated with agonist or antagonist is used to indicate whether the agonists or antagonists specifically increases the proportion of ThB+, CD45R(B220)dull B cells over that which is observed in control mice.

[1061] Likewise, a predicted consequence of increased mature B-cell representation in vivo is a relative increase in serum Ig titers. Accordingly, serum IgM and IgA levels are compared between buffer and agonists or antagonists-treated mice.

[1062] The studies described in this example tested activity of agonists or antagonists of the invention. However, one skilled in the art could easily modify the exemplified studies to test the activity of polynucleotides or polypeptides of the invention (e.g., gene therapy).

### Example 22

### T Cell Proliferation Assay

[1063] A CD3-induced proliferation assay is performed on PBMCs and is measured by the uptake of ³H-thymidine. The assay is performed as follows. Ninety-six well plates are coated with 100 μl/well of mAb to CD3 (HIT3a, Pharmingen) or isotype-matched control mAb (B33.1) overnight 35 at 4 degrees C. (1 μg/ml in 0.05M bicarbonate buffer, pH 9.5), then washed three times with PBS. PBMC are isolated by F/H gradient centrifugation from human peripheral blood and added to quadruplicate wells (5×10⁴/well) of mAb coated plates in RPMI containing 10% FCS and P/S in the presence of varying concentrations of agonists or antagonists of the invention (total volume 200 ul). Relevant protein buffer and medium alone are controls. After 48 hr. culture at 37 degrees C., plates are spun for 2 min. at 1000 rpm and 100 μl of supernatant is removed and stored −20 degrees C. for measurement of IL-2 (or other cytokines) if effect on proliferation is observed. Wells are supplemented with 100 ul of medium containing 0.5 uCi of ³H-thymidine and cultured at 37 degrees C. for 18-24 hr. Wells are harvested and incorporation of ³H-thymidine used as a measure of proliferation. Anti-CD3 alone is the positive control for proliferation. IL-2 (100 U/ml) is also used as a control which enhances proliferation. Control antibody which does not induce proliferation of T cells is used as the negative control for the effects of agonists or antagonists of the invention.

[1064] The studies described in this example tested activity of agonists or antagonists of the invention. However, one skilled in the art could easily modify the exemplified studies to test the activity of polynucleotides or polypeptides of the invention (e.g., gene therapy).

### Example 23

### Effect of Agonists or Antagonists of the Invention on the Expression of MHC Class II, Costimulatory and Adhesion Molecules and Cell Differentiation of Monocytes and Monocyte-Derived Human Dendritic Cells

[1065] Dendritic cells are generated by the expansion of proliferating precursors found in the peripheral blood: adherent PBMC or elutriated monocytic fractions are cultured for 7-10 days with GM-CSF (50 ng/ml) and IL-4 (20 ng/ml). These dendritic cells have the characteristic phenotype of immature cells (expression of CD1, CD80, CD86, CD40 and MHC class II antigens). Treatment with activating factors, such as TNF-α, causes a rapid change in surface phenotype (increased expression of MHC class I and II, costimulatory and adhesion molecules, downregulation of FCγRII, upregulation of CD83). These changes correlate with increased antigen-presenting capacity and with functional maturation of the dendritic cells.

[1066] FACS analysis of surface antigens is performed as follows. Cells are treated 1-3 days with increasing concentrations of agonist or antagonist of the invention or LPS (positive control), washed with PBS containing 1% BSA and 0.02 mM sodium azide, and then incubated with 1:20 dilution of appropriate FITC- or PE-labeled monoclonal antibodies for 30 minutes at 4 degrees C. After an additional wash, the labeled cells are analyzed by flow cytometry on a FACScan (Becton Dickinson).

[1067] Effect on the production of cytokines. Cytokines generated by dendritic cells, in particular IL-12, are important in the initiation of T-cell dependent immune responses. IL-12 strongly influences the development of Th1 helper T-cell immune response, and induces cytotoxic T and NK cell function. An ELISA is used to measure the L-12 release as follows. Dendritic cells (10⁶/ml) are treated with increasing concentrations of agonists or antagonists of the invention for 24 hours. LPS (100 ng/ml) is added to the cell culture as positive control. Supernatants from the cell cultures are then collected and analyzed for IL-12 content using commercial ELISA kit (e.g., R & D Systems (Minneapolis, Minn.)). The standard protocols provided with the kits are used.

[1068] Effect on the expression of MHC Class IL costimulatory and adhesion molecules. Three major families of cell surface antigens can be identified on monocytes: adhesion molecules, molecules involved in antigen presentation, and Fc receptor. Modulation of the expression of MHC class II antigens and other costimulatory molecules, such as B7 and ICAM-1, may result in changes in the antigen presenting capacity of monocytes and ability to induce T cell activation. Increased expression of Fc receptors may correlate with improved monocyte cytotoxic activity, cytokine release and phagocytosis.

[1069] FACS analysis is used to examine the surface antigens as follows. Monocytes are treated 1-5 days with increasing concentrations of agonists or antagonists of the invention or LPS (positive control), washed with PBS containing 1% BSA and 0.02 mM sodium azide, and then incubated with 1:20 dilution of appropriate FITC- or PE-labeled monoclonal antibodies for 30 minutes at 4 degrees C. After an additional wash, the labeled cells are analyzed by flow cytometry on a FACScan (Becton Dickinson).

[1070] Monocyte activation and/or increased survival. Assays for molecules that activate (or alternatively, inactivate) monocytes and/or increase monocyte survival (or alternatively, decrease monocyte survival) are known in the art and may routinely be applied to determine whether a molecule of the invention functions as an inhibitor or activator of monocytes. Agonists or antagonists of the invention can be screened using the three assays described below. For each of these assays, Peripheral blood mononuclear cells (PBMC) are purified from single donor leukopacks (American Red Cross, Baltimore, Md.) by centrifugation through a Histopaque gradient (Sigma). Monocytes are isolated from PBMC by counterflow centrifugal elutriation.

[1071] Monocyte Survival Assay. Human peripheral blood monocytes progressively lose viability when cultured in absence of serum or other stimuli. Their death results from internally regulated processes (apoptosis). Addition to the culture of activating factors, such as TNF-alpha dramatically improves cell survival and prevents DNA fragmentation. Propidium iodide (PI) staining is used to measure apoptosis as follows. Monocytes are cultured for 48 hours in polypropylene tubes in serum-free medium (positive control), in the presence of 100 ng/ml TNF-alpha (negative control), and in the presence of varying concentrations of the compound to be tested. Cells are suspended at a concentration of 2×10⁶/ml in PBS containing PI at a final concentration of 5 μg/ml, and then incubated at room temperature for 5 minutes before FACScan analysis. PI uptake has been demonstrated to correlate with DNA fragmentation in this experimental paradigm.

[1072] Effect on cytokine release. An important function of monocytes/macrophages is their regulatory activity on other cellular populations of the immune system through the release of cytokines after stimulation. An ELISA to measure cytokine release is performed as follows. Human monocytes are incubated at a density of 5×10⁵ cells/ml with increasing concentrations of agonists or antagonists of the invention and under the same conditions, but in the absence of agonists or antagonists. For IL-12 production, the cells are primed overnight with IFN (100 U/ml) in the presence of agonist or antagonist of the invention. LPS (10 ng/ml) is then added. Conditioned media are collected after 24 h and kept frozen until use. Measurement of TNF-alpha, IL-10, MCP-1 and IL-8 is then performed using a commercially available ELISA kit (e.g., R & D Systems (Minneapolis, Minn.)) and applying the standard protocols provided with the kit.

[1073] Oxidative burst. Purified monocytes are plated in 96-w plate at 2-1×10⁵ cell/well. Increasing concentrations of agonists or antagonists of the invention are added to the wells in a total volume of 0.2 ml culture medium (RPMI 1640+10% FCS, glutamine and antibiotics). After 3 days incubation, the plates are centrifuged and the medium is removed from the wells. To the macrophage monolayers, 0.2 ml per well of phenol red solution (140 mM NaCl, 10 mM potassium phosphate buffer pH 7.0, 5.5 mM dextrose, 0.56 mM phenol red and 19 U/ml of HRPO) is added, together with the stimulant (200 nM PMA). The plates are incubated at 37° C. for 2 hours and the reaction is stopped by adding 20 μl 1N NaOH per well. The absorbance is read at 610 nm. To calculate the amount of H202 produced by the macrophages, a standard curve of a H202 solution of known molarity is performed for each experiment.

[1074] The studies described in this example tested activity of agonists or antagonists of the invention. However, one skilled in the art could easily modify the exemplified studies to test the activity of polynucleotides or polypeptides of the invention (e.g., gene therapy).

### Example 24

### Biological Effects of Agonists or Antagonists of the Invention

[1075] Astrocyte and Neuronal Assays

[1076] Agonists or antagonists of the invention, expressed in Escherichia coli and purified as described above, can be tested for activity in promoting the survival, neurite outgrowth, or phenotypic differentiation of cortical neuronal cells and for inducing the proliferation of glial fibrillary acidic protein immunopositive cells, astrocytes. The selection of cortical cells for the bioassay is based on the prevalent expression of FGF-1 and FGF-2 in cortical structures and on the previously reported enhancement of cortical neuronal survival resulting from FGF-2 treatment. A thymidine incorporation assay, for example, can be used to elucidate an agonist or antagonist of the invention's activity on these cells.

[1077] Moreover, previous reports describing the biological effects of FGF-2 (basic FGF) on cortical or hippocampal neurons in vitro have demonstrated increases in both neuron survival and neurite outgrowth (Walicke et al., “Fibroblast growth factor promotes survival of dissociated hippocampal neurons and enhances neurite extension.” Proc. Natl. Acad. Sci. USA 83:3012-3016. (1986), assay herein incorporated by reference in its entirety). However, reports from experiments done on PC-12 cells suggest that these two responses are not necessarily synonymous and may depend on not only which FGF is being tested but also on which receptor(s) are expressed on the target cells. Using the primary cortical neuronal culture paradigm, the ability of an agonist or antagonist of the invention to induce neurite outgrowth can be compared to the response achieved with FGF-2 using, for example, a thymidine incorporation assay.

[1078] Fibroblast and Endothelial Cell Assays

[1079] Human lung fibroblasts are obtained from Clonetics (San Diego, Calif.) and maintained in growth media from Clonetics. Dermal microvascular endothelial cells are obtained from Cell Applications (San Diego, Calif.). For proliferation assays, the human lung fibroblasts and dermal microvascular endothelial cells can be cultured at 5,000 cells/well in a 96-well plate for one day in growth medium. The cells are then incubated for one day in 0.1% BSA basal medium. After replacing the medium with fresh 0.1% BSA medium, the cells are incubated with the test proteins for 3 days. Alamar Blue (Alamar Biosciences, Sacramento, Calif.) is added to each well to a final concentration of 10%. The cells are incubated for 4 hr. Cell viability is measured by reading in a CytoFluor fluorescence reader. For the PGE₂ assays, the human lung fibroblasts are cultured at 5,000 cells/well in a 96-well plate for one day. After a medium change to 0.1% BSA basal medium, the cells are incubated with FGF-2 or agonists or antagonists of the invention with or without IL-1α for 24 hours. The supernatants are collected and assayed for PGE₂ by EIA kit (Cayman, Ann Arbor, Mich.). For the IL-6 assays, the human lung fibroblasts are cultured at 5,000 cells/well in a 96-well plate for one day. After a medium change to 0.1% BSA basal medium, the cells are incubated with FGF-2 or with or without agonists or antagonists of the invention L-1α for 24 hours. The supernatants are collected and assayed for IL-6 by ELISA kit (Endogen, Cambridge, Mass.).

[1080] Human lung fibroblasts are cultured with FGF-2 or agonists or antagonists of the invention for 3 days in basal medium before the addition of Alamar Blue to assess effects on growth of the fibroblasts. FGF-2 should show a stimulation at 10-2500 ng/ml which can be used to compare stimulation with agonists or antagonists of the invention.

[1081] Parkinson Models.

[1082] The loss of motor function in Parkinson's disease is attributed to a deficiency of striatal dopamine resulting from the degeneration of the nigrostriatal dopaminergic projection neurons. An animal model for Parkinson's that has been extensively characterized involves the systemic administration of 1-methyl-4 phenyl 1,2,3,6-tetrahydropyridine (MPTP). In the CNS, MPTP is taken-up by astrocytes and catabolized by monoamine oxidase B to 1-methyl-4-phenyl pyridine (MPP⁺) and released. Subsequently, MPP⁺ is actively accumulated in dopaminergic neurons by the high-affinity reuptake transporter for dopamine. MPP⁺ is then concentrated in mitochondria by the electrochemical gradient and selectively inhibits nicotidamide adenine disphosphate: ubiquinone oxidoreductionase (complex I), thereby interfering with electron transport and eventually generating oxygen radicals.

[1083] It has been demonstrated in tissue culture paradigms that FGF-2 (basic FGF) has trophic activity towards nigral dopaminergic neurons (Ferrari et al., Dev. Biol. 1989). Recently, Dr. Unsicker's group has demonstrated that administering FGF-2 in gel foam implants in the striatum results in the near complete protection of nigral dopaminergic neurons from the toxicity associated with MPTP exposure (Otto and Unsicker, J. Neuroscience, 1990).

[1084] Based on the data with FGF-2, agonists or antagonists of the invention can be evaluated to determine whether it has an action similar to that of FGF-2 in enhancing dopaminergic neuronal survival in vitro and it can also be tested in vivo for protection of dopaminergic neurons in the striatum from the damage associated with MPTP treatment. The potential effect of an agonist or antagonist of the invention is first examined in vitro in a dopaminergic neuronal cell culture paradigm. The cultures are prepared by dissecting the midbrain floor plate from gestation day 14 Wistar rat embryos. The tissue is dissociated with trypsin and seeded at a density of 200,000 cells/cm² on polyorthinine-laminin coated glass coverslips. The cells are maintained in Dulbecco's Modified Eagle's medium and F12 medium containing hormonal supplements (N1). The cultures are fixed with paraformaldehyde after 8 days in vitro and are processed for tyrosine hydroxylase, a specific marker for dopaminergic neurons, immunohistochemical staining. Dissociated cell cultures are prepared from embryonic rats. The culture medium is changed every third day and the factors are also added at that time.

[1085] Since the dopaminergic neurons are isolated from animals at gestation day 14, a developmental time which is past the stage when the dopaminergic precursor cells are proliferating, an increase in the number of tyrosine hydroxylase immunopositive neurons would represent an increase in the number of dopaminergic neurons surviving in vitro. Therefore, if an agonist or antagonist of the invention acts to prolong the survival of dopaminergic neurons, it would suggest that the agonist or antagonist may be involved in Parkinson's Disease.

[1086] The studies described in this example tested activity of agonists or antagonists of the invention. However, one skilled in the art could easily modify the exemplified studies to test the activity of polynucleotides or polypeptides of the invention (e.g., gene therapy).

### Example 25

### The Effect of Agonists or Antagonists of the Invention on the Growth of Vascular Endothelial Cells

[1087] On day 1, human umbilical vein endothelial cells (HUVEC) are seeded at 2-5×10⁴ cells/35 mm dish density in M199 medium containing 4% fetal bovine serum (FBS), 16 units/ml heparin, and 50 units/ml endothelial cell growth supplements (ECGS, Biotechnique, Inc.). On day 2, the medium is replaced with M199 containing 10% FBS, 8 units/ml heparin. An agonist or antagonist of the invention, and positive controls, such as VEGF and basic FGF (bFGF) are added, at varying concentrations. On days 4 and 6, the medium, is replaced. On day 8, cell number is determined with a Coulter Counter.

[1088] An increase in the number of HUVEC cells indicates that the compound of the invention may proliferate vascular endothelial cells, while a decrease in the number of HUVEC cells indicates that the compound of the invention inhibits vascular endothelial cells.

[1089] The studies described in this example tested activity of a polypeptide of the invention. However, one skilled in the art could easily modify the exemplified studies to test the activity of polynucleotides (e.g., gene therapy), agonists, and/or antagonists of the invention.

### Example 26

### Rat Corneal Wound Healing Model

[1090] This animal model shows the effect of an agonist or antagonist of the invention on neovascularization. The experimental protocol includes:

[1091] Making a 1-1.5 mm long incision from the center of cornea into the stromal layer.

[1092] Inserting a spatula below the lip of the incision facing the outer corner of the eye.

[1093] Making a pocket (its base is 1-1.5 mm form the edge of the eye).

[1094] Positioning a pellet, containing 50 ng-5 ug of an agonist or antagonist of the invention, within the pocket.

[1095] Treatment with an agonist or antagonist of the invention can also be applied topically to the corneal wounds in a dosage range of 20 mg-500 mg (daily treatment for five days).

[1096] The studies described in this example tested activity of agonists or antagonists of the invention. However, one skilled in the art could easily modify the exemplified studies to test the activity of polynucleotides or polypeptides of the invention (e.g., gene therapy).

### Example 27

### Diabetic Mouse and Glucocorticoid-Impaired Wound Healing Models

[1097] Diabetic db+/db+ Mouse Model

[1098] To demonstrate that an agonist or antagonist of the invention accelerates the healing process, the genetically diabetic mouse model of wound healing is used. The full thickness wound healing model in the db+/db+ mouse is a well characterized, clinically relevant and reproducible model of impaired wound healing. Healing of the diabetic wound is dependent on formation of granulation tissue and re-epithelialization rather than contraction (Gartner, M. H. et al., J. Surg. Res. 52:389 (1992); Greenhalgh, D. G. et al., Am. J. Pathol. 136:1235 (1990)).

[1099] The diabetic animals have many of the characteristic features observed in Type II diabetes mellitus. Homozygous (db+/db+) mice are obese in comparison to their normal heterozygous (db+/+m) littermates. Mutant diabetic (db+/db+) mice have a single autosomal recessive mutation on chromosome 4 (db+) (Coleman et al. Proc. Natl. Acad. Sci. USA 77:283-293 (1982)). Animals show polyphagia, polydipsia and polyuria. Mutant diabetic mice (db+/db+) have elevated blood glucose, increased or normal insulin levels, and suppressed cell-mediated immunity (Mandel et al., J. Immunol. 120:1375 (1978); Debray-Sachs, M. et al., Clin. Exp. Immunol. 51(1):1-7 (1983); Leiter et al., Am. J. of Pathol. 114:46-55 (1985)). Peripheral neuropathy, myocardial complications, and microvascular lesions, basement membrane thickening and glomerular filtration abnormalities have been described in these animals (Norido, F. et al., Exp. Neurol. 83(2):221-232 (1984); Robertson et al., Diabetes 29(1):60-67 (1980); Giacomelli et al., Lab Invest. 40(4):460-473 (1979); Coleman, D. L., Diabetes 31 (Suppl):1-6 (1982)). These homozygous diabetic mice develop hyperglycemia that is resistant to insulin analogous to human type II diabetes (Mandel et al., J. Immunol. 120:1375-1377 (1978)).

[1100] The characteristics observed in these animals suggests that healing in this model may be similar to the healing observed in human diabetes (Greenhalgh, et al., Am. J. of Pathol. 136:1235-1246 (1990)).

[1101] Genetically diabetic female C57BL/KsJ (db+/db+) mice and their non-diabetic (db+/+m) heterozygous littermates are used in this study (Jackson Laboratories). The animals are purchased at 6 weeks of age and are 8 weeks old at the beginning of the study. Animals are individually housed and received food and water ad libitum. All manipulations are performed using aseptic techniques. The experiments are conducted according to the rules and guidelines of Human Genome Sciences, Inc. Institutional Animal Care and Use Committee and the Guidelines for the Care and Use of Laboratory Animals.

[1102] Wounding protocol is performed according to previously reported methods (Tsuboi, R. and Rifkin, D. B., J. Exp. Med. 172:245-251 (1990)). Briefly, on the day of wounding, animals are anesthetized with an intraperitoneal injection of Avertin (0.01 mg/mL), 2,2,2-tribromoethanol and 2-methyl-2-butanol dissolved in deionized water. The dorsal region of the animal is shaved and the skin washed with 70% ethanol solution and iodine. The surgical area is dried with sterile gauze prior to wounding. An 8 mm full-thickness wound is then created using a Keyes tissue punch. Immediately following wounding, the surrounding skin is gently stretched to eliminate wound expansion. The wounds are left open for the duration of the experiment. Application of the treatment is given topically for 5 consecutive days commencing on the day of wounding. Prior to treatment, wounds are gently cleansed with sterile saline and gauze sponges.

[1103] Wounds are visually examined and photographed at a fixed distance at the day of surgery and at two day intervals thereafter. Wound closure is determined by daily measurement on days 1-5 and on day 8. Wounds are measured horizontally and vertically using a calibrated Jameson caliper. Wounds are considered healed if granulation tissue is no longer visible and the wound is covered by a continuous epithelium.

[1104] An agonist or antagonist of the invention is administered using at a range different doses, from 4 mg to 500 mg per wound per day for 8 days in vehicle. Vehicle control groups received 50 mL of vehicle solution.

[1105] Animals are euthanized on day 8 with an intraperitoneal injection of sodium pentobarbital (300 mg/kg). The wounds and surrounding skin are then harvested for histology and immunohistochemistry. Tissue specimens are placed in 10% neutral buffered formalin in tissue cassettes between biopsy sponges for further processing.

[1106] Three groups of 10 animals each (5 diabetic and 5 non-diabetic controls) are evaluated: 1) Vehicle placebo control, 2) untreated group, and 3) treated group.

[1107] Wound closure is analyzed by measuring the area in the vertical and horizontal axis and obtaining the total square area of the wound. Contraction is then estimated by establishing the differences between the initial wound area (day 0) and that of post treatment (day 8). The wound area on day 1 is 64 mm², the corresponding size of the dermal punch. Calculations are made using the following formula:
[Open area on day 8]−[Open area on day 1]/[Open area on day 1]

[1108] Specimens are fixed in 10% buffered formalin and paraffin embedded blocks are sectioned perpendicular to the wound surface (5 mm) and cut using a Reichert-Jung microtome. Routine hematoxylin-eosin (H&E) staining is performed on cross-sections of bisected wounds. Histologic examination of the wounds are used to assess whether the healing process and the morphologic appearance of the repaired skin is altered by treatment with an agonist or antagonist of the invention. This assessment included verification of the presence of cell accumulation, inflammatory cells, capillaries, fibroblasts, re-epithelialization and epidermal maturity (Greenhalgh, D. G. et al., Am. J. Pathol. 136:1235 (1990)). A calibrated lens micrometer is used by a blinded observer.

[1109] Tissue sections are also stained immunohistochemically with a polyclonal rabbit anti-human keratin antibody using ABC Elite detection system. Human skin is used as a positive tissue control while non-immune IgG is used as a negative control. Keratinocyte growth is determined by evaluating the extent of reepithelialization of the wound using a calibrated lens micrometer.

[1110] Proliferating cell nuclear antigen/cyclin (PCNA) in skin specimens is demonstrated by using anti-PCNA antibody (1:50) with an ABC Elite detection system. Human colon cancer served as a positive tissue control and human brain tissue is used as a negative tissue control. Each specimen included a section with omission of the primary antibody and substitution with non-immune mouse IgG. Ranking of these sections is based on the extent of proliferation on a scale of 0-8, the lower side of the scale reflecting slight proliferation to the higher side reflecting intense proliferation.

[1111] Experimental data are analyzed using an unpaired t test. A p value of <0.05 is considered significant.

[1112] Steroid Impaired Rat Model

[1113] The inhibition of wound healing by steroids has been well documented in various in vitro and in vivo systems (Wahl, Glucocorticoids and Wound healing. In: Anti-Inflammatory Steroid Action: Basic and Clinical Aspects. 280-302 (1989); Wahl et al., J. Immunol. 115: 476-481 (1975); Werb et al., J. Exp. Med. 147:1684-1694 (1978)). Glucocorticoids retard wound healing by inhibiting angiogenesis, decreasing vascular permeability (Ebert et al., An. Intern. Med. 37:701-705 (1952)), fibroblast proliferation, and collagen synthesis (Beck et al., Growth Factors. 5: 295-304 (1991); Haynes et al., J. Clin. Invest. 61: 703-797 (1978)) and producing a transient reduction of circulating monocytes (Haynes et al., J. Clin. Invest. 61: 703-797 (1978); Wahl, “Glucocorticoids and wound healing”, In: Antiinflammatory Steroid Action: Basic and Clinical Aspects, Academic Press, New York, pp. 280-302 (1989)). The systemic administration of steroids to impaired wound healing is a well establish phenomenon in rats (Beck et al., Growth Factors. 5: 295-304 (1991); Haynes et al., J. Clin. Invest. 61: 703-797 (1978); Wahl, “Glucocorticoids and wound healing”, In: Antiinflammatory Steroid Action: Basic and Clinical Aspects, Academic Press, New York, pp. 280-302 (1989); Pierce et al., Proc. Natl. Acad. Sci. USA 86: 2229-2233 (1989)).

[1114] To demonstrate that an agonist or antagonist of the invention can accelerate the healing process, the effects of multiple topical applications of the agonist or antagonist on full thickness excisional skin wounds in rats in which healing has been impaired by the systemic administration of methylprednisolone is assessed.

[1115] Young adult male Sprague Dawley rats weighing 250-300 g (Charles River Laboratories) are used in this example. The animals are purchased at 8 weeks of age and are 9 weeks old at the beginning of the study. The healing response of rats is impaired by the systemic administration of methylprednisolone (17 mg/kg/rat intramuscularly) at the time of wounding. Animals are individually housed and received food and water ad libitum. All manipulations are performed using aseptic techniques. This study is conducted according to the rules and guidelines of Human Genome Sciences, Inc. Institutional Animal Care and Use Committee and the Guidelines for the Care and Use of Laboratory Animals.

[1116] The wounding protocol is followed according to section A, above. On the day of wounding, animals are anesthetized with an intramuscular injection of ketamine (50 mg/kg) and xylazine (5 mg/kg). The dorsal region of the animal is shaved and the skin washed with 70% ethanol and iodine solutions. The surgical area is dried with sterile gauze prior to wounding. An 8 mm full-thickness wound is created using a Keyes tissue punch. The wounds are left open for the duration of the experiment. Applications of the testing materials are given topically once a day for 7 consecutive days commencing on the day of wounding and subsequent to methylprednisolone administration. Prior to treatment, wounds are gently cleansed with sterile saline and gauze sponges.

[1117] Wounds are visually examined and photographed at a fixed distance at the day of wounding and at the end of treatment. Wound closure is determined by daily measurement on days 1-5 and on day 8. Wounds are measured horizontally and vertically using a calibrated Jameson caliper. Wounds are considered healed if granulation tissue is no longer visible and the wound is covered by a continuous epithelium.

[1118] The agonist or antagonist of the invention is administered using at a range different doses, from 4 mg to 500 mg per wound per day for 8 days in vehicle. Vehicle control groups received 50 mL of vehicle solution.

[1119] Animals are euthanized on day 8 with an intraperitoneal injection of sodium pentobarbital (300 mg/kg). The wounds and surrounding skin are then harvested for histology. Tissue specimens are placed in 10% neutral buffered formalin in tissue cassettes between biopsy sponges for further processing.

[1120] Three groups of 10 animals each (5 with methylprednisolone and 5 without glucocorticoid) are evaluated: 1) Untreated group 2) Vehicle placebo control 3) treated groups.

[1121] Wound closure is analyzed by measuring the area in the vertical and horizontal axis and obtaining the total area of the wound. Closure is then estimated by establishing the differences between the initial wound area (day 0) and that of post treatment (day 8). The wound area on day 1 is 64 mm², the corresponding size of the dermal punch. Calculations are made using the following formula:
[Open area on day 8]−[Open area on day 1]/[Open area on day 1]

[1122] Specimens are fixed in 10% buffered formalin and paraffin embedded blocks are sectioned perpendicular to the wound surface (5 mm) and cut using an Olympus microtome. Routine hematoxylin-eosin (H&E) staining is performed on cross-sections of bisected wounds. Histologic examination of the wounds allows assessment of whether the healing process and the morphologic appearance of the repaired skin is improved by treatment with an agonist or antagonist of the invention. A calibrated lens micrometer is used by a blinded observer to determine the distance of the wound gap.

[1123] Experimental data are analyzed using an unpaired t test. A p value of <0.05 is considered significant.

[1124] The studies described in this example tested activity of agonists or antagonists of the invention. However, one skilled in the art could easily modify the exemplified studies to test the activity of polynucleotides or polypeptides of the invention (e.g., gene therapy).

### Example 28

### Lymphadema Animal Model

[1125] The purpose of this experimental approach is to create an appropriate and consistent lymphedema model for testing the therapeutic effects of an agonist or antagonist of the invention in lymphangiogenesis and re-establishment of the lymphatic circulatory system in the rat hind limb. Effectiveness is measured by swelling volume of the affected limb, quantification of the amount of lymphatic vasculature, total blood plasma protein, and histopathology. Acute lymphedema is observed for 7-10 days. Perhaps more importantly, the chronic progress of the edema is followed for up to 3-4 weeks.

[1126] Prior to beginning surgery, blood sample is drawn for protein concentration analysis. Male rats weighing approximately ˜350 g are dosed with Pentobarbital. Subsequently, the right legs are shaved from knee to hip. The shaved area is swabbed with gauze soaked in 70% EtOH. Blood is drawn for serum total protein testing. Circumference and volumetric measurements are made prior to injecting dye into paws after marking 2 measurement levels (0.5 cm above heel, at mid-pt of dorsal paw). The intradermal dorsum of both right and left paws are injected with 0.05 ml of 1% Evan's Blue. Circumference and volumetric measurements are then made following injection of dye into paws.

[1127] Using the knee joint as a landmark, a mid-leg inguinal incision is made circumferentially allowing the femoral vessels to be located. Forceps and hemostats are used to dissect and separate the skin flaps. After locating the femoral vessels, the lymphatic vessel that runs along side and underneath the vessel(s) is located. The main lymphatic vessels in this area are then electrically coagulated or suture ligated.

[1128] Using a microscope, muscles in back of the leg (near the semitendinosis and adductors) are bluntly dissected. The popliteal lymph node is then located. The 2 proximal and 2 distal lymphatic vessels and distal blood supply of the popliteal node are then ligated by suturing. The popliteal lymph node, and any accompanying adipose tissue, is then removed by cutting connective tissues.

[1129] Care is taken to control any mild bleeding resulting from this procedure. After lymphatics are occluded, the skin flaps are sealed by using liquid skin (Vetbond) (AJ Buck). The separated skin edges are sealed to the underlying muscle tissue while leaving a gap of 0.5 cm around the leg. Skin also may be anchored by suturing to underlying muscle when necessary.

[1130] To avoid infection, animals are housed individually with mesh (no bedding). Recovering animals are checked daily through the optimal edematous peak, which typically occurred by day 5-7. The plateau edematous peak are then observed. To evaluate the intensity of the lymphedema, the circumference and volumes of 2 designated places on each paw before operation and daily for 7 days are measured. The effect of plasma proteins on lymphedema is determined and whether protein analysis is a useful testing perimeter is also investigated. The weights of both control and edematous limbs are evaluated at 2 places. Analysis is performed in a blind manner.

[1131] Circumference Measurements: Under brief gas anesthetic to prevent limb movement, a cloth tape is used to measure limb circumference. Measurements are done at the ankle bone and dorsal paw by 2 different people and those 2 readings are averaged. Readings are taken from both control and edematous limbs.

[1132] Volumetric Measurements: On the day of surgery, animals are anesthetized with Pentobarbital and are tested prior to surgery. For daily volumetrics animals are under brief halothane anesthetic (rapid immobilization and quick recovery), and both legs are shaved and equally marked using waterproof marker on legs. Legs are first dipped in water, then dipped into instrument to each marked level then measured by Buxco edema software(Chen/Victor). Data is recorded by one person, while the other is dipping the limb to marked area.

[1133] Blood-plasma protein measurements: Blood is drawn, spun, and serum separated prior to surgery and then at conclusion for total protein and Ca2⁺ comparison.

[1134] Limb Weight Comparison: After drawing blood, the animal is prepared for tissue collection. The limbs are amputated using a quillitine, then both experimental and control legs are cut at the ligature and weighed. A second weighing is done as the tibio-cacaneal joint is disarticulated and the foot is weighed.

[1135] Histological Preparations: The transverse muscle located behind the knee (popliteal) area is dissected and arranged in a metal mold, filled with freezeGel, dipped into cold methylbutane, placed into labeled sample bags at −80 EC until sectioning. Upon sectioning, the muscle is observed under fluorescent microscopy for lymphatics.

[1136] The studies described in this example tested activity of agonists or antagonists of the invention. However, one skilled in the art could easily modify the exemplified studies to test the activity of polynucleotides or polypeptides of the invention (e.g., gene therapy).

### Example 29

### Suppression of TNF Alpha-Induced Adhesion Molecule Expression by an Agonist or Antagonist of the Invention

[1137] The recruitment of lymphocytes to areas of inflammation and angiogenesis involves specific receptor-ligand interactions between cell surface adhesion molecules (CAMs) on lymphocytes and the vascular endothelium. The adhesion process, in both normal and pathological settings, follows a multi-step cascade that involves intercellular adhesion molecule-1 (ICAM-1), vascular cell adhesion molecule-1 (VCAM-1), and endothelial leukocyte adhesion molecule-1 (E-selectin) expression on endothelial cells (EC). The expression of these molecules and others on the vascular endothelium determines the efficiency with which leukocytes may adhere to the local vasculature and extravasate into the local tissue during the development of an inflammatory response. The local concentration of cytokines and growth factor participate in the modulation of the expression of these CAMs.

[1138] Tumor necrosis factor alpha (TNF-a), a potent proinflammatory cytokine, is a stimulator of all three CAMs on endothelial cells and may be involved in a wide variety of inflammatory responses, often resulting in a pathological outcome.

[1139] The potential of an agonist or antagonist of the invention to mediate a suppression of TNF-a induced CAM expression can be examined. A modified ELISA assay which uses ECs as a solid phase absorbent is employed to measure the amount of CAM expression on TNF-a treated ECs when co-stimulated with a member of the FGF family of proteins.

[1140] To perform the experiment, human umbilical vein endothelial cell (HUVEC) cultures are obtained from pooled cord harvests and maintained in growth medium (EGM-2; Clonetics, San Diego, Calif.) supplemented with 10% FCS and 1% penicillin/streptomycin in a 37 degree C. humidified incubator containing 5% CO₂. HUVECs are seeded in 96-well plates at concentrations of 1×10⁴ cells/well in EGM medium at 37 degree C. for 18-24 hrs or until confluent. The monolayers are subsequently washed 3 times with a serum-free solution of RPMI-1640 supplemented with 100 U/ml penicillin and 100 mg/ml streptomycin, and treated with a given cytokine and/or growth factor(s) for 24 h at 37 degree C. Following incubation, the cells are then evaluated for CAM expression.

[1141] Human Umbilical Vein Endothelial cells (HUVECs) are grown in a standard 96 well plate to confluence. Growth medium is removed from the cells and replaced with 90 ul of 199 Medium (10% FBS). Samples for testing and positive or negative controls are added to the plate in triplicate (in 10 ul volumes). Plates are incubated at 37 degree C. for either 5 h (selectin and integrin expression) or 24 h (integrin expression only). Plates are aspirated to remove medium and 100 μl of 0.1% paraformaldehyde-PBS (with Ca++ and Mg++) is added to each well. Plates are held at 4° C. for 30 min.

[1142] Fixative is then removed from the wells and wells are washed 1× with PBS(+Ca,Mg)+0.5% BSA and drained. Do not allow the wells to dry. Add 10 μl of diluted primary antibody to the test and control wells. Anti-ICAM-1-Biotin, Anti-VCAM-1-Biotin and Anti-E-selectin-Biotin are used at a concentration of 10 μg/ml (1:10 dilution of 0.1 mg/ml stock antibody). Cells are incubated at 37° C. for 30 min. in a humidified environment. Wells are washed ×3 with PBS(+Ca,Mg)+0.5% BSA.

[1143] Then add 20 μl of diluted ExtrAvidin-Alkaline Phosphotase (1:5,000 dilution) to each well and incubated at 37° C. for 30 min. Wells are washed X3 with PBS(+Ca,Mg)+0.5% BSA. 1 tablet of p-Nitrophenol Phosphate pNPP is dissolved in 5 ml of glycine buffer (pH 10.4). 100 μl of pNPP substrate in glycine buffer is added to each test well. Standard wells in triplicate are prepared from the working dilution of the ExtrAvidin-Alkaline Phosphotase in glycine buffer: 1:5,000 (10⁰)>10^{-0.5}>10⁻¹>10^{-1.5}. 5 μl of each dilution is added to triplicate wells and the resulting AP content in each well is 5.50 ng, 1.74 ng, 0.55 ng, 0.18 ng. 100 μl of pNNP reagent must then be added to each of the standard wells. The plate must be incubated at 37° C. for 4 h. A volume of 50 μl of 3M NaOH is added to all wells. The results are quantified on a plate reader at 405 nm. The background subtraction option is used on blank wells filled with glycine buffer only. The template is set up to indicate the concentration of AP-conjugate in each standard well [5.50 ng; 1.74 ng; 0.55 ng; 0.18 ng]. Results are indicated as amount of bound AP-conjugate in each sample.

[1144] The studies described in this example tested activity of agonists or antagonists of the invention. However, one skilled in the art could easily modify the exemplified studies to test the activity of polynucleotides or polypeptides of the invention (e.g., gene therapy).

### Example 30

### Production of Polypeptide of the Invention for High-Throughput Screening Assays

[1145] The following protocol produces a supernatant containing polypeptide of the present invention to be tested. This supernatant can then be used in the Screening Assays described in Examples 32-41.

[1146] First, dilute Poly-D-Lysine (644 587 Boehringer-Mannheim) stock solution (1 mg/ml in PBS) 1:20 in PBS (w/o calcium or magnesium 17-516F Biowhittaker) for a working solution of 50 ug/ml. Add 200 ul of this solution to each well (24 well plates) and incubate at RT for 20 minutes. Be sure to distribute the solution over each well (note: a 12-channel pipetter may be used with tips on every other channel). Aspirate off the Poly-D-Lysine solution and rinse with 1 ml PBS (Phosphate Buffered Saline). The PBS should remain in the well until just prior to plating the cells and plates may be poly-lysine coated in advance for up to two weeks.

[1147] Plate 293T cells (do not carry cells past P+20) at 2×10⁵ cells/well in 0.5 ml DMEM (Dulbecco's Modified Eagle Medium)(with 4.5 G/L glucose and L-glutamine (12-604F Biowhittaker))/10% heat inactivated FBS (14-503F Biowhittaker)/1× Penstrep (17-602E Biowhittaker). Let the cells grow overnight.

[1148] The next day, mix together in a sterile solution basin: 300 ul Lipofectamine (18324-012 Gibco/BRL) and 5 ml Optimem I (31985070 Gibco/BRL)/96-well plate. With a small volume multi-channel pipetter, aliquot approximately 2 ug of an expression vector containing a polynucleotide insert, produced by the methods described in Examples 8-10, into an appropriately labeled 96-well round bottom plate. With a multi-channel pipetter, add 50 ul of the Lipofectamine/Optimem I mixture to each well. Pipette up and down gently to mix. Incubate at RT 15-45 minutes. After about 20 minutes, use a multi-channel pipetter to add 150 ul Optimem I to each well. As a control, one plate of vector DNA lacking an insert should be transfected with each set of transfections.

[1149] Preferably, the transfection should be performed by tag-teaming the following tasks. By tag-teaming, hands on time is cut in half, and the cells do not spend too much time on PBS. First, person A aspirates off the media from four 24-well plates of cells, and then person B rinses each well with 0.5-1 ml PBS. Person A then aspirates off PBS rinse, and person B, using a 12-channel pipetter with tips on every other channel, adds the 200 ul of DNA/Lipofectamine/Optimem I complex to the odd wells first, then to the even wells, to each row on the 24-well plates. Incubate at 37 degree C. for 6 hours.

[1150] While cells are incubating, prepare appropriate media, either 1% BSA in DMEM with 1× penstrep, or HGS CHO-5 media (116.6 mg/L of CaCl2 (anhyd); 0.00130 mg/L CuSO₄-5H₂O; 0.050 mg/L of Fe(NO₃)₃-9H₂O; 0.417 mg/L of FeSO₄-7H₂O; 311.80 mg/L of Kcl; 28.64 mg/L of MgCl₂; 48.84 mg/L of MgSO₄; 6995.50 mg/L of NaCl; 2400.0 mg/L of NaHCO₃; 62.50 mg/L of NaH₂PO₄—H₂O; 71.02 mg/L of Na₂HPO4; 0.4320 mg/L of ZnSO₄-7H₂O; 0.002 mg/L of Arachidonic Acid; 1.022 mg/L of Cholesterol; 0.070 mg/L of DL-alpha-Tocopherol-Acetate; 0.0520 mg/L of Linoleic Acid; 0.010 mg/L of Linolenic Acid; 0.010 mg/L of Myristic Acid; 0.010 mg/L of Oleic Acid; 0.010 mg/L of Palmitric Acid; 0.010 mg/L of Palmitic Acid; 100 mg/L of Pluronic F-68; 0.010 mg/L of Stearic Acid; 2.20 mg/L of Tween 80; 4551 mg/L of D-Glucose; 130.85 mg/ml of L-Alanine; 147.50 mg/ml of L-Arginine-HCL; 7.50 mg/ml of L-Asparagine-H₂O; 6.65 mg/ml of L-Aspartic Acid; 29.56 mg/ml of L-Cystine-2HCL-H₂O; 31.29 mg/ml of L-Cystine-2HCL; 7.35 mg/ml of L-Glutamic Acid; 365.0 mg/ml of L-Glutamine; 18.75 mg/ml of Glycine; 52.48 mg/ml of L-Histidine-HCL-H₂O; 106.97 mg/ml of L-Isoleucine; 111.45 mg/ml of L-Leucine; 163.75 mg/ml of L-Lysine HCL; 32.34 mg/ml of L-Methionine; 68.48 mg/ml of L-Phenylalainine; 40.0 mg/ml of L-Proline; 26.25 mg/ml of L-Serine; 101.05 mg/ml of L-Threonine; 19.22 mg/ml of L-Tryptophan; 91.79 mg/ml of L-Tryrosine-2Na-2H₂O; and 99.65 mg/ml of L-Valine; 0.0035 mg/L of Biotin; 3.24 mg/L of D-Ca Pantothenate; 11.78 mg/L of Choline Chloride; 4.65 mg/L of Folic Acid; 15.60 mg/L of i-Inositol; 3.02 mg/L of Niacinamide; 3.00 mg/L of Pyridoxal HCL; 0.031 mg/L of Pyridoxine HCL; 0.319 mg/L of Riboflavin; 3.17 mg/L of Thiamine HCL; 0.365 mg/L of Thymidine; 0.680 mg/L of Vitamin B₁₂; 25 mM of HEPES Buffer; 2.39 mg/L of Na Hypoxanthine; 0.105 mg/L of Lipoic Acid; 0.081 mg/L of Sodium Putrescine-2HCL; 55.0 mg/L of Sodium Pyruvate; 0.0067 mg/L of Sodium Selenite; 20 uM of Ethanolamine; 0.122 mg/L of Ferric Citrate; 41.70 mg/L of Methyl-B-Cyclodextrin complexed with Linoleic Acid; 33.33 mg/L of Methyl-B-Cyclodextrin complexed with Oleic Acid; 10 mg/L of Methyl-B-Cyclodextrin complexed with Retinal Acetate. Adjust osmolarity to 327 mOsm) with 2 mm glutamine and 1× penstrep. (BSA (81-068-3 Bayer) 100 gm dissolved in 1 L DMEM for a 10% BSA stock solution). Filter the media and collect 50 ul for endotoxin assay in 15 ml polystyrene conical.

[1151] The transfection reaction is terminated, preferably by tag-teaming, at the end of the incubation period. Person A aspirates off the transfection media, while person B adds 1.5 ml appropriate media to each well. Incubate at 37 degree C. for 45 or 72 hours depending on the media used: 1% BSA for 45 hours or CHO-5 for 72 hours.

[1152] On day four, using a 300 ul multichannel pipetter, aliquot 600 ul in one 1 ml deep well plate and the remaining supernatant into a 2 ml deep well. The supernatants from each well can then be used in the assays described in Examples 32-39.

[1153] It is specifically understood that when activity is obtained in any of the assays described below using a supernatant, the activity originates from either the polypeptide of the present invention directly (e.g., as a secreted protein) or by polypeptide of the present invention inducing expression of other proteins, which are then secreted into the supernatant. Thus, the invention further provides a method of identifying the protein in the supernatant characterized by an activity in a particular assay.

### Example 31

### Construction of GAS Reporter Construct

[1154] One signal transduction pathway involved in the differentiation and proliferation of cells is called the Jaks-STATs pathway. Activated proteins in the Jaks-STATs pathway bind to gamma activation site “GAS” elements or interferon-sensitive responsive element (“ISRE”), located in the promoter of many genes. The binding of a protein to these elements alter the expression of the associated gene.

[1155] GAS and ISRE elements are recognized by a class of transcription factors called Signal Transducers and Activators of Transcription, or “STATs.” There are six members of the STATs family. Stat1 and Stat3 are present in many cell types, as is Stat2 (as response to IFN-alpha is widespread). Stat4 is more restricted and is not in many cell types though it has been found in T helper class I, cells after treatment with IL-12. Stat5 was originally called mammary growth factor, but has been found at higher concentrations in other cells including myeloid cells. It can be activated in tissue culture cells by many cytokines.

[1156] The STATs are activated to translocate from the cytoplasm to the nucleus upon tyrosine phosphorylation by a set of kinases known as the Janus Kinase (“Jaks”) family. Jaks represent a distinct family of soluble tyrosine kinases and include Tyk2, Jak1, Jak2, and Jak3. These kinases display significant sequence similarity and are generally catalytically inactive in resting cells.

[1157] The Jaks are activated by a wide range of receptors summarized in the Table below. (Adapted from review by Schidler and Damell, Ann. Rev. Biochem. 64:621-51 (1995)). A cytokine receptor family, capable of activating Jaks, is divided into two groups: (a) Class I includes receptors for IL-2, IL-3, IL-4, IL-6, IL-7, IL-9, IL-11, IL-12, IL-15, Epo, PRL, GH, G-CSF, GM-CSF, LIF, CNTF, and thrombopoietin; and (b) Class 2 includes IFN-a, IFN-g, and IL-10. The Class I receptors share a conserved cysteine motif (a set of four conserved cysteines and one tryptophan) and a WSXWS motif (a membrane proximal region encoding Trp-Ser-Xaa-Trp-Ser (SEQ ID NO: 2)).

[1158] Thus, on binding of a ligand to a receptor, Jaks are activated, which in turn activate STATs, which then translocate and bind to GAS elements. This entire process is encompassed in the Jaks-STATs signal transduction pathway. Therefore, activation of the Jaks-STATs pathway, reflected by the binding of the GAS or the ISRE element, can be used to indicate proteins involved in the proliferation and differentiation of cells. For example, growth factors and cytokines are known to activate the Jaks-STATs pathway (See Table below). Thus, by using GAS elements linked to reporter molecules, activators of the Jaks-STATs pathway can be identified.

| | JAKs | | | | | |
|---|---|---|---|---|---|---|
| Ligand | tyk2 | Jak1 | Jak2 | Jak3 | STATS | GAS(elements) or ISRE |
| IFN family | | | | | | |
| IFN-a/B | + | + | − | − | 1, 2, 3 | ISRE |
| IFN-g | | + | + | − | 1 | GAS (IRF1 > Lys6 > IFP) |
| Il-10 | + | ? | ? | − | 1, 3 | |
| gp130 family | | | | | | |
| IL-6 (Pleiotropic) | + | + | + | ? | 1, 3 | GAS (IRF1 > Lys6 > IFP) |
| Il-11 (Pleiotropic) | ? | + | ? | ? | 1, 3 | |
| OnM (Pleiotropic) | ? | + | + | ? | 1, 3 | |
| LIF (Pleiotropic) | ? | + | + | ? | 1, 3 | |
| CNTF (Pleiotropic) | −/+ | + | + | ? | 1, 3 | |
| G-CSF (Pleiotropic) | ? | + | ? | ? | 1, 3 | |
| IL-12 (Pleiotropic) | + | − | + | + | 1, 3 | |
| g-C family | | | | | | |
| IL-2 (lymphocytes) | − | + | − | + | 1, 3, 5 | GAS |
| IL-4 (lymph/myeloid) | − | + | − | + | 6 | GAS (IRF1 = IFP >> Ly6) |
| | | | | | | (IgH) |
| IL-7 (lymphocytes) | − | + | − | + | 5 | GAS |
| IL-9 (lymphocytes) | − | + | − | + | 5 | GAS |
| IL-13 (lymphocyte) | − | + | ? | ? | 6 | GAS |
| IL-15 | ? | + | ? | + | 5 | GAS |
| gp140 family | | | | | | |
| IL-3 (myeloid) | − | − | + | − | 5 | GAS |
| | | | | | | (IRF1 > IFP >> Ly6) |
| IL-5 (myeloid) | − | − | + | − | 5 | GAS |
| GM-CSF (myeloid) | − | − | + | − | 5 | GAS |
| Growth hormone family | | | | | | |
| GH | ? | − | + | − | 5 | |
| PRL | ? | +/− | + | − | 1, 3, 5 | |
| EPO | ? | − | + | − | 5 | GAS(B- |
| | | | | | | CAS > IRF1 = IFP >> Ly6) |
| Receptor Tyrosine Kinases | | | | | | |
| EGF | ? | + | + | − | 1, 3 | GAS (IRF1) |
| PDGF | ? | + | + | − | 1, 3 | |
| CSF-1 | ? | + | + | − | 1, 3 | GAS (not IRF1) |

[1159] To construct a synthetic GAS containing promoter element, which is used in the Biological Assays described in Examples 32-33, a PCR based strategy is employed to generate a GAS-SV40 promoter sequence. The 5′ primer contains four tandem copies of the GAS binding site found in the IRF1 promoter and previously demonstrated to bind STATs upon induction with a range of cytokines (Rothman et al., Immunity 1:457-468 (1994).), although other GAS or ISRE elements can be used instead. The 5′ primer also contains 18 bp of sequence complementary to the SV40 early promoter sequence and is flanked with an XhoI site. The sequence of the 5′ primer is:

(SEQ ID NO: 3)

5′:GCGCCTCGAGATTTCCCCGAAATCTAGATTTCCCCGAAATGATTTCC
CCGAAATGATTTCCCCGAAATATCTGCCATCTCAATTAG:3′

[1160] The downstream primer is complementary to the SV40 promoter and is flanked with a

(SEQ ID NO: 4)

Hind III site: 5′:GCGGCAAGCTTTTTGCAAAGCCTAGGC:3′

[1161] PCR amplification is performed using the SV40 promoter template present in the B-gal:promoter plasmid obtained from Clontech. The resulting PCR fragment is digested with XhoI/Hind III and subcloned into BLSK2-. (Stratagene.) Sequencing with forward and reverse primers confirms that the insert contains the following sequence:

(SEQ ID NO: 5)

5′:CTCGAGATTTCCCCGAAATCTAGATTTCCCCGAAATGATTTCCCCGA
AATGATTTCCCCGAAATATCTGCCATCTCAATTAGTCAGCAACCATAGTC
CCGCCCCTAACTCCGCCCATCCCGCCCCTAACTCCGCCCAGTTCCGCCCA
TTCTCCGCCCCATGGCTGACTAATTTTTTTTATTTATGCAGAGGCCGAGG
CCGCCTCGGCCTCTGAGCTATTCCAGAAGTAGTGAGGAGGCTTTTTTGGA
GGCCTAGGCTTTTGCAAAAAGCTT:3′

[1162] With this GAS promoter element linked to the SV40 promoter, a GAS:SEAP2 reporter construct is next engineered. Here, the reporter molecule is a secreted alkaline phosphatase, or “SEAP.” Clearly, however, any reporter molecule can be instead of SEAP, in this or in any of the other Examples. Well known reporter molecules that can be used instead of SEAP include chloramphenicol acetyltransferase (CAT), luciferase, alkaline phosphatase, B-galactosidase, green fluorescent protein (GFP), or any protein detectable by an antibody.

[1163] The above sequence confirmed synthetic GAS-SV40 promoter element is subcloned into the pSEAP-Promoter vector obtained from Clontech using HindIII and XhoI, effectively replacing the SV40 promoter with the amplified GAS:SV40 promoter element, to create the GAS-SEAP vector. However, this vector does not contain a neomycin resistance gene, and therefore, is not preferred for mammalian expression systems.

[1164] Thus, in order to generate mammalian stable cell lines expressing the GAS-SEAP reporter, the GAS-SEAP cassette is removed from the GAS-SEAP vector using SalI and NotI, and inserted into a backbone vector containing the neomycin resistance gene, such as pGFP-1 (Clontech), using these restriction sites in the multiple cloning site, to create the GAS-SEAP/Neo vector. Once this vector is transfected into mammalian cells, this vector can then be used as a reporter molecule for GAS binding as described in Examples 32-33.

[1165] Other constructs can be made using the above description and replacing GAS with a different promoter sequence. For example, construction of reporter molecules containing EGR and NF-KB promoter sequences are described in Examples 34 and 35. However, many other promoters can be substituted using the protocols described in these Examples. For instance, SRE, IL-2, NFAT, or Osteocalcin promoters can be substituted, alone or in combination (e.g., GAS/NF-KB/EGR, GAS/NF-KB, IL-2/NFAT, or NF-KB/GAS). Similarly, other cell lines can be used to test reporter construct activity, such as HELA (epithelial), HUVEC (endothelial), Reh (B-cell), Saos-2 (osteoblast), HUVAC (aortic), or Cardiomyocyte.

### Example 32

### High-Throughput Screening Assay for T-Cell Activity

[1166] The following protocol is used to assess T-cell activity by identifying factors, and determining whether supernate containing a polypeptide of the invention proliferates and/or differentiates T-cells. T-cell activity is assessed using the GAS/SEAP/Neo construct produced in Example 31. Thus, factors that increase SEAP activity indicate the ability to activate the Jaks-STATS signal transduction pathway. The T-cell used in this assay is Jurkat T-cells (ATCC Accession No. TIB-152), although Molt-3 cells (ATCC Accession No. CRL-1552) and Molt-4 cells (ATCC Accession No. CRL-1582) cells can also be used.

[1167] Jurkat T-cells are lymphoblastic CD4+ Th1 helper cells. In order to generate stable cell lines, approximately 2 million Jurkat cells are transfected with the GAS-SEAP/neo vector using DMRIE-C (Life Technologies)(transfection procedure described below). The transfected cells are seeded to a density of approximately 20,000 cells per well and transfectants resistant to 1 mg/ml genticin selected. Resistant colonies are expanded and then tested for their response to increasing concentrations of interferon gamma. The dose response of a selected clone is demonstrated.

[1168] Specifically, the following protocol will yield sufficient cells for 75 wells containing 200 ul of cells. Thus, it is either scaled up, or performed in multiple to generate sufficient cells for multiple 96 well plates. Jurkat cells are maintained in RPMI+10% serum with 1% Pen-Strep. Combine 2.5 mls of OPTI-MEM (Life Technologies) with 10 ug of plasmid DNA in a T25 flask. Add 2.5 ml OPTI-MEM containing 50 ul of DMRIE-C and incubate at room temperature for 15-45 mins.

[1169] During the incubation period, count cell concentration, spin down the required number of cells (10⁷ per transfection), and resuspend in OPTI-MEM to a final concentration of 10⁷ cells/ml. Then add 1 ml of 1×10⁷ cells in OPTI-MEM to T25 flask and incubate at 37 degree C. for 6 hrs. After the incubation, add 10 ml of RPMI+15% serum.

[1170] The Jurkat:GAS-SEAP stable reporter lines are maintained in RPMI+10% serum, 1 mg/ml Genticin, and 1% Pen-Strep. These cells are treated with supernatants containing polypeptide of the present invention or polypeptide of the present invention induced polypeptides as produced by the protocol described in Example 30.

[1171] On the day of treatment with the supernatant, the cells should be washed and resuspended in fresh RPMI+10% serum to a density of 500,000 cells per ml. The exact number of cells required will depend on the number of supernatants being screened. For one 96 well plate, approximately 10 million cells (for 10 plates, 100 million cells) are required.

[1172] Transfer the cells to a triangular reservoir boat, in order to dispense the cells into a 96 well dish, using a 12 channel pipette. Using a 12 channel pipette, transfer 200 ul of cells into each well (therefore adding 100,000 cells per well).

[1173] After all the plates have been seeded, 50 ul of the supernatants are transferred directly from the 96 well plate containing the supernatants into each well using a 12 channel pipette. In addition, a dose of exogenous interferon gamma (0.1, 1.0, 10 ng) is added to wells H9, H10, and H11 to serve as additional positive controls for the assay.

[1174] The 96 well dishes containing Jurkat cells treated with supernatants are placed in an incubator for 48 hrs (note: this time is variable between 48-72 hrs). 35 ul samples from each well are then transferred to an opaque 96 well plate using a 12 channel pipette. The opaque plates should be covered (using sellophene covers) and stored at −20 degree C. until SEAP assays are performed according to Example 36. The plates containing the remaining treated cells are placed at 4 degree C. and serve as a source of material for repeating the assay on a specific well if desired.

[1175] As a positive control, 100 Unit/ml interferon gamma can be used which is known to activate Jurkat T cells. Over 30 fold induction is typically observed in the positive control wells.

[1176] The above protocol may be used in the generation of both transient, as well as, stable transfected cells, which would be apparent to those of skill in the art.

### Example 33

### High-Throughput Screening Assay Identifying Myeloid Activity

[1177] The following protocol is used to assess myeloid activity of polypeptide of the present invention by determining whether polypeptide of the present invention proliferates and/or differentiates myeloid cells. Myeloid cell activity is assessed using the GAS/SEAP/Neo construct produced in Example 31. Thus, factors that increase SEAP activity indicate the ability to activate the Jaks-STATS signal transduction pathway. The myeloid cell used in this assay is U937, a pre-monocyte cell line, although TF-1, HL60, or KG1 can be used.

[1178] To transiently transfect U937 cells with the GAS/SEAP/Neo construct produced in Example 31, a DEAE-Dextran method (Kharbanda et. al., 1994, Cell Growth & Differentiation, 5:259-265) is used. First, harvest 2×10⁷ U937 cells and wash with PBS. The U937 cells are usually grown in RPMI 1640 medium containing 10% heat-inactivated fetal bovine serum (FBS) supplemented with 100 units/ml penicillin and 100 mg/ml streptomycin.

[1179] Next, suspend the cells in 1 ml of 20 mM Tris-HCl (pH 7.4) buffer containing 0.5 mg/ml DEAE-Dextran, 8 ug GAS-SEAP2 plasmid DNA, 140 mM NaCl, 5 mM KCl, 375 uM Na₂HPO₄.7H₂O, 1 mM MgCl₂, and 675 uM CaCl₂. Incubate at 37 degrees C. for 45 min.

[1180] Wash the cells with RPMI 1640 medium containing 10% FBS and then resuspend in 10 ml complete medium and incubate at 37 degree C. for 36 hr.

[1181] The GAS-SEAP/U937 stable cells are obtained by growing the cells in 400 ug/ml G418. The G418-free medium is used for routine growth but every one to two months, the cells should be re-grown in 400 ug/ml G418 for couple of passages.

[1182] These cells are tested by harvesting 1×10⁸ cells (this is enough for ten 96-well plates assay) and wash with PBS. Suspend the cells in 200 ml above described growth medium, with a final density of 5×10⁵ cells/ml. Plate 200 ul cells per well in the 96-well plate (or 1×10⁵ cells/well).

[1183] Add 50 ul of the supernatant prepared by the protocol described in Example 30. Incubate at 37 degee C for 48 to 72 hr. As a positive control, 100 Unit/ml interferon gamma can be used which is known to activate U937 cells. Over 30 fold induction is typically observed in the positive control wells. SEAP assay the supernatant according to the protocol described in Example 36.

### Example 34

### High-Throughput Screening Assay Identifying Neuronal Activity

[1184] When cells undergo differentiation and proliferation, a group of genes are activated through many different signal transduction pathways. One of these genes, EGR1 (early growth response gene 1), is induced in various tissues and cell types upon activation. The promoter of EGR1 is responsible for such induction. Using the EGR1 promoter linked to reporter molecules, activation of cells can be assessed by polypeptide of the present invention.

[1185] Particularly, the following protocol is used to assess neuronal activity in PC12 cell lines. PC12 cells (rat phenochromocytoma cells) are known to proliferate and/or differentiate by activation with a number of mitogens, such as TPA (tetradecanoyl phorbol acetate), NGF (nerve growth factor), and EGF (epidermal growth factor). The EGR1 gene expression is activated during this treatment. Thus, by stably transfecting PC12 cells with a construct containing an EGR promoter linked to SEAP reporter, activation of PC12 cells by polypeptide of the present invention can be assessed.

[1186] The EGR/SEAP reporter construct can be assembled by the following protocol. The EGR-1 promoter sequence (−633 to +1)(Sakamoto K et al., Oncogene 6:867-871 (1991)) can be PCR amplified from human genomic DNA using the following primers:

(SEQ ID NO: 6)

5′ GCGCTCGAGGGATGACAGCGATAGAACCCCGG-3′

(SEQ ID NO: 7)

5′ GCGAAGCTTCGCGACTCCCCGGATCCGCCTC-3′

[1187] Using the GAS:SEAP/Neo vector produced in Example 31, EGR1 amplified product can then be inserted into this vector. Linearize the GAS:SEAP/Neo vector using restriction enzymes XhoI/HindIII, removing the GAS/SV40 stuffer. Restrict the EGR1 amplified product with these same enzymes. Ligate the vector and the EGR1 promoter.

[1188] To prepare 96 well-plates for cell culture, two mls of a coating solution (1:30 dilution of collagen type I (Upstate Biotech Inc. Cat#08-115) in 30% ethanol (filter sterilized)) is added per one 10 cm plate or 50 ml per well of the 96-well plate, and allowed to air dry for 2 hr.

[1189] PC12 cells are routinely grown in RPMI-1640 medium (Bio Whittaker) containing 10% horse serum (JRH BIOSCIENCES, Cat. # 12449-78P), 5% heat-inactivated fetal bovine serum (FBS) supplemented with 100 units/ml penicillin and 100 ug/ml streptomycin on a precoated 10 cm tissue culture dish. One to four split is done every three to four days. Cells are removed from the plates by scraping and resuspended with pipetting up and down for more than 15 times.

[1190] Transfect the EGR/SEAP/Neo construct into PC12 using the Lipofectamine protocol described in Example 30. EGR-SEAP/PC12 stable cells are obtained by growing the cells in 300 ug/ml G418. The G418-free medium is used for routine growth but every one to two months, the cells should be re-grown in 300 ug/ml G418 for couple of passages.

[1191] To assay for neuronal activity, a 10 cm plate with cells around 70 to 80% confluent is screened by removing the old medium. Wash the cells once with PBS (Phosphate buffered saline). Then starve the cells in low serum medium (RPMI-1640 containing 1% horse serum and 0.5% FBS with antibiotics) overnight.

[1192] The next morning, remove the medium and wash the cells with PBS. Scrape off the cells from the plate, suspend the cells well in 2 ml low serum medium. Count the cell number and add more low serum medium to reach final cell density as 5×10⁵ cells/ml.

[1193] Add 200 ul of the cell suspension to each well of 96-well plate (equivalent to 1×10⁵ cells/well). Add 50 ul supernatant produced by Example 30, 37 degree C. for 48 to 72 hr. As a positive control, a growth factor known to activate PC12 cells through EGR can be used, such as 50 ng/ul of Neuronal Growth Factor (NGF). Over fifty-fold induction of SEAP is typically seen in the positive control wells. SEAP assay the supernatant according to Example 36.

### Example 35

### High-Throughput Screening Assay for T-Cell Activity

[1194] NF-KB (Nuclear Factor KB) is a transcription factor activated by a wide variety of agents including the inflammatory cytokines IL-1 and TNF, CD30 and CD40, lymphotoxin-alpha and lymphotoxin-beta, by exposure to LPS or thrombin, and by expression of certain viral gene products. As a transcription factor, NF-KB regulates the expression of genes involved in immune cell activation, control of apoptosis (NF-KB appears to shield cells from apoptosis), B and T-cell development, anti-viral and antimicrobial responses, and multiple stress responses.

[1195] In non-stimulated conditions, NF-KB is retained in the cytoplasm with I-KB (Inhibitor KB). However, upon stimulation, I-KB is phosphorylated and degraded, causing NF-KB to shuttle to the nucleus, thereby activating transcription of target genes. Target genes activated by NF-KB include IL-2, IL-6, GM-CSF, ICAM-1 and class I MHC.

[1196] Due to its central role and ability to respond to a range of stimuli, reporter constructs utilizing the NF-KB promoter element are used to screen the supernatants produced in Example 30. Activators or inhibitors of NF-KB would be useful in detecting, preventing, diagnosing, prognosticating, treating, and/or ameliorating diseases. For example, inhibitors of NF-KB could be used to treat those diseases related to the acute or chronic activation of NF-KB, such as rheumatoid arthritis.

[1197] To construct a vector containing the NF-KB promoter element, a PCR based strategy is employed. The upstream primer contains four tandem copies of the NF-KB binding site (GGGGACTTTCCC) (SEQ ID NO: 8), 18 bp of sequence complementary to the 5′ end of the SV40 early promoter sequence, and is flanked with an XhoI site:

(SEQ ID NO: 9)

5′:GCGGCCTCGAGGGGACTTTCCCGGGGACTTTCCGGGGACTTTCCGGG
ACTTTCCATCCTGCCATCTCAATTAG:3′

[1198] The downstream primer is complementary to the 3′ end of the SV40 promoter and is flanked with a Hind III site:

(SEQ ID NO: 4)

5′:GCGGCAAGCTTTTTGCAAAGCCTAGGC:3′

[1199] PCR amplification is performed using the SV40 promoter template present in the pB-gal:promoter plasmid obtained from Clontech. The resulting PCR fragment is digested with XhoI and Hind III and subcloned into BLSK2-. (Stratagene) Sequencing with the T7 and T3 primers confirms the insert contains the following sequence:

(SEQ ID NO: 10)

5′:CTCGAGGGGACTTTCCCGGGGACTTTCCGGGGACTTTCCGGGACTTT
CCATCTGCCATCTCAATTAGTCAGCAACCATAGTCCCGCCCCTAACTCCG
CCCATCCCGCCCCTAACTCCGCCCAGTTCCGCCCATTCTCCGCCCCATGG
CTGACTAATTTTTTTTATTTATGCAGAGGCCGAGGCCGCCTCGGCCTCTG
AGCTATTCCAGAAGTAGTGAGGAGGCTTTTTTGGAGGCCTAGGCTTTTGC
AAAAAGCTT:3′

[1200] Next, replace the SV40 minimal promoter element present in the pSEAP2-promoter plasmid (Clontech) with this NF-KB/SV40 fragment using XhoI and HindIII. However, this vector does not contain a neomycin resistance gene, and therefore, is not preferred for mammalian expression systems.

[1201] In order to generate stable mammalian cell lines, the NF-KB/SV40/SEAP cassette is removed from the above NF-KB/SEAP vector using restriction enzymes SalI and NotI, and inserted into a vector containing neomycin resistance. Particularly, the NF-KB/SV40/SEAP cassette was inserted into pGFP-1 (Clontech), replacing the GFP gene, after restricting pGFP-1 with SalI and NotI.

[1202] Once NF-KB/SV40/SEAP/Neo vector is created, stable Jurkat T-cells are created and maintained according to the protocol described in Example 32. Similarly, the method for assaying supernatants with these stable Jurkat T-cells is also described in Example 32. As a positive control, exogenous TNF alpha (0.1, 1, 10 ng) is added to wells H9, H10, and H11, with a 5-10 fold activation typically observed.

### Example 36

### Assay for SEAP Activity

[1203] As a reporter molecule for the assays described in Examples 32-35, SEAP activity is assayed using the Tropix Phospho-light Kit (Cat. BP-400) according to the following general procedure. The Tropix Phospho-light Kit supplies the Dilution, Assay, and Reaction Buffers used below.

[1204] Prime a dispenser with the 2.5× Dilution Buffer and dispense 15 ul of 2.5× dilution buffer into Optiplates containing 35 ul of a supernatant. Seal the plates with a plastic sealer and incubate at 65 degree C. for 30 min. Separate the Optiplates to avoid uneven heating.

[1205] Cool the samples to room temperature for 15 minutes. Empty the dispenser and prime with the Assay Buffer. Add 50 ml Assay Buffer and incubate at room temperature 5 min. Empty the dispenser and prime with the Reaction Buffer (see the Table below). Add 50 ul Reaction Buffer and incubate at room temperature for 20 minutes. Since the intensity of the chemiluminescent signal is time dependent, and it takes about 10 minutes to read 5 plates on a luminometer, thus one should treat 5 plates at each time and start the second set 10 minutes later.

[1206] Read the relative light unit in the luminometer. Set H12 as blank, and print the results. An increase in chemiluminescence indicates reporter activity.

Reaction Buffer Formulation:

| # of plates | Rxn buffer diluent (ml) | CSPD (ml) |
|---|---|---|
| 10 | 60 | 3 |
| 11 | 65 | 3.25 |
| 12 | 70 | 3.5 |
| 13 | 75 | 3.75 |
| 14 | 80 | 4 |
| 15 | 85 | 4.25 |
| 16 | 90 | 4.5 |
| 17 | 95 | 4.75 |
| 18 | 100 | 5 |
| 19 | 105 | 5.25 |
| 20 | 110 | 5.5 |
| 21 | 115 | 5.75 |
| 22 | 120 | 6 |
| 23 | 125 | 6.25 |
| 24 | 130 | 6.5 |
| 25 | 135 | 6.75 |
| 26 | 140 | 7 |
| 27 | 145 | 7.25 |
| 28 | 150 | 7.5 |
| 29 | 155 | 7.75 |
| 30 | 160 | 8 |
| 31 | 165 | 8.25 |
| 32 | 170 | 8.5 |
| 33 | 175 | 8.75 |
| 34 | 180 | 9 |
| 35 | 185 | 9.25 |
| 36 | 190 | 9.5 |
| 37 | 195 | 9.75 |
| 38 | 200 | 10 |
| 39 | 205 | 10.25 |
| 40 | 210 | 10.5 |
| 41 | 215 | 10.75 |
| 42 | 220 | 11 |
| 43 | 225 | 11.25 |
| 44 | 230 | 11.5 |
| 45 | 235 | 11.75 |
| 46 | 240 | 12 |
| 47 | 245 | 12.25 |
| 48 | 250 | 12.5 |
| 49 | 255 | 12.75 |
| 50 | 260 | 13 |

### Example 37

### High-Throughput Screening Assay Identifying Changes in Small Molecule Concentration and Membrane Permeability

[1207] Binding of a ligand to a receptor is known to alter intracellular levels of small molecules, such as calcium, potassium, sodium, and pH, as well as alter membrane potential. These alterations can be measured in an assay to identify supernatants which bind to receptors of a particular cell. Although the following protocol describes an assay for calcium, this protocol can easily be modified to detect changes in potassium, sodium, pH, membrane potential, or any other small molecule which is detectable by a fluorescent probe.

[1208] The following assay uses Fluorometric Imaging Plate Reader (“FLIPR”) to measure changes in fluorescent molecules (Molecular Probes) that bind small molecules. Clearly, any fluorescent molecule detecting a small molecule can be used instead of the calcium fluorescent molecule, fluo-4 (Molecular Probes, Inc.; catalog no. F-14202), used here.

[1209] For adherent cells, seed the cells at 10,000 cells/well in a Co-star black 96-well plate with clear bottom. The plate is incubated in a CO₂ incubator for 20 hours. The adherent cells are washed two times in Biotek washer with 200 ul of HBSS (Hank's Balanced Salt Solution) leaving 100 ul of buffer after the final wash.

[1210] A stock solution of 1 mg/ml fluo-4 is made in 10% pluronic acid DMSO. To load the cells with fluo-4, 50 ul of 12 ug/ml fluo-4 is added to each well. The plate is incubated at 37 degrees C. in a CO₂ incubator for 60 min. The plate is washed four times in the Biotek washer with HBSS leaving 100 ul of buffer.

[1211] For non-adherent cells, the cells are spun down from culture media. Cells are re-suspended to 2-5×10⁶ cells/ml with HBSS in a 50-ml conical tube. 4 ul of 1 mg/ml fluo-4 solution in 10% pluronic acid DMSO is added to each ml of cell suspension. The tube is then placed in a 37 degrees C. water bath for 30-60 min. The cells are washed twice with HBSS, resuspended to 1×10⁶ cells/ml, and dispensed into a microplate, 100 ul/well. The plate is centrifuged at 1000 rpm for 5 min. The plate is then washed once in Denley Cell Wash with 200 ul, followed by an aspiration step to 100 ul final volume.

[1212] For a non-cell based assay, each well contains a fluorescent molecule, such as fluo-4. The supernatant is added to the well, and a change in fluorescence is detected.

[1213] To measure the fluorescence of intracellular calcium, the FLIPR is set for the following parameters: (1) System gain is 300-800 mW; (2) Exposure time is 0.4 second; (3) Camera F/stop is F/2; (4) Excitation is 488 nm; (5) Emission is 530 nm; and (6) Sample addition is 50 ul. Increased emission at 530 nm indicates an extracellular signaling event caused by the a molecule, either polypeptide of the present invention or a molecule induced by polypeptide of the present invention, which has resulted in an increase in the intracellular Ca⁺⁺ concentration.

### Example 38

### High-Throughput Screening Assay Identifying Tyrosine Kinase Activity

[1214] The Protein Tyrosine Kinases (PTK) represent a diverse group of transmembrane and cytoplasmic kinases. Within the Receptor Protein Tyrosine Kinase RPTK) group are receptors for a range of mitogenic and metabolic growth factors including the PDGF, FGF, EGF, NGF, HGF and Insulin receptor subfamilies. In addition there are a large family of RPTKs for which the corresponding ligand is unknown. Ligands for RPTKs include mainly secreted small proteins, but also membrane-bound and extracellular matrix proteins.

[1215] Activation of RPTK by ligands involves ligand-mediated receptor dimerization, resulting in transphosphorylation of the receptor subunits and activation of the cytoplasmic tyrosine kinases. The cytoplasmic tyrosine kinases include receptor associated tyrosine kinases of the src-family (e.g., src, yes, lck, lyn, fyn) and non-receptor linked and cytosolic protein tyrosine kinases, such as the Jak family, members of which mediate signal transduction triggered by the cytokine superfamily of receptors (e.g., the Interleukins, Interferons, GM-CSF, and Leptin).

[1216] Because of the wide range of known factors capable of stimulating tyrosine kinase activity, identifying whether polypeptide of the present invention or a molecule induced by polypeptide of the present invention is capable of activating tyrosine kinase signal transduction pathways is of interest. Therefore, the following protocol is designed to identify such molecules capable of activating the tyrosine kinase signal transduction pathways.

[1217] Seed target cells (e.g., primary keratinocytes) at a density of approximately 25,000 cells per well in a 96 well Loprodyne Silent Screen Plates purchased from Nalge Nunc (Naperville, Ill.). The plates are sterilized with two 30 minute rinses with 100% ethanol, rinsed with water and dried overnight. Some plates are coated for 2 hr with 100 ml of cell culture grade type I collagen (50 mg/ml), gelatin (2%) or polylysine (50 mg/ml), all of which can be purchased from Sigma Chemicals (St. Louis, Mo.) or 10% Matrigel purchased from Becton Dickinson (Bedford, Mass.), or calf serum, rinsed with PBS and stored at 4 degree C. Cell growth on these plates is assayed by seeding 5,000 cells/well in growth medium and indirect quantitation of cell number through use of alamarBlue as described by the manufacturer Alamar Biosciences, Inc. (Sacramento, Calif.) after 48 hr. Falcon plate covers #3071 from Becton Dickinson (Bedford, Mass.) are used to cover the Loprodyne Silent Screen Plates. Falcon Microtest III cell culture plates can also be used in some proliferation experiments.

[1218] To prepare extracts, A431 cells are seeded onto the nylon membranes of Loprodyne plates (20,000/200 ml/well) and cultured overnight in complete medium. Cells are quiesced by incubation in serum-free basal medium for 24 hr. After 5-20 minutes treatment with EGF (60 ng/ml) or 50 ul of the supernatant produced in Example 30, the medium was removed and 100 ml of extraction buffer ((20 mM HEPES pH 7.5, 0.15 M NaCl, 1% Triton X-100, 0.1% SDS, 2 mM Na3VO4, 2 mM Na4P2O7 and a cocktail of protease inhibitors (# 1836170) obtained from Boeheringer Mannheim (Indianapolis, Ind.)) is added to each well and the plate is shaken on a rotating shaker for 5 minutes at 4° C. The plate is then placed in a vacuum transfer manifold and the extract filtered through the 0.45 mm membrane bottoms of each well using house vacuum. Extracts are collected in a 96-well catch/assay plate in the bottom of the vacuum manifold and immediately placed on ice. To obtain extracts clarified by centrifugation, the content of each well, after detergent solubilization for 5 minutes, is removed and centrifuged for 15 minutes at 4 degree C. at 16,000×g.

[1219] Test the filtered extracts for levels of tyrosine kinase activity. Although many methods of detecting tyrosine kinase activity are known, one method is described here.

[1220] Generally, the tyrosine kinase activity of a supernatant is evaluated by determining its ability to phosphorylate a tyrosine residue on a specific substrate (a biotinylated peptide). Biotinylated peptides that can be used for this purpose include PSK1 (corresponding to amino acids 6-20 of the cell division kinase cdc2-p34) and PSK2 (corresponding to amino acids 1-17 of gastrin). Both peptides are substrates for a range of tyrosine kinases and are available from Boehringer Mannheim.

[1221] The tyrosine kinase reaction is set up by adding the following components in order. First, add 10 ul of 5 uM Biotinylated Peptide, then 10 ul ATP/Mg₂₊ (5 mM ATP/50 mM MgCl₂), then 10 ul of 5× Assay Buffer (40 mM imidazole hydrochloride, pH7.3, 40 mM beta-glycerophosphate, 1 mM EGTA, 100 mM MgCl₂, 5 mM MnCl₂, 0.5 mg/ml BSA), then 5 ul of Sodium Vanadate (1 mM), and then 5 ul of water. Mix the components gently and preincubate the reaction mix at 30 degree C. for 2 min. Initial the reaction by adding 10 ul of the control enzyme or the filtered supernatant.

[1222] The tyrosine kinase assay reaction is then terminated by adding 10 ul of 120 mm EDTA and place the reactions on ice.

[1223] Tyrosine kinase activity is determined by transferring 50 ul aliquot of reaction mixture to a microtiter plate (MTP) module and incubating at 37 degree C. for 20 min. This allows the streptavidin coated 96 well plate to associate with the biotinylated peptide. Wash the MTP module with 300 μl/well of PBS four times. Next add 75 ul of anti-phospotyrosine antibody conjugated to horse radish peroxidase (anti-P-Tyr-POD (0.5u/ml)) to each well and incubate at 37 degree C. for one hour. Wash the well as above.

[1224] Next add 100 ul of peroxidase substrate solution (Boehringer Mannheim) and incubate at room temperature for at least 5 mins (up to 30 min). Measure the absorbance of the sample at 405 nm by using ELISA reader. The level of bound peroxidase activity is quantitated using an ELISA reader and reflects the level of tyrosine kinase activity.

### Example 39

### High-Throughput Screening Assay Identifying Phosphorylation Activity

[1225] As a potential alternative and/or complement to the assay of protein tyrosine kinase activity described in Example 38, an assay which detects activation (phosphorylation) of major intracellular signal transduction intermediates can also be used. For example, as described below one particular assay can detect tyrosine phosphorylation of the Erk-1 and Erk-2 kinases. However, phosphorylation of other molecules, such as Raf, JNK, p38 MAP, Map kinase kinase (MEK), MEK kinase, Src, Muscle specific kinase (MuSK), IRAK, Tec, and Janus, as well as any other phosphoserine, phosphotyrosine, or phosphothreonine molecule, can be detected by substituting these molecules for Erk-1 or Erk-2 in the following assay.

[1226] Specifically, assay plates are made by coating the wells of a 96-well ELISA plate with 0.1 ml of protein G (1 ug/ml) for 2 hr at room temp, (RT). The plates are then rinsed with PBS and blocked with 3% BSA/PBS for 1 hr at RT. The protein G plates are then treated with 2 commercial monoclonal antibodies (100 ng/well) against Erk-1 and Erk-2 (1 hr at RT) (Santa Cruz Biotechnology). (To detect other molecules, this step can easily be modified by substituting a monoclonal antibody detecting any of the above described molecules.) After 3-5 rinses with PBS, the plates are stored at 4 degree C. until use.

[1227] A431 cells are seeded at 20,000/well in a 96-well Loprodyne filterplate and cultured overnight in growth medium. The cells are then starved for 48 hr in basal medium (DMEM) and then treated with EGF (6 ng/well) or 50 ul of the supernatants obtained in Example 30 for 5-20 minutes. The cells are then solubilized and extracts filtered directly into the assay plate.

[1228] After incubation with the extract for 1 hr at RT, the wells are again rinsed. As a positive control, a commercial preparation of MAP kinase (10 ng/well) is used in place of A431 extract. Plates are then treated with a commercial polyclonal (rabbit) antibody (1 ug/ml) which specifically recognizes the phosphorylated epitope of the Erk-1 and Erk-2 kinases (1 hr at RT). This antibody is biotinylated by standard procedures. The bound polyclonal antibody is then quantitated by successive incubations with Europium-streptavidin and Europium fluorescence enhancing reagent in the Wallac DELFIA instrument (time-resolved fluorescence). An increased fluorescent signal over background indicates a phosphorylation by polypeptide of the present invention or a molecule induced by polypeptide of the present invention.

### Example 40

### Assay for the Stimulation of Bone Marrow CD34+ Cell Proliferation

[1229] This assay is based on the ability of human CD34+ to proliferate in the presence of hematopoietic growth factors and evaluates the ability of isolated polypeptides expressed in mammalian cells to stimulate proliferation of CD34+ cells.

[1230] It has been previously shown that most mature precursors will respond to only a single signal. More immature precursors require at least two signals to respond. Therefore, to test the effect of polypeptides on hematopoietic activity of a wide range of progenitor cells, the assay contains a given polypeptide in the presence or absence of other hematopoietic growth factors. Isolated cells are cultured for 5 days in the presence of Stem Cell Factor (SCF) in combination with tested sample. SCF alone has a very limited effect on the proliferation of bone marrow (BM) cells, acting in such conditions only as a “survival” factor. However, combined with any factor exhibiting stimulatory effect on these cells (e.g., IL-3), SCF will cause a synergistic effect. Therefore, if the tested polypeptide has a stimulatory effect on hematopoietic progenitors, such activity can be easily detected. Since normal BM cells have a low level of cycling cells, it is likely that any inhibitory effect of a given polypeptide, or agonists or antagonists thereof, might not be detected. Accordingly, assays for an inhibitory effect on progenitors is preferably tested in cells that are first subjected to in vitro stimulation with SCF+IL+3, and then contacted with the compound that is being evaluated for inhibition of such induced proliferation.

[1231] Briefly, CD34+ cells are isolated using methods known in the art. The cells are thawed and resuspended in medium (QBSF 60 serum-free medium with 1% L-glutamine (500 ml) Quality Biological, Inc., Gaithersburg, Md. Cat# 160-204-101). After several gentle centrifugation steps at 200×g, cells are allowed to rest for one hour. The cell count is adjusted to 2.5×10⁵ cells/ml. During this time, 100 μl of sterile water is added to the peripheral wells of a 96-well plate. The cytokines that can be tested with a given polypeptide in this assay is rhSCF (R&D Systems, Minneapolis, Minn., Cat# 255-SC) at 50 ng/ml alone and in combination with rhSCF and rhIL-3 (R&D Systems, Minneapolis, Minn., Cat# 203-ML) at 30 ng/ml. After one hour, 10 μl of prepared cytokines, 50 μl of the supernatants prepared in Example 30 (supernatants at 1:2 dilution=50 μl) and 20 μl of diluted cells are added to the media which is already present in the wells to allow for a final total volume of 100 μl. The plates are then placed in a 37° C./5% CO₂ incubator for five days.

[1232] Eighteen hours before the assay is harvested, 0.5 μCi/well of [3H] Thymidine is added in a 10 μl volume to each well to determine the proliferation rate. The experiment is terminated by harvesting the cells from each 96-well plate to a filtermat using the Tomtec Harvester 96. After harvesting, the filtermats are dried, trimmed and placed into OmniFilter assemblies consisting of one OmniFilter plate and one OmniFilter Tray. 60 μl Microscint is added to each well and the plate sealed with TopSeal-A press-on sealing film A bar code 15 sticker is affixed to the first plate for counting. The sealed plates are then loaded and the level of radioactivity determined via the Packard Top Count and the printed data collected for analysis. The level of radioactivity reflects the amount of cell proliferation.

[1233] The studies described in this example test the activity of a given polypeptide to stimulate bone marrow CD34+ cell proliferation. One skilled in the art could easily modify the exemplified studies to test the activity of polynucleotides (e.g., gene therapy), antibodies, agonists, and/or antagonists and fragments and variants thereof. As a nonlimiting example, potential antagonists tested in this assay would be expected to inhibit cell proliferation in the presence of cytokines and/or to increase the inhibition of cell proliferation in the presence of cytokines and a given polypeptide. In contrast, potential agonists tested in this assay would be expected to enhance cell proliferation and/or to decrease the inhibition of cell proliferation in the presence of cytokines and a given polypeptide.

[1234] The ability of a gene to stimulate the proliferation of bone marrow CD34+ cells indicates that polynucleotides and polypeptides corresponding to the gene are useful for the detection, prevention, diagnosis, prognostication, treatment, and/or amelioration of disorders affecting the immune system and hematopoiesis. Representative uses are described in the “Immune Activity” and “Infectious Disease” sections above, and elsewhere herein.

### Example 41

### Assay for Extracellular Matrix Enhanced Cell Response (EMECR)

[1235] The objective of the Extracellular Matrix Enhanced Cell Response (EMECR) assay is to identify gene products (e.g., isolated polypeptides) that act on the hematopoietic stem cells in the context of the extracellular matrix (ECM) induced signal.

[1236] Cells respond to the regulatory factors in the context of signal(s) received from the surrounding microenvironment. For example, fibroblasts, and endothelial and epithelial stem cells fail to replicate in the absence of signals from the ECM. Hematopoietic stem cells can undergo self-renewal in the bone marrow, but not in in vitro suspension culture. The ability of stem cells to undergo self-renewal in vitro is dependent upon their interaction with the stromal cells and the ECM protein fibronectin (fn). Adhesion of cells to fn is mediated by the α₅.β₁ and α₄.β₁ integrin receptors, which are expressed by human and mouse hematopoietic stem cells. The factor(s) which integrate with the ECM environment and are responsible for stimulating stem cell self-renewal havea not yet been identified. Discovery of such factors should be of great interest in gene therapy and bone marrow transplant applications Briefly, polystyrene, non tissue culture treated, 96-well plates are coated with fn fragment at a coating concentration of 0.2 μg/cm². Mouse bone marrow cells are plated (1,000 cells/well) in 0.2 ml of serum-free medium. Cells cultured in the presence of IL-3 (5 ng/ml)+SCF (50 ng/ml) would serve as the positive control, conditions under which little self-renewal but pronounced differentiation of the stem cells is to be expected. Gene products of the invention (e.g., including, but not limited to, polynucleotides and polypeptides of the present invention, and supernatants produced in Example 30), are tested with appropriate negative controls in the presence and absence of SCF (5.0 ng/ml), where test factor supernatants represent 10% of the total assay volume. The plated cells are then allowed to grow by incubating in a low oxygen environment (5% CO₂, 7% O₂, and 88% N₂) tissue culture incubator for 7 days. The number of proliferating cells within the wells is then quantitated by measuring thymidine incorporation into cellular DNA. Verification of the positive hits in the assay will require phenotypic characterization of the cells, which can be accomplished by scaling up of the culture system and using appropriate antibody reagents against cell surface antigens and FACScan.

[1237] One skilled in the art could easily modify the exemplified studies to test the activity of polynucleotides (e.g., gene therapy), antibodies, agonists, and/or antagonists and fragments and variants thereof.

[1238] If a particular polypeptide of the present invention is found to be a stimulator of hematopoietic progenitors, polynucleotides and polypeptides corresponding to the gene encoding said polypeptide may be useful for the detection, prevention, diagnosis, prognostication, treatment, and/or amelioration of disorders affecting the immune system and hematopoiesis. Representative uses are described in the “Immune Activity” and “Infectious Disease” sections above, and elsewhere herein. The gene product may also be useful in the expansion of stem cells and committed progenitors of various blood lineages, and in the differentiation and/or proliferation of various cell types.

[1239] Additionally, the polynucleotides and/or polypeptides of the gene of interest and/or agonists and/or antagonists thereof, may also be employed to inhibit the proliferation and differentiation of hematopoietic cells and therefore may be employed to protect bone marrow stem cells from chemotherapeutic agents during chemotherapy. This antiproliferative effect may allow administration of higher doses of chemotherapeutic agents and, therefore, more effective chemotherapeutic treatment.

[1240] Moreover, polynucleotides and polypeptides corresponding to the gene of interest may also be useful for the detection, prevention, diagnosis, prognostication, treat, and/or amelioration of hematopoietic related disorders such as, for example, anemia, pancytopenia, leukopenia, thrombocytopenia or leukemia since stromal cells are important in the production of cells of hematopoietic lineages. The uses include bone marrow cell ex-vivo culture, bone marrow transplantation, bone marrow reconstitution, radiotherapy or chemotherapy of neoplasia.

### Example 42

### Human Dermal Fibroblast and Aortic Smooth Muscle Cell Proliferation

[1241] The polypeptide of interest is added to cultures of normal human dermal fibroblasts (NHDF) and human aortic smooth muscle cells (AoSMC) and two co-assays are performed with each sample. The first assay examines the effect of the polypeptide of interest on the proliferation of normal human dermal fibroblasts (NHDF) or aortic smooth muscle cells (AoSMC). Aberrant growth of fibroblasts or smooth muscle cells is a part of several pathological processes, including fibrosis, and restenosis. The second assay examines IL6 production by both NHDF and SMC. IL6 production is an indication of functional activation. Activated cells will have increased production of a number of cytokines and other factors, which can result in a proinflammatory or immunomodulatory outcome. Assays are run with and without co-TNFa stimulation, in order to check for costimulatory or inhibitory activity.

[1242] Briefly, on day 1, 96-well black plates are set up with 1000 cells/well (NHDF) or 2000 cells/well (AoSMC) in 100 μl culture media. NHDF culture media contains: Clonetics FB basal media, 1 mg/ml hFGF, 5 mg/ml insulin, 50 mg/ml gentamycin, 2% FBS, while AoSMC culture media contains Clonetics SM basal media, 0.5 μg/ml hEGF, 5 mg/ml insulin, 1 μg/ml hFGF, 50 mg/ml gentamycin, 50 μg/ml Amphotericin B, 5% FBS. After incubation at 37° C. for at least 4-5 hours culture media is aspirated and replaced with growth arrest media. Growth arrest media for NHDF contains fibroblast basal media, 50 mg/ml gentamycin, 2% FBS, while growth arrest media for AoSMC contains SM basal media, 50 mg/ml gentamycin, 50 μg/ml Amphotericin B, 0.4% FBS. Incubate at 37° C. until day 2.

[1243] On day 2, serial dilutions and templates of the polypeptide of interest are designed such that they always include media controls and known-protein controls. For both stimulation and inhibition experiments, proteins are diluted in growth arrest media. For inhibition experiments, TNFa is added to a final concentration of 2 ng/ml (NHDF) or 5 ng/ml (AoSMC). Add 1/3 vol media containing controls or polypeptides of the present invention and incubate at 37 degrees C./5% CO₂ until day 5.

[1244] Transfer 60 μl from each well to another labeled 96-well plate, cover with a plate-sealer, and store at 4 degrees C. until Day 6 (for IL6 ELISA). To the remaining 100 μl in the cell culture plate, aseptically add Alamar Blue in an amount equal to 10% of the culture volume (10 μl). Return plates to incubator for 3 to 4 hours. Then measure fluorescence with excitation at 530 nm and emission at 590 nm using the CytoFluor. This yields the growth stimulation/inhibition data.

[1245] On day 5, the IL6 ELISA is performed by coating a 96 well plate with 50-100 ul/well of Anti-Human IL6 Monoclonal antibody diluted in PBS, pH 7.4, incubate ON at room temperature.

[1246] On day 6, empty the plates into the sink and blot on paper towels. Prepare Assay Buffer containing PBS with 4% BSA. Block the plates with 200 μl/well of Pierce Super Block blocking buffer in PBS for 1-2 hr and then wash plates with wash buffer (PBS, 0.05% Tween-20). Blot plates on paper towels. Then add 50 μl/well of diluted Anti-Human IL-6 Monoclonal, Biotin-labeled antibody at 0.50 mg/ml. Make dilutions of IL-6 stock in media (30, 10, 3, 1, 0.3, 0 ng/ml). Add duplicate samples to top row of plate. Cover the plates and incubate for 2 hours at RT on shaker.

[1247] Plates are washed with wash buffer and blotted on paper towels. Dilute EU-labeled Streptavidin 1:1000 in Assay buffer, and add 100 μl/well. Cover the plate and incubate 1 h at RT. Plates are again washed with wash buffer and blotted on paper towels.

[1248] Add 100 μl/well of Enhancement Solution. Shake for 5 minutes. Read the plate on the Wallac DELFIA Fluorometer. Readings from triplicate samples in each assay were tabulated and averaged.

[1249] A positive result in this assay suggests AoSMC cell proliferation and that the polypeptide of the present invention may be involved in dermal fibroblast proliferation and/or smooth muscle cell proliferation. A positive result also suggests many potential uses of polypeptides, polynucleotides, agonists and/or antagonists of the polynucleotide/polypeptide of the present invention which gives a positive result. For example, inflammation and immune responses, wound healing, and angiogenesis, as detailed throughout this specification. Particularly, polypeptides of the present invention and polynucleotides of the present invention may be used in wound healing and dermal regeneration, as well as the promotion of vasculogenesis, both of the blood vessels and lymphatics. The growth of vessels can be used in the treatment of, for example, cardiovascular diseases. Additionally, antagonists of polypeptides and polynucleotides of the invention may be useful in treating diseases, disorders, and/or conditions which involve angiogenesis by acting as an anti-vascular agent (e.g., anti-angiogenesis). These diseases, disorders, and/or conditions are known in the art and/or are described herein, such as, for example, malignancies, solid tumors, benign tumors, for example hemangiomas, acoustic neuromas, neurofibromas, trachomas, and pyogenic granulomas; artheroscleric plaques; ocular angiogenic diseases, for example, diabetic retinopathy, retinopathy of prematurity, macular degeneration, corneal graft rejection, neovascular glaucoma, retrolental fibroplasia, rubeosis, retinoblastoma, uvietis and Pterygia (abnormal blood vessel growth) of the eye; rheumatoid arthritis; psoriasis; delayed wound healing; endometriosis; vasculogenesis; granulations; hypertrophic scars (keloids); nonunion fractures; scleroderma; trachoma; vascular adhesions; myocardial angiogenesis; coronary collaterals; cerebral collaterals; arteriovenous malformations; ischemic limb angiogenesis; Osler-Webber Syndrome; plaque neovascularization; telangiectasia; hemophiliac joints; angiofibroma; fibromuscular dysplasia; wound granulation; Crohn's disease; and atherosclerosis. Moreover, antagonists of polypeptides and polynucleotides of the invention may be useful in treating anti-hyperproliferative diseases and/or anti-inflammatory known in the art and/or described herein.

[1250] One skilled in the art could easily modify the exemplified studies to test the activity of polynucleotides (e.g., gene therapy), antibodies, agonists, and/or antagonists and fragments and variants thereof.

### Example 43

### Cellular Adhesion Molecule (CAM) Expression on Endothelial Cells

[1251] The recruitment of lymphocytes to areas of inflammation and angiogenesis involves specific receptor-ligand interactions between cell surface adhesion molecules (CAMs) on lymphocytes and the vascular endothelium. The adhesion process, in both normal and pathological settings, follows a multi-step cascade that involves intercellular adhesion molecule-1 (ICAM-1), vascular cell adhesion molecule-1 (VCAM-1), and endothelial leukocyte adhesion molecule-1 (E-selectin) expression on endothelial cells (EC). The expression of these molecules and others on the vascular endothelium determines the efficiency with which leukocytes may adhere to the local vasculature and extravasate into the local tissue during the development of an inflammatory response. The local concentration of cytokines and growth factor participate in the modulation of the expression of these CAMs.

[1252] Briefly, endothelial cells (e.g., Human Umbilical Vein Endothelial cells (HUVECs)) are grown in a standard 96 well plate to confluence, growth medium is removed from the cells and replaced with 100 μl of 199 Medium (10% fetal bovine serum (FBS)). Samples for testing and positive or negative controls are added to the plate in triplicate (in 10 μl volumes). Plates are then incubated at 37° C. for either 5 h (selectin and integrin expression) or 24 h (integrin expression only). Plates are aspirated to remove medium and 100 μl of 0.1% paraformaldehyde-PBS (with Ca++ and Mg++) is added to each well. Plates are held at 4° C. for 30 min. Fixative is removed from the wells and wells are washed 1× with PBS(+Ca,Mg)+0.5% BSA and drained. 10 μl of diluted primary antibody is added to the test and control wells. Anti-ICAM-1-Biotin, Anti-VCAM-1-Biotin and Anti-E-selectin-Biotin are used at a concentration of 10 μg/ml (1:10 dilution of 0.1 mg/ml stock antibody). Cells are incubated at 37° C. for 30 min. in a humidified environment. Wells are washed three times with PBS(+Ca,Mg)+0.5% BSA. 20 μl of diluted ExtrAvidin-Alkaline Phosphatase (1:5,000 dilution, referred to herein as the working dilution) are added to each well and incubated at 37° C. for 30 min. Wells are washed three times with PBS(+Ca,Mg)+0.5% BSA. Dissolve 1 tablet of p-Nitrophenol Phosphate pNPP per 5 ml of glycine buffer (pH 10.4). 100 μl of pNPP substrate in glycine buffer is added to each test well. Standard wells in triplicate are prepared from the working dilution of the ExtrAvidin-Alkaline Phosphotase in glycine buffer: 1:5,000 (10⁰)>10^{-0.5}>10⁻¹>10^{-1.5}.5 μl of each dilution is added to triplicate wells and the resulting AP content in each well is 5.50 ng, 1.74 ng, 0.55 ng, 0.18 ng. 100 μl of pNNP reagent is then added to each of the standard wells. The plate is incubated at 37° C. for 4 h. A volume of 50 μl of 3M NaOH is added to all wells. The plate is read on a plate reader at 405 nm using the background subtraction option on blank wells filled with glycine buffer only. Additionally, the template is set up to indicate the concentration of AP-conjugate in each standard well [5.50 ng; 1.74 ng; 0.55 ng; 0.18 ng]. Results are indicated as amount of bound AP-conjugate in each sample.

### Example 44

### Alamar Blue Endothelial Cells Proliferation Assay

[1253] This assay may be used to quantitatively determine protein mediated inhibition of bFGF-induced proliferation of Bovine Lymphatic Endothelial Cells (LECs), Bovine Aortic Endothelial Cells (BAECs) or Human Microvascular Uterine Myometrial Cells (UTMECs). This assay incorporates a fluorometric growth indicator based on detection of metabolic activity. A standard Alamar Blue Proliferation Assay is prepared in EGM-2MV with 10 ng/ml of bFGF added as a source of endothelial cell stimulation. This assay may be used with a variety of endothelial cells with slight changes in growth medium and cell concentration. Dilutions of the protein batches to be tested are diluted as appropriate. Serum-free medium (GIBCO SFM) without bFGF is used as a non-stimulated control and Angiostatin or TSP-1 are included as a known inhibitory controls.

[1254] Briefly, LEC, BAECs or UTMECs are seeded in growth media at a density of 5000 to 2000 cells/well in a 96 well plate and placed at 37 degrees C. overnight. After the overnight incubation of the cells, the growth media is removed and replaced with GIBCO EC-SFM. The cells are treated with the appropriate dilutions of the protein of interest or control protein sample(s) (prepared in SFM) in triplicate wells with additional bFGF to a concentration of 10 ng/ml. Once the cells have been treated with the samples, the plate(s) is/are placed back in the 37° C. incubator for three days. After three days 10 ml of stock alamar blue (Biosource Cat# DAL1100) is added to each well and the plate(s) is/are placed back in the 37° C. incubator for four hours. The plate(s) are then read at 530 nm excitation and 590 nm emission using the CytoFluor fluorescence reader. Direct output is recorded in relative fluorescence units.

[1255] Alamar blue is an oxidation-reduction indicator that both fluoresces and changes color in response to chemical reduction of growth medium resulting from cell growth. As cells grow in culture, innate metabolic activity results in a chemical reduction of the immediate surrounding environment. Reduction related to growth causes the indicator to change from oxidized (non-fluorescent blue) form to reduced (fluorescent red) form (i.e., stimulated proliferation will produce a stronger signal and inhibited proliferation will produce a weaker signal and the total signal is proportional to the total number of cells as well as their metabolic activity). The background level of activity is observed with the starvation medium alone. This is compared to the output observed from the positive control samples (bFGF in growth medium) and protein dilutions.

### Example 45

### Detection of Inhibition of a Mixed Lymphocyte Reaction

[1256] This assay can be used to detect and evaluate inhibition of a Mixed Lymphocyte Reaction (MLR) by gene products (e.g., isolated polypeptides). Inhibition of a MLR may be due to a direct effect on cell proliferation and viability, modulation of costimulatory molecules on interacting cells, modulation of adhesiveness between lymphocytes and accessory cells, or modulation of cytokine production by accessory cells. Multiple cells may be targeted by these polypeptides since the peripheral blood mononuclear fraction used in this assay includes T, B and natural killer lymphocytes, as well as monocytes and dendritic cells.

[1257] Polypeptides of interest found to inhibit the MLR may find application in diseases associated with lymphocyte and monocyte activation or proliferation. These include, but are not limited to, diseases such as asthma, arthritis, diabetes, inflammatory skin conditions, psoriasis, eczema, systemic lupus erythematosus, multiple sclerosis, glomerulonephritis, inflammatory bowel disease, crohn's disease, ulcerative colitis, arteriosclerosis, cirrhosis, graft vs. host disease, host vs. graft disease, hepatitis, leukemia and lymphoma.

[1258] Briefly, PBMCs from human donors are purified by density gradient centrifugation using Lymphocyte Separation Medium (LSM®, density 1.0770 g/ml, Organon Teknika Corporation, West Chester, Pa.). PBMCs from two donors are adjusted to 2×10⁶ cells/ml in RPMI-1640 (Life Technologies, Grand Island, N.Y.) supplemented with 10% FCS and 2 mM glutamine. PBMCs from a third donor is adjusted to 2×10⁵ cells/ml. Fifty microliters of PBMCs from each donor is added to wells of a 96-well round bottom microtiter plate. Dilutions of test materials (50 μl) is added in triplicate to microtiter wells. Test samples (of the protein of interest) are added for final dilution of 1:4; rhuIL-2 (R&D Systems, Minneapolis, Minn., catalog number 202-IL) is added to a final concentration of 1 μg/ml; anti-CD4 mAb (R&D Systems, clone 34930.11, catalog number MAB379) is added to a final concentration of 10 μg/ml. Cells are cultured for 7-8 days at 37° C. in 5% CO₂, and 1 μC of [³H] thymidine is added to wells for the last 16 hrs of culture. Cells are harvested and thymidine incorporation determined using a Packard TopCount. Data is expressed as the mean and standard deviation of triplicate determinations.

[1259] Samples of the protein of interest are screened in separate experiments and compared to the negative control treatment, anti-CD4 mAb, which inhibits proliferation of lymphocytes and the positive control treatment, IL-2 (either as recombinant material or supernatant), which enhances proliferation of lymphocytes.

[1260] One skilled in the art could easily modify the exemplified studies to test the activity of polynucleotides (e.g., gene therapy), antibodies, agonists, and/or antagonists and fragments and variants thereof.

### Example 46

### Assays for Protease Activity

[1261] The following assay may be used to assess protease activity of the polypeptides of the invention.

[1262] Gelatin and casein zymography are performed essentially as described (Heusen et al., Anal. Biochem., 102:196-202 (1980); Wilson et al., Journal of Urology, 149:653-658 (1993)). Samples are run on 10% polyacryamide/0.1% SDS gels containing 1% gelain orcasein, soaked in 2.5% triton at room temperature for 1 hour, and in 0.1M glycine, pH 8.3 at 37° C. 5 to 16 hours. After staining in amido black areas of proteolysis apear as clear areas agains the blue-black background. Trypsin (Sigma T8642) is used as a positive control.

[1263] Protease activity is also determined by monitoring the cleavage of n-a-benzoyl-L-arginine ethyl ester (BAEE) (Sigma B-4500. Reactions are set up in (25 mMNaPO₄, 1 mM EDTA, and 1 mM BAEE), pH 7.5. Samples are added and the change in adsorbance at 260 nm is monitored on the Beckman DU-6 spectrophotometer in the time-drive mode. Trypsin is used as a positive control.

[1264] Additional assays based upon the release of acid-soluble peptides from casein or hemoglobin measured as adsorbance at 280 nm or colorimetrically using the Folin method are performed as described in Bergmeyer, et al., Methods of Enzymatic Analysis, 5 (1984). Other assays involve the solubilization of chromogenic substrates (Ward, Applied Science, 251-317 (1983)).

### Example 47

### Identifying Serine Protease Substrate Specificity

[1265] Methods known in the art or described herein may be used to determine the substrate specificity of the polypeptides of the present invention having serine protease activity. A preferred method of determining substrate specificity is by the use of positional scanning synthetic combinatorial libraries as described in GB 2 324 529 (incorporated herein in its entirety).

### Example 48

### Ligand Binding Assays

[1266] The following assay may be used to assess ligand binding activity of the polypeptides of the invention.

[1267] Ligand binding assays provide a direct method for ascertaining receptor pharmacology and are adaptable to a high throughput format. The purified ligand for a polypeptide is radiolabeled to high specific activity (50-2000 Ci/mmol) for binding studies. A determination is then made that the process of radiolabeling does not diminish the activity of the ligand towards its polypeptide. Assay conditions for buffers, ions, pH and other modulators such as nucleotides are optimized to establish a workable signal to noise ratio for both membrane and whole cell polypeptide sources. For these assays, specific polypeptide binding is defined as total associated radioactivity minus the radioactivity measured in the presence of an excess of unlabeled competing ligand. Where possible, more than one competing ligand is used to define residual nonspecific binding.

### Example 49

### Functional Assay in Xenopus Oocyles

[1268] Capped RNA transcripts from linearized plasmid templates encoding the polypeptides of the invention are synthesized in vitro with RNA polymerases in accordance with standard procedures. In vitro transcripts are suspended in water at a final concentration of 0.2 mg/ml. Ovarian lobes are removed from adult female toads, Stage V defolliculated oocytes are obtained, and RNA transcripts (10 ng/oocyte) are injected in a 50 nl bolus using a microinjection apparatus. Two electrode voltage clamps are used to measure the currents from individual Xenopus oocytes in response polypeptides and polypeptide agonist exposure. Recordings are made in Ca2+free Barth's medium at room temperature. The Xenopus system can be used to screen known ligands and tissue/cell extracts for activating ligands.

### Example 50

### Microphysiometric Assays

[1269] Activation of a wide variety of secondary messenger systems results in extrusion of small amounts of acid from a cell. The acid formed is largely as a result of the increased metabolic activity required to fuel the intracellular signaling process. The pH changes in the media surrounding the cell are very small but are detectable by the CYTOSENSOR microphysiometer (Molecular Devices Ltd., Menlo Park, Calif.). The CYTOSENSOR is thus capable of detecting the activation of polypeptide which is coupled to an energy utilizing intracellular signaling pathway.

### Example 51

### Extract/Cell Supernatant Screening

[1270] A large number of mammalian receptors exist for which there remains, as yet, no cognate activating ligand (agonist). Thus, active ligands for these receptors may not be included within the ligands banks as identified to date. Accordingly, the polypeptides of the invention can also be functionally screened (using calcium, cAMP, microphysiometer, oocyte electrophysiology, etc., functional screens) against tissue extracts to identify its natural ligands. Extracts that produce positive functional responses can be sequentially subfractionated until an activating ligand is isolated and identified.

### Example 52

### Calcium and cAMP Functional Assays

[1271] Seven transmembrane receptors which are expressed in HEK 293 cells have been shown to be coupled functionally to activation of PLC and calcium mobilization and/or cAMP stimulation or inhibition. Basal calcium levels in the HEK 293 cells in receptor-transfected or vector control cells were observed to be in the normal, 100 nM to 200 nM, range. HEK 293 cells expressing recombinant receptors are loaded with fura 2 and in a single day >150 selected ligands or tissue/cell extracts are evaluated for agonist induced calcium mobilization. Similarly, HEK 293 cells expressing recombinant receptors are evaluated for the stimulation or inhibition of cAMP production using standard cAMP quantitation assays. Agonists presenting a calcium transient or cAMP fluctuation are tested in vector control cells to determine if the response is unique to the transfected cells expressing receptor.

### Example 53

### ATP-Binding Assay

[1272] The following assay may be used to assess ATP-binding activity of polypeptides of the invention.

[1273] ATP-binding activity of the polypeptides of the invention may be detected using the ATP-binding assay described in U.S. Pat. No. 5,858,719, which is herein incorporated by reference in its entirety. Briefly, ATP-binding to polypeptides of the invention is measured via photoaffinity labeling with 8-azido-ATP in a competition assay. Reaction mixtures containing 1 mg/ml of the ABC transport protein of the present invention are incubated with varying concentrations of ATP, or the non-hydrolyzable ATP analog adenyl-5′-imidodiphosphate for 10 minutes at 4° C. A mixture of 8-azido-ATP (Sigma Chem. Corp., St. Louis, Mo.) plus 8-azido-ATP (³²P-ATP) (5 mCi/μmol, ICN, Irvine Calif.) is added to a final concentration of 100 μM and 0.5 ml aliquots are placed in the wells of a porcelain spot plate on ice. The plate is irradiated using a short wave 254 nm UV lamp at a distance of 2.5 cm from the plate for two one-minute intervals with a one-minute cooling interval in between. The reaction is stopped by addition of dithiothreitol to a final concentration of 2 mM. The incubations are subjected to SDS-PAGE electrophoresis, dried, and autoradiographed. Protein bands corresponding to the particular polypeptides of the invention are excised, and the radioactivity quantified. A decrease in radioactivity with increasing ATP or adenly-5′-imidodiphosphate provides a measure of ATP affinity to the polypeptides.

### Example 54

### Small Molecule Screening

[1274] This invention is particularly useful for screening therapeutic compounds by using the polypeptides of the invention, or binding fragments thereof, in any of a variety of drug screening techniques. The polypeptide or fragment employed in such a test may be affixed to a solid support, expressed on a cell surface, free in solution, or located intracellularly. One method of drug screening utilizes eukaryotic or prokaryotic host cells which are stably transformed with recombinant nucleic acids expressing the polypeptide or fragment. Drugs are screened against such transformed cells in competitive binding assays. One may measure, for example, the formulation of complexes between the agent being tested and polypeptide of the invention.

[1275] Thus, the present invention provides methods of screening for drugs or any other agents which affect activities mediated by the polypeptides of the invention. These methods comprise contacting such an agent with a polypeptide of the invention or fragment thereof and assaying for the presence of a complex between the agent and the polypeptide or fragment thereof, by methods well known in the art. In such a competitive binding assay, the agents to screen are typically labeled. Following incubation, free agent is separated from that present in bound form, and the amount of free or uncomplexed label is a measure of the ability of a particular agent to bind to the polypeptides of the invention.

[1276] Another technique for drug screening provides high throughput screening for compounds having suitable binding affinity to the polypeptides of the invention, and is described in great detail in European Patent Application 84/03564, published on Sep. 13, 1984, which is herein incorporated by reference in its entirety. Briefly stated, large numbers of different small molecule test compounds are synthesized on a solid substrate, such as plastic pins or some other surface. The test compounds are reacted with polypeptides of the invention and washed. Bound polypeptides are then detected by methods well known in the art. Purified polypeptides are coated directly onto plates for use in the aforementioned drug screening techniques. In addition, non-neutralizing antibodies may be used to capture the peptide and immobilize it on the solid support.

[1277] This invention also contemplates the use of competitive drug screening assays in which neutralizing antibodies capable of binding polypeptides of the invention specifically compete with a test compound for binding to the polypeptides or fragments thereof. In this manner, the antibodies are used to detect the presence of any peptide which shares one or more antigenic epitopes with a polypeptide of the invention.

### Example 55

### Phosphorylation Assay

[1278] In order to assay for phosphorylation activity of the polypeptides of the invention, a phosphorylation assay as described in U.S. Pat. No. 5,958,405 (which is herein incorporated by reference) is utilized. Briefly, phosphorylation activity may be measured by phosphorylation of a protein substrate using gamma-labeled ³²P-ATP and quantitation of the incorporated radioactivity using a gamma radioisotope counter. The polypeptides of the invention are incubated with the protein substrate, ³²P-ATP, and a kinase buffer. The ³²P incorporated into the substrate is then separated from free ³²P-ATP by electrophoresis, and the incorporated ³²P is counted and compared to a negative control. Radioactivity counts above the negative control are indicative of phosphorylation activity of the polypeptides of the invention.

### Example 56

### Detection of Phosphorylation Activity (Activation) of the Polypeptides of the Invention in the Presence of Polypeptide Ligands

[1279] Methods known in the art or described herein may be used to determine the phosphorylation activity of the polypeptides of the invention. A preferred method of determining phosphorylation activity is by the use of the tyrosine phosphorylation assay as described in U.S. Pat. No. 5,817,471 (incorporated herein by reference).

### Example 57

### Identification of Signal Transduction Proteins that Interact with Polypeptides of the Present Invention

[1280] The purified polypeptides of the invention are research tools for the identification, characterization and purification of additional signal transduction pathway proteins or receptor proteins. Briefly, labeled polypeptides of the invention are useful as reagents for the purification of molecules with which it interacts. In one embodiment of affinity purification, polypeptides of the invention are covalently coupled to a chromatography column. Cell-free extract derived from putative target cells, such as carcinoma tissues, is passed over the column, and molecules with appropriate affinity bind to the polypeptides of the invention. The protein complex is recovered from the column, dissociated, and the recovered molecule subjected to N-terminal protein sequencing. This amino acid sequence is then used to identify the captured molecule or to design degenerate oligonucleotide probes for cloning the relevant gene from an appropriate cDNA library.

### Example 58

### IL-6 Bioassay

[1281] To test the proliferative effects of the polypeptides of the invention, the IL-6 Bioassay as described by Marz et al. is utilized (Proc. Natl. Acad. Sci., U.S.A., 95:3251-56 (1998), which is herein incorporated by reference). Briefly, IL-6 dependent B9 murine cells are washed three times in IL-6 free medium and plated at a concentration of 5,000 cells per well in 50 μl, and 50 μl of the IL-6-like polypeptide is added. After 68 hrs. at 37° C., the number of viable cells is measured by adding the tetrazolium salt thiazolyl blue (MTT) and incubating for a further 4 hrs. at 37° C. B9 cells are lysed by SDS and optical density is measured at 570 nm. Controls containing IL-6 (positive) and no cytokine (negative) are utilized. Enhanced proliferation in the test sample(s) relative to the negative control is indicative of proliferative effects mediated by polypeptides of the invention.

### Example 59

### Support of Chicken Embryo Neuron Survival

[1282] To test whether sympathetic neuronal cell viability is supported by polypeptides of the invention, the chicken embryo neuronal survival assay of Senaldi et al is utilized (Proc. Natl. Acad. Sci., U.S.A., 96:11458-63 (1998), which is herein incorporated by reference). Briefly, motor and sympathetic neurons are isolated from chicken embryos, resuspended in L15 medium (with 10% FCS, glucose, sodium selenite, progesterone, conalbumin, putrescine, and insulin; Life Technologies, Rockville, Md.) and Dulbecco's modified Eagles medium [with 10% FCS, glutamine, penicillin, and 25 mM Hepes buffer (pH 7.2); Life Technologies, Rockville, Md.], respectively, and incubated at 37° C. in 5% CO₂ in the presence of different concentrations of the purified IL-6-like polypeptide, as well as a negative control lacking any cytokine. After 3 days, neuron survival is determined by evaluation of cellular morphology, and through the use of the colorimetric assay of Mosmann (Mosmann, T., J. Immunol. Methods, 65:55-63 (1983)). Enhanced neuronal cell viability as compared to the controls lacking cytokine is indicative of the ability of the inventive purified IL-6-like polypeptide(s) to enhance the survival of neuronal cells.

### Example 60

### Assay for Phosphatase Activity

[1283] The following assay may be used to assess serine/threonine phosphatase (PTPase) activity of the polypeptides of the invention.

[1284] In order to assay for serine/threonine phosphatase (PTPase) activity, assays can be utilized which are widely known to those skilled in the art. For example, the serine/threonine phosphatase (PSPase) activity is measured using a PSPase assay kit from New England Biolabs, Inc. Myelin basic protein (MyBP), a substrate for PSPase, is phosphorylated on serine and threonine residues with cAMP-dependent Protein Kinase in the presence of [³²P]ATP. Protein serine/threonine phosphatase activity is then determined by measuring the release of inorganic phosphate from 32P-labeled MyBP.

### Example 61

### Interaction of Serine/Threonine Phosphatases with Other Proteins

[1285] The polypeptides of the invention with serine/threonine phosphatase activity as determined in Example 60 are research tools for the identification, characterization and purification of additional interacting proteins or receptor proteins, or other signal transduction pathway proteins. Briefly, labeled polypeptide(s) of the invention is useful as a reagent for the purification of molecules with which it interacts. In one embodiment of affinity purification, polypeptide of the invention is covalently coupled to a chromatography column. Cell-free extract derived from putative target cells, such as neural or liver cells, is passed over the column, and molecules with appropriate affinity bind to the polypeptides of the invention. The polypeptides of the invention-complex is recovered from the column, dissociated, and the recovered molecule subjected to N-terminal protein sequencing. This amino acid sequence is then used to identify the captured molecule or to design degenerate oligonucleotide probes for cloning the relevant gene from an appropriate cDNA library.

### Example 62

### Assaying for Heparanase Activity

[1286] In order to assay for heparanase activity of the polypeptides of the invention, the heparanase assay described by Vlodavsky et al is utilized (Vlodavsky, I., et al., Nat. Med., 5:793-802 (1999)). Briefly, cell lysates, conditioned media or intact cells (1×10⁶ cells per 35-mm dish) are incubated for 18 hrs at 37° C., pH 6.2-6.6, with ³⁵S-labeled ECM or soluble ECM derived peak I proteoglycans. The incubation medium is centrifuged and the supernatant is analyzed by gel filtration on a Sepharose CL-6B column (0.9×30 cm). Fractions are eluted with PBS and their radioactivity is measured. Degradation fragments of heparan sulfate side chains are eluted from Sepharose 6B at 0.5<Kₐᵥ<0.8 (peak II). Each experiment is done at least three times. Degradation fragments corresponding to “peak II,” as described by Vlodavsky et al., is indicative of the activity of the polypeptides of the invention in cleaving heparan sulfate.

### Example 63

### Immobilization of Biomolecules

[1287] This example provides a method for the stabilization of polypeptides of the invention in non-host cell lipid bilayer constucts (see, e.g., Bieri et al., Nature Biotech 17:1105-1108 (1999), hereby incorporated by reference in its entirety herein) which can be adapted for the study of polypeptides of the invention in the various functional assays described above. Briefly, carbohydrate-specific chemistry for biotinylation is used to confine a biotin tag to the extracellular domain of the polypeptides of the invention, thus allowing uniform orientation upon immobilization. A 50 uM solution of polypeptides of the invention in washed membranes is incubated with 20 mM NaIO4 and 1.5 mg/ml (4 mM) BACH or 2 mg/ml (7.5 mM) biotin-hydrazide for 1 hr at room temperature (reaction volume, 150 ul). Then the sample is dialyzed (Pierce Slidealizer Cassett, 10 kDa cutoff; Pierce Chemical Co., Rockford Ill.) at 4C first for 5 h, exchanging the buffer after each hour, and finally for 12 h against 500 ml buffer R (0.15 M NaCl, 1 mM MgCl2, 10 mM sodium phosphate, pH7). Just before addition into a cuvette, the sample is diluted 1:5 in buffer ROG50 (Buffer R supplemented with 50 mM octylglucoside).

### Example 64

### TAQMAN

[1288] Quantitative PCR (QPCR). Total RNA from cells in culture are extracted by Trizol separation as recommended by the supplier (LifeTechnologies). (Total RNA is treated with DNase I (Life Technologies) to remove any contaminating genomic DNA before reverse transcription.) Total RNA (50 ng) is used in a one-step, 50 ul, RT-QPCR, consisting of Taqman Buffer A (Perkin-Elmer; 50 mM KCl/10 mM Tris, pH 8.3), 5.5 mM MgCl₂, 240 μM each dNTP, 0.4 units RNase inhibitor (Promega), 8% glycerol, 0.012% Tween-20, 0.05% gelatin, 0.3 uM primers, 0.1 uM probe, 0.025 units Amplitaq Gold (Perkin-Elmer) and 2.5 units Superscript II reverse transcriptase (Life Technologies). As a control for genomic contamination, parallel reactions are setup without reverse transcriptase. The relative abundance of (unknown) and 18S RNAs are assessed by using the Applied Biosystems Prism 7700 Sequence Detection System (Livak, K. J., Flood, S. J., Marmaro, J., Giusti, W. & Deetz, K. (1995) PCR Methods Appl. 4, 357-362). Reactions are carried out at 48° C. for 30 min, 95° C. for 10 min, followed by 40 cycles of 95° C. for 15s, 60° C. for 1 min. Reactions are performed in triplicate.

[1289] Primers (f & r) and FRET probes sets are designed using Primer Express Software (Perkin-Elmer). Probes are labeled at the 5′-end with the reporter dye 6-FAM and on the 3′-end with the quencher dye TAMRA (Biosource International, Camarillo, Calif. or Perkin-Elmer).

### Example 65

### Assays for Metalloproteinase Activity

[1290] Metalloproteinases (EC 3.4.24.-) are peptide hydrolases which use metal ions, such as Zn²⁺, as the catalytic mechanism. Metalloproteinase activity of polypeptides of the present invention can be assayed according to the following methods.

[1291] Proteolysis of Alpha-2-Macroglobulin

[1292] To confirm protease activity, purified polypeptides of the invention are mixed with the substrate alpha-2-macroglobulin (0.2 unit/ml; Boehringer Mannheim, Germany) in 1× assay buffer (50 mM HEPES, pH 7.5, 0.2 M NaCl, 10 mM CaCl₂, 25 μM ZnCl₂ and 0.05% Brij-35) and incubated at 37° C. for 1-5 days. Trypsin is used as positive control. Negative controls contain only alpha-2-macroglobulin in assay buffer. The samples are collected and boiled in SDS-PAGE sample buffer containing 5% 2-mercaptoethanol for 5-min, then loaded onto 8% SDS-polyacrylamide gel. After electrophoresis the proteins are visualized by silver staining. Proteolysis is evident by the appearance of lower molecular weight bands as compared to the negative control.

[1293] Inhibition of Alpha-2-Macroglobulin Proteolysis by Inhibitors of Metalloproteinases

[1294] Known metalloproteinase inhibitors (metal chelators (EDTA, EGTA, AND HgCl₂), peptide metalloproteinase inhibitors (TIMP-1 and TIMP-2), and commercial small molecule MMP inhibitors) are used to characterize the proteolytic activity of polypeptides of the invention. The three synthetic MMP inhibitors used are: MMP inhibitor I, [IC₅₀=1.0 μM against MMP-1 and MMP-8; IC₅₀=30 μM against MMP-9; IC₅₀=150 μM against MMP-3]; MMP-3 (stromelysin-1) inhibitor I [IC₅₀=5 μM against MMP-3], and MMP-3 inhibitor II [Kᵢ=130 nM against MMP-3]; inhibitors available through Calbiochem, catalog # 444250, 444218, and 444225, respectively). Briefly, different concentrations of the small molecule MMP inhibitors are mixed with purified polypeptides of the invention (50 μg/ml) in 22.9 μl of 1× HEPES buffer (50 mM HEPES, pH 7.5, 0.2 M NaCl, 10 mM CaCl₂, 25 μM ZnCl₂ and 0.05% Brij-35) and incubated at room temperature (24° C.) for 2-hr, then 7.1 μl of substrate alpha-2-macroglobulin (0.2 unit/ml) is added and incubated at 37° C. for 20-hr. The reactions are stopped by adding 4× sample buffer and boiled immediately for 5 minutes. After SDS-PAGE, the protein bands are visualized by silver stain.

[1295] Synthetic Fluorogenic Peptide Substrates Cleavage Assay

[1296] The substrate specificity for polypeptides of the invention with demonstrated metalloproteinase activity can be determined using synthetic fluorogenic peptide substrates (purchased from BACHEM Bioscience Inc). Test substrates include, M-1985, M-2225, M-2105, M-2110, and M-2255. The first four are MMP substrates and the last one is a substrate of tumor necrosis factor-α (TNF-α) converting enzyme (TACE). All the substrates are prepared in 1:1 dimethyl sulfoxide (DMSO) and water. The stock solutions are 50-500 μM. Fluorescent assays are performed by using a Perkin Elmer LS 50B luminescence spectrometer equipped with a constant temperature water bath. The excitation λ is 328 nm and the emission λ is 393 nm. Briefly, the assay is carried out by incubating 176 μl 1× HEPES buffer (0.2 M NaCl, 10 mM CaCl₂, 0.05% Brij-35 and 50 mM HEPES, pH 7.5) with 4 μl of substrate solution (50 μM) at 25° C. for 15 minutes, and then adding 20 μl of a purified polypeptide of the invention into the assay cuvett. The final concentration of substrate is 1 μM. Initial hydrolysis rates are monitored for 30-min.

### Example 66

### Characterization of the cDNA Contained in a Deposited Plasmid

[1297] The size of the cDNA insert contained in a deposited plasmid may be routinely determined using techniques known in the art, such as PCR amplification using synthetic primers hybridizable to the 3′ and 5′ ends of the cDNA sequence. For example, two primers of 17-30 nucleotides derived from each end of the cDNA (i.e., hybridizable to the absolute 5′ nucleotide or the 3′ nucleotide end of the sequence of SEQ ID NO:X, respectively) are synthesized and used to amplify the cDNA using the deposited cDNA plasmid as a template. The polymerase chain reaction is carried out under routine conditions, for instance, in 25 ul of reaction mixture with 0.5 ug of the above cDNA template. A convenient reaction mixture is 1.5-5 mM MgCl₂, 0.01% (w/v) gelatin, 20 uM each of dATP, dCTP, dGTP, dTTP, 25 pmol of each primer and 0.25 Unit of Taq polymerase. Thirty five cycles of PCR (denaturation at 94 degree C. for 1 min; annealing at 55 degree C. for 1 min; elongation at 72 degree C. for 1 min) are performed with a Perkin-Elmer Cetus automated thermal cycler. The amplified product is analyzed by agarose gel electrophoresis. The PCR product is verified to be the selected sequence by subcloning and sequencing the DNA product. It will be clear that the invention may be practiced otherwise than as particularly described in the foregoing description and examples. Numerous modifications and variations of the present invention are possible in light of the above teachings and, therefore, are within the scope of the appended claims.

Incorporation by Reference

[1298] The entire disclosure of each document cited (including patents, patent applications, journal articles, abstracts, laboratory manuals, books, or other disclosures) in the Background of the Invention, Detailed Description, and Examples is hereby incorporated herein by reference. In addition, the sequence listing submitted herewith is incorporated herein by reference in its entirety. The specification and sequence listing of each of the following U.S. and PCT applications are herein incorporated by reference in their entirety: U.S. Appln. No. 60/040,162 filed on 07 Mar. 1997, U.S. Appln. No. 60/043,576 filed on 11 Apr. 1997, U.S. Appln. No. 60/047,601 filed on 23 May 1997, U.S. Appln. No. 60/056,845 filed on 22 Aug. 1997, U.S. Appln. No. 60/043,580 filed on 11 Apr. 1997, U.S. Appln. No. 60/047,599 filed on 23 May 1997, U.S. Appln. No. 60/056,664 filed on 22 Aug. 1997, U.S. Appln. No. 60/043,314 filed on 11 Apr. 1997, U.S. Appln. No. 60/047,632 filed on 23 May 1997, U.S. Appln. No. 60/056,892 filed on 22 Aug. 1997, U.S. Appln. No. 60/043,568 filed on 11 Apr. 1997, U.S. Appln. No. 60/047,595 filed on 23 May 1997, U.S. Appln. No. 60/056,632 filed on 22 Aug. 1997, U.S. Appln. No. 60/043,578 filed on 11 Apr. 1997, U.S. Appln. No. 60/040,333 filed on 07 Mar. 1997, U.S. Appln. No. 60/043,670 filed on 11 Apr. 1997, U.S. Appln. No. 60/047,596 filed on 23 May 1997, U.S. Appln. No. 60/056,864 filed on 22 Aug. 1997, U.S. Appln. No. 60/043,674 filed on 11 Apr. 1997, U.S. Appln. No. 60/047,612 filed on 23 May 1997, U.S. Appln. No. 60/056,631 filed on 22 Aug. 1997, U.S. Appln. No. 60/043,569 filed on 11 Apr. 1997, U.S. Appln. No. 60/047,588 filed on 23 May 1997, U.S. Appln. No. 60/056,876 filed on 22 Aug. 1997, U.S. Appln. No. 60/043,671 filed on 11 Apr. 1997, U.S. Appln. No. 60/043,311 filed on 11 Apr. 1997, U.S. Appln. No. 60/038,621 filed on 07 Mar. 1997, U.S. Appln. No. 60/043,672 filed on 11 Apr. 1997, U.S. Appln. No. 60/047,613 filed on 23 May 1997, U.S. Appln. No. 60/056,636 filed on 22 Aug. 1997, U.S. Appln. No. 60/043,669 filed on 11 Apr. 1997, U.S. Appln. No. 60/047,582 filed on 23 May 1997, U.S. Appln. No. 60/056,910 filed on 22 Aug. 1997, U.S. Appln. No. 60/043,315 filed on 11 Apr. 1997, U.S. Appln. No. 60/047,598 filed on 23 May 1997, U.S. Appln. No. 60/056,874 filed on 22 Aug. 1997, U.S. Appln. No. 60/043,312 filed on 11 Apr. 1997, U.S. Appln. No. 60/047,585 filed on 23 May 1997, U.S. Appln. No. 60/056,881 filed on 22 Aug. 1997, U.S. Appln. No. 60/043,313 filed on 11 Apr. 1997, U.S. Appln. No. 60/047,586 filed on 23 May 1997, U.S. Appln. No. 60/056,909 filed on 22 Aug. 1997, U.S. Appln. No. 60/040,161 filed on 07 Mar. 1997, U.S. Appln. No. 60/047,587 filed on 23 May 1997, U.S. Appln. No. 60/056,879 filed on 22 Aug. 1997, U.S. Appln. No. 60/047,500 filed on 23 May 1997, U.S. Appln. No. 60/056,880 filed on 22 Aug. 1997, U.S. Appln. No. 60/047,584 filed on 23 May 1997, U.S. Appln. No. 60/056,894 filed on 22 Aug. 1997, U.S. Appln. No. 60/047,492 filed on 23 May 1997, U.S. Appln. No. 60/056,911 filed on 22 Aug. 1997, U.S. Appln. No. 60/040,626 filed on 07 Mar. 1997, U.S. Appln. No. 60/047,503 filed on 23 May 1997, U.S. Appln. No. 60/056,903 filed on 22 Aug. 1997, U.S. Appln. No. 60/047,501 filed on 23 May 1997, U.S. Appln. No. 60/056,637 filed on 22 Aug. 1997, U.S. Appln. No. 60/047,590 filed on 23 May 1997, U.S. Appln. No. 60/056,875 filed on 22 Aug. 1997, U.S. Appln. No. 60/047,581 filed on 23 May 1997, U.S. Appln. No. 60/056,882 filed on 22 Aug. 1997, U.S. Appln. No. 60/047,592 filed on 23 May 1997, U.S. Appln. No. 60/056,888 filed on 22 Aug. 1997, U.S. Appln. No. 60/040,334 filed on 07 Mar. 1997, U.S. Appln. No. 60/047,618 filed on 23 May 1997, U.S. Appln. No. 60/056,872 filed on 22 Aug. 1997, U.S. Appln. No. 60/047,617 filed on 23 May 1997, U.S. Appln. No. 60/056,662 filed on 22 Aug. 1997, U.S. Appln. No. 60/047,589 filed on 23 May 1997, U.S. Appln. No. 60/056,862 filed on 22 Aug. 1997, U.S. Appln. No. 60/047,594 filed on 23 May 1997, U.S. Appln. No. 60/056,884 filed on 22 Aug. 1997, U.S. Appln. No. 60/047,583 filed on 23 May 1997, U.S. Appln. No. 60/056,878 filed on 22 Aug. 1997, U.S. Appln. No. 60/040,336 filed on 07 Mar. 1997, U.S. Appln. No. 60/047,502 filed on 23 May 1997, U.S. Appln. No. 60/056,893 filed on 22 Aug. 1997, U.S. Appln. No. 60/047,633 filed on 23 May 1997, U.S. Appln. No. 60/056,630 filed on 22 Aug. 1997, U.S. Appln. No. 60/047,593 filed on 23 May 1997, U.S. Appln. No. 60/056,887 filed on 22 Aug. 1997, U.S. Appln. No. 60/040,163 filed on 07 Mar. 1997, U.S. Appln. No. 60/047,597 filed on 23 May 1997, U.S. Appln. No. 60/056,889 filed on 22 Aug. 1997, U.S. Appln. No. 60/047,615 filed on 23 May 1997, U.S. Appln. No. 60/056,877 filed on 22 Aug. 1997, U.S. Appln. No. 60/047,600 filed on 23 May 1997, U.S. Appln. No. 60/056,886 filed on 22 Aug. 1997, U.S. Appln. No. 60/047,614 filed on 23 May 1997, U.S. Appln. No. 60/056,908 filed on 22 Aug. 1997, U.S. Appln. No. 60/040,710 filed on 14 Mar. 1997, U.S. Appln. No. 60/050,934 filed on 30 May 1997, U.S. Appln. No. 60/048,100 filed on 30 May 1997, U.S. Appln. No. 60/040,762 filed on 14 Mar. 1997, U.S. Appln. No. 60/048,357 filed on 30 May 1997, U.S. Appln. No. 60/048,189 filed on 30 May 1997, U.S. Appln. No. 60/041,277 filed on 21 Mar. 1997, U.S. Appln. No. 60/048,188 filed on 30 May 1997, U.S. Appln. No. 60/048,094 filed on 30 May 1997, U.S. Appln. No. 60/048,350 filed on 30 May 1997, U.S. Appln. No. 60/048,135 filed on 30 May 1997, U.S. Appln. No. 60/042,344 filed on 21 Mar. 1997, U.S. Appln. No. 60/048,187 filed on 30 May 1997, U.S. Appln. No. 60/048,099 filed on 30 May 1997, U.S. Appln. No. 60/050,937 filed on 30 May 1997, U.S. Appln. No. 60/048,352 filed on 30 May 1997, U.S. Appln. No. 60/041,276 filed on 21 Mar. 1997, U.S. Appln. No. 60/048,069 filed on 30 May 1997, U.S. Appln. No. 60/048,131 filed on 30 May 1997, U.S. Appln. No. 60/048,186 filed on 30 May 1997, U.S. Appln. No. 60/048,095 filed on 30 May 1997, U.S. Appln. No. 60/041,281 filed on 21 Mar. 1997, U.S. Appln. No. 60/048,355 filed on 30 May 1997, U.S. Appln. No. 60/048,096 filed on 30 May 1997, U.S. Appln. No. 60/048,351 filed on 30 May 1997, U.S. Appln. No. 60/048,154 filed on 30 May 1997, U.S. Appln. No. 60/048,160 filed on 30 May 1997, U.S. Appln. No. 60/042,825 filed on 08 Apr. 1997, U.S. Appln. No. 60/048,070 filed on 30 May 1997, U.S. Appln. No. 60/042,727 filed on 08 Apr. 1997, U.S. Appln. No. 60/048,068 filed on 30 May 1997, U.S. Appln. No. 60/042,726 filed on 08 Apr. 1997, U.S. Appln. No. 60/048,184 filed on 30 May 1997, U.S. Appln. No. 60/042,728 filed on 08 Apr. 1997, U.S. Appln. No. 60/042,754 filed on 08 Apr. 1997, U.S. Appln. No. 60/048,190 filed on 30 May 1997, U.S. Appln. No. 60/044,039 filed on 30 May 1997, U.S. Appln. No. 60/048,093 filed on 30 May 1997, U.S. Appln. No. 60/048,885 filed on 06 Jun. 1997, U.S. Appln. No. 60/057,645 filed on 05 Sep. 1997, U.S. Appln. No. 60/049,375 filed on 06 Jun. 1997, U.S. Appln. No. 60/057,642 filed on 05 Sep. 1997, U.S. Appln. No. 60/048,881 filed on 06 Jun. 1997, U.S. Appln. No. 60/057,668 filed on 05 Sep. 1997, U.S. Appln. No. 60/048,880 filed on 06 Jun. 1997, U.S. Appln. No. 60/057,635 filed on 05 Sep. 1997, U.S. Appln. No. 60/048,896 filed on 06 Jun. 1997, U.S. Appln. No. 60/057,627 filed on 05 Sep. 1997, U.S. Appln. No. 60/049,020 filed on 06 Jun. 1997, U.S. Appln. No. 60/057,667 filed on 05 Sep. 1997, U.S. Appln. No. 60/048,876 filed on 06 Jun. 1997, U.S. Appln. No. 60/057,666 filed on 05 Sep. 1997, U.S. Appln. No. 60/048,895 filed on 06 Jun. 1997, U.S. Appln. No. 60/057,764 filed on 05 Sep. 1997, U.S. Appln. No. 60/048,884 filed on 06 Jun. 1997, U.S. Appln. No. 60/057,643 filed on 05 Sep. 1997, U.S. Appln. No. 60/048,894 filed on 06 Jun. 1997, U.S. Appln. No. 60/057,769 filed on 05 Sep. 1997, U.S. Appln. No. 60/048,971 filed on 06 Jun. 1997, U.S. Appln. No. 60/057,763 filed on 05 Sep. 1997, U.S. Appln. No. 60/048,964 filed on 06 Jun. 1997, U.S. Appln. No. 60/057,650 filed on 05 Sep. 1997, U.S. Appln. No. 60/048,882 filed on 06 Jun. 1997, U.S. Appln. No. 60/057,584 filed on 05 Sep. 1997, U.S. Appln. No. 60/048,899 filed on 06 Jun. 1997, U.S. Appln. No. 60/057,647 filed on 05 Sep. 1997, U.S. Appln. No. 60/048,893 filed on 06 Jun. 1997, U.S. Appln. No. 60/057,661 filed on 05 Sep. 1997, U.S. Appln. No. 60/048,900 filed on 06 Jun. 1997, U.S. Appln. No. 60/057,662 filed on 05 Sep. 1997, U.S. Appln. No. 60/048,901 filed on 06 Jun. 1997, U.S. Appln. No. 60/057,646 filed on 05 Sep. 1997, U.S. Appln. No. 60/048,892 filed on 06 Jun. 1997, U.S. Appln. No. 60/057,654 filed on 05 Sep. 1997, U.S. Appln. No. 60/048,915 filed on 06 Jun. 1997, U.S. Appln. No. 60/057,651 filed on 05 Sep. 1997, U.S. Appln. No. 60/049,019 filed on 06 Jun. 1997, U.S. Appln. No. 60/057,644 filed on 05 Sep. 1997, U.S. Appln. No. 60/048,970 filed on 06 Jun. 1997, U.S. Appln. No. 60/057,765 filed on 05 Sep. 1997, U.S. Appln. No. 60/048,972 filed on 06 Jun. 1997, U.S. Appln. No. 60/057,762 filed on 05 Sep. 1997, U.S. Appln. No. 60/048,916 filed on 06 Jun. 1997, U.S. Appln. No. 60/057,775 filed on 05 Sep. 1997, U.S. Appln. No. 60/049,373 filed on 06 Jun. 1997, U.S. Appln. No. 60/057,648 filed on 05 Sep. 1997, U.S. Appln. No. 60/048,875 filed on 06 Jun. 1997, U.S. Appln. No. 60/057,774 filed on 05 Sep. 1997, U.S. Appln. No. 60/049,374 filed on 06 Jun. 1997, U.S. Appln. No. 60/057,649 filed on 05 Sep. 1997, U.S. Appln. No. 60/048,917 filed on 06 Jun. 1997, U.S. Appln. No. 60/057,770 filed on 05 Sep. 1997, U.S. Appln. No. 60/048,949 filed on 06 Jun. 1997, U.S. Appln. No. 60/057,771 filed on 05 Sep. 1997, U.S. Appln. No. 60/048,974 filed on 06 Jun. 1997, U.S. Appln. No. 60/057,761 filed on 05 Sep. 1997, U.S. Appln. No. 60/048,883 filed on 06 Jun. 1997, U.S. Appln. No. 60/057,760 filed on 05 Sep. 1997, U.S. Appln. No. 60/048,897 filed on 06 Jun. 1997, U.S. Appln. No. 60/057,776 filed on 05 Sep. 1997, U.S. Appln. No. 60/048,898 filed on 06 Jun. 1997, U.S. Appln. No. 60/057,778 filed on 05 Sep. 1997, U.S. Appln. No. 60/048,962 filed on 06 Jun. 1997, U.S. Appln. No. 60/057,629 filed on 05 Sep. 1997, U.S. Appln. No. 60/048,963 filed on 06 Jun. 1997, U.S. Appln. No. 60/057,628 filed on 05 Sep. 1997, U.S. Appln. No. 60/048,877 filed on 06 Jun. 1997, U.S. Appln. No. 60/057,777 filed on 05 Sep. 1997, U.S. Appln. No. 60/048,878 filed on 06 Jun. 1997, U.S. Appln. No. 60/057,634 filed on 05 Sep. 1997, U.S. Appln. No. 60/049,608 filed on 13 Jun. 1997, U.S. Appln. No. 60/058,669 filed on 12 Sep. 1997, U.S. Appln. No. 60/049,566 filed on 13 Jun. 1997, U.S. Appln. No. 60/058,668 filed on 12 Sep. 1997, U.S. Appln. No. 60/052,989 filed on 13 Jun. 1997, U.S. Appln. No. 60/058,750 filed on 12 Sep. 1997, U.S. Appln. No. 60/049,607 filed on 13 Jun. 1997, U.S. Appln. No. 60/058,665 filed on 12 Sep. 1997, U.S. Appln. No. 60/049,611 filed on 13 Jun. 1997, U.S. Appln. No. 60/058,971 filed on 12 Sep. 1997, U.S. Appln. No. 60/050,901 filed on 13 Jun. 1997, U.S. Appln. No. 60/058,972 filed on 12 Sep. 1997, U.S. Appln. No. 60/049,609 filed on 13 Jun. 1997, U.S. Appln. No. 60/058,975 filed on 12 Sep. 1997, U.S. Appln. No. 60/048,356 filed on 30 May 1997, U.S. Appln. No. 60/056,296 filed on 29 Aug. 1997, U.S. Appln. No. 60/048,101 filed on 30 May 1997, U.S. Appln. No. 60/056,293 filed on 29 Aug. 1997, U.S. Appln. No. 60/050,935 filed on 30 May 1997, U.S. Appln. No. 60/056,250 filed on 29 Aug. 1997, U.S. Appln. No. 60/049,610 filed on 13 Jun. 1997, U.S. Appln. No. 60/061,060 filed on 02 Oct. 1997, U.S. Appln. No. 60/049,606 filed on 13 Jun. 1997, U.S. Appln. No. 60/060,841 filed on 02 Oct. 1997, U.S. Appln. No. 60/049,550 filed on 13 Jun. 1997, U.S. Appln. No. 60/060,834 filed on 02 Oct. 1997, U.S. Appln. No. 60/049,549 filed on 13 Jun. 1997, U.S. Appln. No. 60/060,865 filed on 02 Oct. 1997, U.S. Appln. No. 60/049,548 filed on 13 Jun. 1997, U.S. Appln. No. 60/060,844 filed on 02 Oct. 1997, U.S. Appln. No. 60/049,547 filed on 13 Jun. 1997, U.S. Appln. No. 60/061,059 filed on 02 Oct. 1997, U.S. Appln. No. 60/051,381 filed on 01 Jul. 1997, U.S. Appln. No. 60/058,598 filed on 12 Sep. 1997, U.S. Appln. No. 60/051,480 filed on 01 Jul. 1997, U.S. Appln. No. 60/058,663 filed on 12 Sep. 1997, U.S. Appln. No. 60/051,926 filed on 08 Jul. 1997, U.S. Appln. No. 60/058,785 filed on 12 Sep. 1997, U.S. Appln. No. 60/052,793 filed on 08 Jul. 1997, U.S. Appln. No. 60/058,664 filed on 12 Sep. 1997, U.S. Appln. No. 60/051,925 filed on 08 Jul. 1997, U.S. Appln. No. 60/058,660 filed on 12 Sep. 1997, U.S. Appln. No. 60/051,929 filed on 08 Jul. 1997, U.S. Appln. No. 60/058,661 filed on 12 Sep. 1997, U.S. Appln. No. 60/052,803 filed on 08 Jul. 1997, U.S. Appln. No. 60/055,722 filed on 18 Aug. 1997, U.S. Appln. No. 60/052,732 filed on 08 Jul. 1997, U.S. Appln. No. 60/055,723 filed on 18 Aug. 1997, U.S. Appln. No. 60/051,932 filed on 08 Jul. 1997, U.S. Appln. No. 60/055,948 filed on 18 Aug. 1997, U.S. Appln. No. 60/051,931 filed on 08 Jul. 1997, U.S. Appln. No. 60/055,949 filed on 18 Aug. 1997, U.S. Appln. No. 60/051,916 filed on 08 Jul. 1997, U.S. Appln. No. 60/055,953 filed on 18 Aug. 1997, U.S. Appln. No. 60/051,930 filed on 08 Jul. 1997, U.S. Appln. No. 60/055,950 filed on 18 Aug. 1997, U.S. Appln. No. 60/051,918 filed on 08 Jul. 1997, U.S. Appln. No. 60/055,947 filed on 18 Aug. 1997, U.S. Appln. No. 60/051,920 filed on 08 Jul. 1997, U.S. Appln. No. 60/055,964 filed on 18 Aug. 1997, U.S. Appln. No. 60/052,733 filed on 08 Jul. 1997, U.S. Appln. No. 60/056,360 filed on 18 Aug. 1997, U.S. Appln. No. 60/052,795 filed on 08 Jul. 1997, U.S. Appln. No. 60/055,684 filed on 18 Aug. 1997, U.S. Appln. No. 60/051,919 filed on 08 Jul. 1997, U.S. Appln. No. 60/055,984 filed on 18 Aug. 1997, U.S. Appln. No. 60/051,928 filed on 08 Jul. 1997, U.S. Appln. No. 60/055,954 filed on 18 Aug. 1997, U.S. Appln. No. 60/052,870 filed on 16 Jul. 1997, U.S. Appln. No. 60/055,952 filed on 18 Aug. 1997, U.S. Appln. No. 60/052,871 filed on 16 Jul. 1997, U.S. Appln. No. 60/055,725 filed on 18 Aug. 1997, U.S. Appln. No. 60/052,872 filed on 16 Jul. 1997, U.S. Appln. No. 60/056,359 filed on 18 Aug. 1997, U.S. Appln. No. 60/052,661 filed on 16 Jul. 1997, U.S. Appln. No. 60/055,985 filed on 18 Aug. 1997, U.S. Appln. No. 60/052,874 filed on 16 Jul. 1997, U.S. Appln. No. 60/055,724 filed on 18 Aug. 1997, U.S. Appln. No. 60/052,873 filed on 16 Jul. 1997, U.S. Appln. No. 60/055,726 filed on 18 Aug. 1997, U.S. Appln. No. 60/052,875 filed on 16 Jul. 1997, U.S. Appln. No. 60/056,361 filed on 18 Aug. 1997, U.S. Appln. No. 60/053,440 filed on 22 Jul. 1997, U.S. Appln. No. 60/055,989 filed on 18 Aug. 1997, U.S. Appln. No. 60/053,441 filed on 22 Jul. 1997, U.S. Appln. No. 60/055,946 filed on 18 Aug. 1997, U.S. Appln. No. 60/053,442 filed on 22 Jul. 1997, U.S. Appln. No. 60/055,683 filed on 18 Aug. 1997, U.S. Appln. No. 60/054,212 filed on 30 Jul. 1997, U.S. Appln. No. 60/055,968 filed on 18 Aug. 1997, U.S. Appln. No. 60/054,209 filed on 30 Jul. 1997, U.S. Appln. No. 60/055,972 filed on 18 Aug. 1997, U.S. Appln. No. 60/054,234 filed on 30 Jul. 1997, U.S. Appln. No. 60/055,969 filed on 18 Aug. 1997, U.S. Appln. No. 60/055,386 filed on 05 Aug. 1997, U.S. Appln. No. 60/055,986 filed on 18 Aug. 1997, U.S. Appln. No. 60/054,807 filed on 05 Aug. 1997, U.S. Appln. No. 60/055,970 filed on 18 Aug. 1997, U.S. Appln. No. 60/054,215 filed on 30 Jul. 1997, U.S. Appln. No. 60/056,543 filed on 19 Aug. 1997, U.S. Appln. No. 60/054,218 filed on 30 Jul. 1997, U.S. Appln. No. 60/056,561 filed on 19 Aug. 1997, U.S. Appln. No. 60/054,214 filed on 30 Jul. 1997, U.S. Appln. No. 60/056,534 filed on 19 Aug. 1997, U.S. Appln. No. 60/054,236 filed on 30 Jul. 1997, U.S. Appln. No. 60/056,729 filed on 19 Aug. 1997, U.S. Appln. No. 60/054,213 filed on 30 Jul. 1997, U.S. Appln. No. 60/056,727 filed on 19 Aug. 1997, U.S. Appln. No. 60/054,211 filed on 30 Jul. 1997, U.S. Appln. No. 60/056,554 filed on 19 Aug. 1997, U.S. Appln. No. 60/054,217 filed on 30 Jul. 1997, U.S. Appln. No. 60/056,730 filed on 19 Aug. 1997, U.S. Appln. No. 60/055,312 filed on 05 Aug. 1997, U.S. Appln. No. 60/056,563 filed on 19 Aug. 1997, U.S. Appln. No. 60/055,309 filed on 05 Aug. 1997, U.S. Appln. No. 60/056,557 filed on 19 Aug. 1997, U.S. Appln. No. 60/055,310 filed on 05 Aug. 1997, U.S. Appln. No. 60/056,371 filed on 19 Aug. 1997, U.S. Appln. No. 60/054,798 filed on 05 Aug. 1997, U.S. Appln. No. 60/056,732 filed on 19 Aug. 1997, U.S. Appln. No. 60/056,369 filed on 19 Aug. 1997, U.S. Appln. No. 60/056,535 filed on 19 Aug. 1997, U.S. Appln. No. 60/056,556 filed on 19 Aug. 1997, U.S. Appln. No. 60/056,555 filed on 19 Aug. 1997, U.S. Appln. No. 60/054,806 filed on 05 Aug. 1997, U.S. Appln. No. 60/056,366 filed on 19 Aug. 1997, U.S. Appln. No. 60/054,809 filed on 05 Aug. 1997, U.S. Appln. No. 60/056,364 filed on 19 Aug. 1997, U.S. Appln. No. 60/054,804 filed on 05 Aug. 1997, U.S. Appln. No. 60/056,370 filed on 19 Aug. 1997, U.S. Appln. No. 60/054,803 filed on 05 Aug. 1997, U.S. Appln. No. 60/056,731 filed on 19 Aug. 1997, U.S. Appln. No. 60/055,311 filed on 05 Aug. 1997, U.S. Appln. No. 60/056,365 filed on 19 Aug. 1997, U.S. Appln. No. 60/054,808 filed on 05 Aug. 1997, U.S. Appln. No. 60/056,367 filed on 19 Aug. 1997, U.S. Appln. No. 60/056,726 filed on 19 Aug. 1997, U.S. Appln. No. 60/056,368 filed on 19 Aug. 1997, U.S. Appln. No. 60/056,728 filed on 19 Aug. 1997, U.S. Appln. No. 60/056,628 filed on 19 Aug. 1997, U.S. Appln. No. 60/056,629 filed on 19 Aug. 1997, U.S. Appln. No. 60/056,270 filed on 29 Aug. 1997, U.S. Appln. No. 60/056,271 filed on 29 Aug. 1997, U.S. Appln. No. 60/056,247 filed on 29 Aug. 1997, U.S. Appln. No. 60/056,073 filed on 29 Aug. 1997, U.S. Appln. No. 60/057,669 filed on 05 Sep. 1997, U.S. Appln. No. 60/057,663 filed on 05 Sep. 1997, U.S. Appln. No. 60/057,626 filed on 05 Sep. 1997, U.S. Appln. No. 60/058,666 filed on 12 Sep. 1997, U.S. Appln. No. 60/058,973 filed on 12 Sep. 1997, U.S. Appln. No. 60/058,974 filed on 12 Sep. 1997, U.S. Appln. No. 60/058,667 filed on 12 Sep. 1997, U.S. Appln. No. 60/060,837 filed on 02 Oct. 1997, U.S. Appln. No. 60/060,862 filed on 02 Oct. 1997, U.S. Appln. No. 60/060,839 filed on 02 Oct. 1997, U.S. Appln. No. 60/060,866 filed on 02 Oct. 1997, U.S. Appln. No. 60/060,843 filed on 02 Oct. 1997, U.S. Appln. No. 60/060,836 filed on 02 Oct. 1997, U.S. Appln. No. 60/060,838 filed on 02 Oct. 1997, U.S. Appln. No. 60/060,874 filed on 02 Oct. 1997, U.S. Appln. No. 60/060,833 filed on 02 Oct. 1997, U.S. Appln. No. 60/060,884 filed on 02 Oct. 1997, U.S. Appln. No. 60/060,880 filed on 02 Oct. 1997, U.S. Appln. No. 60/061,463 filed on 09 Oct. 1997, U.S. Appln. No. 60/061,529 filed on 09 Oct. 1997, U.S. Appln. No. 60/071,498 filed on 09 Oct. 1997, U.S. Appln. No. 60/061,527 filed on 09 Oct. 1997, U.S. Appln. No. 60/061,536 filed on 09 Oct. 1997, U.S. Appln. No. 60/061,532 filed on 09 Oct. 1997, U.S. Appln. No. 60/063,099 filed on 24 Oct. 1997, U.S. Appln. No. 60/063,088 filed on 24 Oct. 1997, U.S. Appln. No. 60/063,100 filed on 24 Oct. 1997, U.S. Appln. No. 60/063,387 filed on 24 Oct. 1997, U.S. Appln. No. 60/063,148 filed on 24 Oct. 1997, U.S. Appln. No. 60/063,386 filed on 24 Oct. 1997, U.S. Appln. No. 60/062,784 filed on 24 Oct. 1997, U.S. Appln. No. 60/063,091 filed on 24 Oct. 1997, U.S. Appln. No. 60/063,090 filed on 24 Oct. 1997, U.S. Appln. No. 60/063,089 filed on 24 Oct. 1997, U.S. Appln. No. 60/063,092 filed on 24 Oct. 1997, U.S. Appln. No. 60/063,111 filed on 24 Oct. 1997, U.S. Appln. No. 60/063,101 filed on 24 Oct. 1997, U.S. Appln. No. 60/063,109 filed on 24 Oct. 1997, U.S. Appln. No. 60/063,110 filed on 24 Oct. 1997, U.S. Appln. No. 60/063,098 filed on 24 Oct. 1997, U.S. Appln. No. 60/063,097 filed on 24 Oct. 1997, U.S. Appln. No. 60/064,911 filed on 07 Nov. 1997, U.S. Appln. No. 60/064,912 filed on 07 Nov. 1997, U.S. Appln. No. 60/064,983 filed on 07 Nov. 1997, U.S. Appln. No. 60/064,900 filed on 07 Nov. 1997, U.S. Appln. No. 60/064,988 filed on 07 Nov. 1997, U.S. Appln. No. 60/064,987 filed on 07 Nov. 1997, U.S. Appln. No. 60/064,908 filed on 07 Nov. 1997, U.S. Appln. No. 60/064,984 filed on 07 Nov. 1997, U.S. Appln. No. 60/064,985 filed on 07 Nov. 1997, U.S. Appln. No. 60/066,094 filed on 17 Nov. 1997, U.S. Appln. No. 60/066,100 filed on 17 Nov. 1997, U.S. Appln. No. 60/066,089 filed on 17 Nov. 1997, U.S. Appln. No. 60/066,095 filed on 17 Nov. 1997, U.S. Appln. No. 60/066,090 filed on 17 Nov. 1997, U.S. Appln. No. 60/068,006 filed on 18 Dec. 1997, U.S. Appln. No. 60/068,057 filed on 18 Dec. 1997, U.S. Appln. No. 60/068,007 filed on 18 Dec. 1997, U.S. Appln. No. 60/068,008 filed on 18 Dec. 1997, U.S. Appln. No. 60/068,054 filed on 18 Dec. 1997, U.S. Appln. No. 60/068,064 filed on 18 Dec. 1997, U.S. Appln. No. 60/068,053 filed on 18 Dec. 1997, U.S. Appln. No. 60/070,923 filed on 18 Dec. 1997, U.S. Appln. No. 60/068,365 filed on 19 Dec. 1997, U.S. Appln. No. 60/068,169 filed on 19 Dec. 1997, U.S. Appln. No. 60/068,367 filed on 19 Dec. 1997, U.S. Appln. No. 60/068,369 filed on 19 Dec. 1997, U.S. Appln. No. 60/068,368 filed on 19 Dec. 1997, U.S. Appln. No. 60/070,657 filed on 07 Jan. 1998, U.S. Appln. No. 60/070,692 filed on 07 Jan. 1998, U.S. Appln. No. 60/070,704 filed on 07 Jan. 1998, U.S. Appln. No. 60/070,658 filed on 07 Jan. 1998, U.S. Appln. No. 60/073,160 filed on 30 Jan. 1998, U.S. Appln. No. 60/073,159 filed on 30 Jan. 1998, U.S. Appln. No. 60/073,165 filed on 30 Jan. 1998, U.S. Appln. No. 60/073,164 filed on 30 Jan. 1998, U.S. Appln. No. 60/073,167 filed on 30 Jan. 1998, U.S. Appln. No. 60/073,162 filed on 30 Jan. 1998, U.S. Appln. No. 60/073,161 filed on 30 Jan. 1998, U.S. Appln. No. 60/073,170 filed on 30 Jan. 1998, U.S. Appln. No. 60/074,141 filed on 09 Feb. 1998, U.S. Appln. No. 60/074,341 filed on 09 Feb. 1998, U.S. Appln. No. 60/074,037 filed on 09 Feb. 1998, U.S. Appln. No. 60/074,157 filed on 09 Feb. 1998, U.S. Appln. No. 60/074,118 filed on 09 Feb. 1998, U.S. Appln. No. 60/076,051 filed on 26 Feb. 1998, U.S. Appln. No. 60/076,053 filed on 26 Feb. 1998, U.S. Appln. No. 60/076,054 filed on 26 Feb. 1998, U.S. Appln. No. 60/076,052 filed on 26 Feb. 1998, U.S. Appln. No. 60/076,057 filed on 26 Feb. 1998, U.S. Appln. No. 60/077,714 filed on 12 Mar. 1998, U.S. Appln. No. 60/077,687 filed on 12 Mar. 1998, U.S. Appln. No. 60/077,686 filed on 12 Mar. 1998, U.S. Appln. No. 60/077,696 filed on 12 Mar. 1998, U.S. Appln. No. 60/078,566 filed on 19 Mar. 1998, U.S. Appln. No. 60/078,574 filed on 19 Mar. 1998, U.S. Appln. No. 60/078,576 filed on 19 Mar. 1998, U.S. Appln. No. 60/078,579 filed on 19 Mar. 1998, U.S. Appln. No. 60/078,563 filed on 19 Mar. 1998, U.S. Appln. No. 60/078,573 filed on 19 Mar. 1998, U.S. Appln. No. 60/078,578 filed on 19 Mar. 1998, U.S. Appln. No. 60/078,581 filed on 19 Mar. 1998, U.S. Appln. No. 60/078,577 filed on 19 Mar. 1998, U.S. Appln. No. 60/080,314 filed on 01 Apr. 1998, U.S. Appln. No. 60/080,312 filed on 01 Apr. 1998, U.S. Appln. No. 60/080,313 filed on 01 Apr. 1998, U.S. Appln. No. 60/085,180 filed on 12 May 1998, U.S. Appln. No. 60/085,105 filed on 12 May 1998, U.S. Appln. No. 60/085,094 filed on 12 May 1998, U.S. Appln. No. 60/085,093 filed on 12 May 1998, U.S. Appln. No. 60/085,924 filed on 18 May 1998, U.S. Appln. No. 60/085,906 filed on 18 May 1998, U.S. Appln. No. 60/085,927 filed on 18 May 1998, U.S. Appln. No. 60/085,920 filed on 18 May 1998, U.S. Appln. No. 60/085,928 filed on 18 May 1998, U.S. Appln. No. 60/085,925 filed on 18 May 1998, U.S. Appln. No. 60/085,921 filed on 18 May 1998, U.S. Appln. No. 60/085,923 filed on 18 May 1998, U.S. Appln. No. 60/085,922 filed on 18 May 1998, U.S. Appln. No. 60/090,112 filed on 22 Jun. 1998, U.S. Appln. No. 60/089,508 filed on 16 Jun. 1998, U.S. Appln. No. 60/089,507 filed on 16 Jun. 1998, U.S. Appln. No. 60/089,510 filed on 16 Jun. 1998, U.S. Appln. No. 60/089,509 filed on 16 Jun. 1998, U.S. Appln. No. 60/090,113 filed on 22 Jun. 1998, U.S. Appln. No. 60/092,956 filed on 15 Jul. 1998, U.S. Appln. No. 60/092,921 filed on 15 Jul. 1998, U.S. Appln. No. 60/092,922 filed on 15 Jul. 1998, U.S. Appln. No. 60/094,657 filed on 30 Jul. 1998, U.S. Appln. No. 60/095,486 filed on 05 Aug. 1998, U.S. Appln. No. 60/096,319 filed on 12 Aug. 1998, U.S. Appln. No. 60/095,455 filed on 06 Aug. 1998, U.S. Appln. No. 60/095,454 filed on 06 Aug. 1998, U.S. Appln. No. 60/097,917 filed on 25 Aug. 1998, U.S. Appln. No. 60/098,634 filed on 31 Aug. 1998, U.S. Appln. No. 60/101,546 filed on 23 Sep. 1998, U.S. Appln. No. 60/102,895 filed on 02 Oct. 1998, U.S. Appln. No. 60/108,207 filed on 12 Nov. 1998, U.S. Appln. No. 60/113,006 filed on 18 Dec. 1998, U.S. Appln. No. 60/112,809 filed on 17 Dec. 1998, U.S. Appln. No. 60/116,330 filed on 19 Jan. 1999, U.S. Appln. No. 60/119,468 filed on 10 Feb. 1999, U.S. Appln. No. 60/125,055 filed on 18 Mar. 1999, U.S. Appln. No. 60/128,693 filed on 09 Apr. 1999, U.S. Appln. No. 60/130,991 filed on 26 Apr. 1999, U.S. Appln. No. 60/137,725 filed on 07 Jun. 1999, U.S. Appln. No. 60/145,220 filed on 23 Jul. 1999, U.S. Appln. No. 60/149,182 filed on 17 Aug. 1999, U.S. Appln. No. 60/152,317 filed on 03 Sep. 1999, U.S. Appln. No. 60/152,315 filed on 03 Sep. 1999, U.S. Appln. No. 60/155,709 filed on 24 Sep. 1999, U.S. Appln. No. 60/163,085 filed on 02 Nov. 1999, U.S. Appln. No. 60/172,411 filed on 17 Dec. 1999, U.S. Appln. No. 60/162,239 filed on 29 Oct. 1999, U.S. Appln. No. 60/215,139 filed on 30 Jun. 2000, U.S. Appln. No. 60/162,211 filed on 29 Oct. 1999, U.S. Appln. No. 60/215,138 filed on 30 Jun. 2000, U.S. Appln. No. 60/162,240 filed on 29 Oct. 1999, U.S. Appln. No. 60/215,131 filed on 30 Jun. 2000, U.S. Appln. No. 60/162,237 filed on 29 Oct. 1999, U.S. Appln. No. 60/219,666 filed on 21 Jul. 2000, U.S. Appln. No. 60/162,238 filed on 29 Oct. 1999, U.S. Appln. No. 60/215,134 filed on 30 Jun. 2000, U.S. Appln. No. 60/163,580 filed on 05 Nov. 1999, U.S. Appln. No. 60/215,130 filed on 30 Jun. 2000, U.S. Appln. No. 60/163,577 filed on 05 Nov. 1999, U.S. Appln. No. 60/215,137 filed on 30 Jun. 2000, U.S. Appln. No. 60/163,581 filed on 05 Nov. 1999, U.S. Appln. No. 60/215,133 filed on 30 Jun. 2000, U.S. Appln. No. 60/163,576 filed on 05 Nov. 1999, U.S. Appln. No. 60/221,366 filed on 27 Jul. 2000, U.S. Appln. No. 60/164,344 filed on 09 Nov. 1999, U.S. Appln. No. 60/195,296 filed on 07 Apr. 2000, U.S. Appln. No. 60/221,367 filed on 27 Jul. 2000, U.S. Appln. No. 60/164,835 filed on 12 Nov. 1999, U.S. Appln. No. 60/221,142 filed on 27 Jul. 2000, U.S. Appln. No. 60/164,744 filed on 12 Nov. 1999, U.S. Appln. No. 60/215,140 filed on 30 Jun. 2000, U.S. Appln. No. 60/164,735 filed on 12 Nov. 1999, U.S. Appln. No. 60/221,193 filed on 27 Jul. 2000, U.S. Appln. No. 60/164,825 filed on 12 Nov. 1999, U.S. Appln. No. 60/222,904 filed on 03 Aug. 2000, U.S. Appln. No. 60/164,834 filed on 12 Nov. 1999, U.S. Appln. No. 60/224,007 filed on 04 Aug. 2000, U.S. Appln. No. 60/164,750 filed on 12 Nov. 1999, U.S. Appln. No. 60/215,128 filed on 30 Jun. 2000, U.S. Appln. No. 60/166,415 filed on 19 Nov. 1999, U.S. Appln. No. 60/215,136 filed on 30 Jun. 2000, U.S. Appln. No. 60/166,414 filed on 19 Nov. 1999, U.S. Appln. No. 60/219,665 filed on 21 Jul. 2000, U.S. Appln. No. 60/164,731 filed on 12 Nov. 1999, U.S. Appln. No. 60/215,132 filed on 30 Jun. 2000, U.S. Appln. No. 60/226,280 filed on 18 Aug. 2000, U.S. Appln. No. 60/256,968 filed on 21 Dec. 2000, U.S. Appln. No. 60/226,380 filed on 18 Aug. 2000, U.S. Appln. No. 60/259,803 filed on 05 Jan. 2001, U.S. Appln. No. 60/228,084 filed on 28 Aug. 2000, U.S. Appln. No. 09/915,582 filed on 27 Jul. 2001, U.S. Appln. No. 60/231,968 filed on 12 Sep. 2000, U.S. Appln. No. 60/236,326 filed on 29 Sep. 2000, U.S. Appln. No. 60/234,211 filed on 20 Sep. 2000, U.S. Appln. No. 60/226,282 filed on 18 Aug. 2000, U.S. Appln. No. 60/232,104 filed on 12 Sep. 2000, U.S. Appln. No. 60/234,210 filed on 20 Sep. 2000, U.S. Appln. No. 60/226,278 filed on 18 Aug. 2000, U.S. Appln. No. 60/259,805 filed on 05 Jan. 2001, U.S. Appln. No. 60/226,279 filed on 18 Aug. 2000, U.S. Appln. No. 60/259,678 filed on 05 Jan. 2001, U.S. Appln. No. 60/226,281 filed on 18 Aug. 2000, U.S. Appln. No. 60/231,969 filed on 12 Sep. 2000, U.S. Appln. No. 60/228,086 filed on 28 Aug. 2000, U.S. Appln. No. 60/259,516 filed on 04 Jan. 2001, U.S. Appln. No. 60/228,083 filed on 28 Aug. 2000, U.S. Appln. No. 60/259,804 filed on 05 Jan. 2001, U.S. Appln. No. 60/270,658 filed on 23 Feb. 2001, U.S. Appln. No. 60/304,444 filed on 12 Jul. 2001, U.S. Appln. No. 60/270,625 filed on 23 Feb. 2001, U.S. Appln. No. 60/304,417 filed on 12 Jul. 2001, U.S. Appln. No. 60/295,869 filed on 06 Jun. 2001, U.S. Appln. No. 60/304,121 filed on 11 Jul. 2001, U.S. Appln. No. 60/311,085 filed on 10 Aug. 2001, U.S. Appln. No. 60/325,209 filed on 28 Sep. 2001, U.S. Appln. No. 60/330,629 filed on 26 Oct. 2001, U.S. Appln. No. 60/331,046 filed on 07 Nov. 2001, U.S. Appln. No. 60/358,554 filed on 22 Feb. 2002, U.S. Appln. No. 60/358,714 filed on 25 Feb. 2002, U.S. Appln. No. 60/277,340 filed on 21 Mar. 2001, U.S. Appln. No. 60/306,171 filed on 19 Jul. 2001, U.S. Appln. No. 60/278,650 filed on 27 Mar. 2001, U.S. Appln. No. 60/331,287 filed on 13 Nov. 2001, U.S. application Ser. No. 09/950,082 filed on 12 Sep. 2001, U.S. application Ser. No. 09/950,083 filed on 12 Sep. 2001, PCT Appln. No. US00/29363 filed on 25 Oct. 2000, PCT Appln. No. US00/29360 filed on 25 Oct. 2000, PCT Appln. No. US00/29362 filed on 25 Oct. 2000, PCT Appln. No. US00/29365 filed on 25 Oct. 2000, PCT Appln. No. US00/29364 filed on 25 Oct. 2000, PCT Appln. No. US00/30040 filed on 01 Nov. 2000, PCT Appln. No. US00/30037 filed on 01 Nov. 2000, PCT Appln. No. US00/30045 filed on 01 Nov. 2000, PCT Appln. No. US00/30036 filed on 01 Nov. 2000, PCT Appln. No. US00/30039 filed on 01 Nov. 2000, PCT Appln. No. US00/30654 filed on 08 Nov. 2000, PCT Appln. No. US00/30628 filed on 08 Nov. 2000, PCT Appln. No. US00/30653 filed on 08 Nov. 2000, PCT Appln. No. US00/30629 filed on 08 Nov. 2000, PCT Appln. No. US00/30679 filed on 08 Nov. 2000, PCT Appln. No. US00/30674 filed on 08 Nov. 2000, PCT Appln. No. US00/31162 filed on 15 Nov. 2000, PCT Appln. No. US00/31282 filed on 15 Nov. 2000, PCT Appln. No. US00/30657 filed on 08 Nov. 2000, PCT Appln. No. US01/01396 filed on 17 Jan. 2001, PCT Appln. No. US01/01387 filed on 17 Jan. 2001, PCT Appln. No. US01/01567 filed on 17 Jan. 2001, PCT Appln. No. US01/01431 filed on 17 Jan. 2001, PCT Appln. No. US01/01432 filed on 17 Jan. 2001, PCT Appln. No. US01/00544 filed on 09 Jan. 2001, PCT Appln. No. US01/01435 filed on 17 Jan. 2001, PCT Appln. No. US01/01386 filed on 17 Jan. 2001, PCT Appln. No. US01/01565 filed on 17 Jan. 2001, PCT Appln. No. US01/01394 filed on 17 Jan. 2001, PCT Appln. No. US01/01434 filed on 17 Jan. 2001, PCT Appln. No. US01/01397 filed on 17 Jan. 2001, PCT Appln. No. US01/01385 filed on 17 Jan. 2001, PCT Appln. No. US01/01384 filed on 17 Jan. 2001, PCT Appln. No. US01/01383 filed on 17 Jan. 2001, PCT Appln. No. US02/05064 filed on 21 Feb. 2002, PCT Appln. No. US02/05301 filed on 21 Feb. 2002, U.S. application Ser. No. 09/148,545 filed on 04 Sep. 1998, U.S. application Ser. No. 09/621,011 filed on 20 Jul. 2000, U.S. application Ser. No. 09/981,876 filed on 19 Oct. 2001, U.S. application Ser. No. 09/149,476 filed on 08 Sep. 1998, U.S. application Ser. No. 09/809,391 filed on 16 Mar. 2001, U.S. application Ser. No. 09/882,171 filed on 18 Jun. 2001, U.S. Appln. No. 60/190,068 filed on 17 Mar. 2000, U.S. application Ser. No. 09/152,060 filed on 11 Sep. 1998, U.S. application Ser. No. 09/852,797 filed on 11 May 2001, U.S. application Ser. No. 09/853,161 filed on 11 May 2001, U.S. application Ser. No. 09/852,659 filed on 11 May 2001, U.S. application Ser. No. 10/058,993 filed on 30 Jan. 2002, U.S. Appln. No. 60/265,583 filed on 02 Feb. 2001, U.S. application Ser. No. 09/154,707 filed on 17 Sep. 1998, U.S. application Ser. No. 09/966,262 filed on 01 Oct. 2001, U.S. application Ser. No. 09/983,966 filed on 26 Oct. 2001, U.S. application Ser. No. 10/059,395 filed on 31 Jan. 2002, U.S. Appln. No. 09/984,245 filed on 29 Oct. 2001, U.S. application Ser. No. 09/166,780 filed on 06 Oct. 1998, U.S. application Ser. No. 09/577,145 filed on 24 May 2000, U.S. application Ser. No. 09/814,122 filed on 22 Mar. 2001, U.S. application Ser. No. 09/189,144 filed on 10 Nov. 1998, U.S. application Ser. No. 09/690,454 filed on 18 Oct. 2000, U.S. application Ser. No. 10/062,831 filed on 05 Feb. 2002, U.S. application Ser. No. 10/062,599 filed on 05 Feb. 2002, U.S. application Ser. No. 09/205,258 filed on 04 Dec. 1998, U.S. application Ser. No. 09/933,767 filed on 22 Aug. 2001, U.S. Appln. No. 60/184,836 filed on 24 Feb. 2000, U.S. Appln. No. 60/193,170 filed on 29 Mar. 2000, U.S. application Ser. No. 10/023,282 filed on 20 Dec. 2001, U.S. application Ser. No. 10/004,860 filed on 07 Dec. 2001, U.S. application Ser. No. 09/209,462 filed on 11 Dec. 1998, U.S. application Ser. No. 09/213,365 filed on 17 Dec. 1998, U.S. application Ser. No. 09/627,081 filed on 27 Jul. 2000, U.S. application Ser. No. 09/227,357 filed on 08 Jan. 1999, U.S. application Ser. No. 09/983,802 filed on 25 Oct. 2001, U.S. application Ser. No. 09/973,278 filed on 10 Oct. 2001, U.S. Appln. No. 60/239,899 filed on 13 Oct. 2000, U.S. application Ser. No. 09/984,490 filed on 30 Oct. 2001, U.S. application Ser. No. 09/776,724 filed on 06 Feb. 2001, U.S. application Ser. No. 09/229,982 filed on 14 Jan. 1999, U.S. application Ser. No. 09/669,688 filed on 26 Sep. 2000, U.S. Appln. No. 60/180,909 filed on 08 Feb. 2000, U.S. application Ser. No. 09/236,557 filed on 26 Jan. 1999, U.S. application Ser. No. 09/666,984 filed on 21 Sep. 2000, U.S. application Ser. No. 09/820,649 filed on 30 Mar. 2001, U.S. Appln. No. 60/295,558 filed on 05 Jun. 2001, U.S. application Ser. No. 09/244,112 filed on 04 Feb. 1999, U.S. application Ser. No. 09/774,639 filed on 01 Feb. 2001, U.S. application Ser. No. 09/969,730 filed on 04 Oct. 2001, U.S. Appln. No. 60/238,291 filed on 06 Oct. 2000, U.S. application Ser. No. 09/251,329 filed on 17 Feb. 1999, U.S. application Ser. No. 09/716,128 filed on 17 Nov. 2000, U.S. application Ser. No. 09/257,179 filed on 25 Feb. 1999, U.S. application Ser. No. 09/729,835 filed on 06 Dec. 2000, U.S. application Ser. No. 09/262,109 filed on 04 Mar. 1999, U.S. application Ser. No. 09/722,329 filed on 28 Nov. 2000, U.S. application Ser. No. 09/722,329 filed on 17 Jan. 2002, U.S. Appln. No. 60/262,066 filed on 18 Jan. 2001, U.S. application Ser. No. 09/281,976 filed on 31 Mar. 1999, U.S. application Ser. No. 09/288,143 filed on 08 Apr. 1999, U.S. application Ser. No. 09/984,429 filed on 30 Oct. 2001, U.S. Appln. No. 60/244,591 filed on 01 Nov. 2000, U.S. application Ser. No. 09/296,622 filed on 23 Apr. 1999, U.S. application Ser. No. 09/305,736 filed on 05 May 1999, U.S. application Ser. No. 09/818,683 filed on 28 Mar. 2001, U.S. application Ser. No. 09/974,879 filed on 12 Oct. 2001, U.S. Appln. No. 60/239,893 filed on 13 Oct. 2000, U.S. application Ser. No. 09/334,595 filed on 17 Jun. 1999, U.S. application Ser. No. 09/348,457 filed on 07 Jul. 1999, U.S. application Ser. No. 09/739,907 filed on 20 Dec. 2000, U.S. application Ser. No. 09/938,671 filed on 27 Aug. 2001, U.S. application Ser. No. 09/363,044 filed on 29 Jul. 1999, U.S. application Ser. No. 09/813,153 filed on 21 Mar. 2001, U.S. application Ser. No. 09/949,925 filed on 12 Sep. 2001, U.S. Appln. No. 60/232,150 filed on 12 Sep. 2000, U.S. Appln. No. 09/369,247 filed on 05 Aug. 1999, U.S. application Ser. No. 10/062,548 filed on 05 Feb. 2002, U.S. application Ser. No. 09/382,572 filed on 25 Aug. 1999, U.S. application Ser. No. 09/716,129 filed on 17 Nov. 2000, U.S. application Ser. No. 09/393,022 filed on 09 Sep. 1999, U.S. application Ser. No. 09/798,889 filed on 06 Mar. 2001, U.S. application Ser. No. 09/397,945 filed on 17 Sep. 1999, U.S. application Ser. No. 09/437,658 filed on 10 Nov. 1999, U.S. application Ser. No. 09/892,877 filed on 28 Jun. 2001, U.S. application Ser. No. 09/948,783 filed on 10 Sep. 2001, U.S. Appln. No. 60/231,846 filed on 11 Sep. 2000, U.S. application Ser. No. 09/461,325 filed on 14 Dec. 1999, U.S. application Ser. No. 10/050,873 filed on 18 Jan. 2002, U.S. Appln. No. 60/263,230 filed on 23 Jan. 2001, U.S. Appln. No. 60/263,681 filed on 24 Jan. 2001, U.S. application Ser. No. 10/012,542 filed on 12 Dec. 2001, U.S. application Ser. No. 09/482,273 filed on 13 Jan. 2000, U.S. Appln. No. 60/234,925 filed on 25 Sep. 2000, U.S. application Ser. No. 09/984,276 filed on 29 Oct. 2001, U.S. application Ser. No. 09/984,271 filed on 29 Oct. 2001, U.S. application Ser. No. 09/489,847 filed on 24 Jan. 2000, U.S. Appln. No. 60/350,898 filed on 25 Jan. 2002, U.S. application Ser. No. 09/511,554 filed on 23 Feb. 2000, U.S. application Ser. No. 09/739,254 filed on 19 Dec. 2000, U.S. application Ser. No. 09/904,615 filed on 16 Jul. 2001, U.S. application Ser. No. 10/054,988 filed on 25 Jan. 2002, U.S. application Ser. No. 09/531,119 filed on 20 Mar. 2000, U.S. application Ser. No. 09/820,893 filed on 30 Mar. 2001, U.S. application Ser. No. 09/565,391 filed on 05 May 2000, U.S. application Ser. No. 09/948,820 filed on 10 Sep. 2001, U.S. application Ser. No. 09/591,316 filed on 09 Jun. 2000, U.S. application Ser. No. 09/895,298 filed on 02 Jul. 2001, U.S. application Ser. No. 09/618,150 filed on 17 Jul. 2000, U.S. application Ser. No. 09/985,153 filed on 01 Nov. 2001, U.S. application Ser. No. 09/628,508 filed on 28 Jul. 2000, U.S. application Ser. No. 09/997,131 filed on 30 Nov. 2001, U.S. application Ser. No. 09/661,453 filed on 13 Sep. 2000, U.S. application Ser. No. 10/050,882 filed on 18 Jan. 2002, U.S. application Ser. No. 09/684,524 filed on 10 Oct. 2000, U.S. application Ser. No. 10/050,704 filed on 18 Jan. 2002, U.S. application Ser. No. 09/726,643 filed on 01 Dec. 2000, U.S. application Ser. No. 10/042,141 filed on 11 Jan. 2002, U.S. application Ser. No. 09/756,168 filed on 09 Jan. 2001, U.S. application Ser. No. 09/781,417 filed on 13 Feb. 2001, U.S. application Ser. No. 10/060,255 filed on 01 Feb. 2002, U.S. application Ser. No. 09/789,561 filed on 22 Feb. 2001, U.S. application Ser. No. 09/800,729 filed on 08 Mar. 2001, U.S. application Ser. No. 09/832,129 filed on 11 Apr. 2001, PCT Appln. No. US98/04482 filed on 06 Mar. 1998, PCT Appln. No. US98/04493 filed on 06 Mar. 1998, PCT Appln. No. US98/04858 filed on 12 Mar. 1998, PCT Appln. No. US98/05311 filed on 19 Mar. 1998, PCT Appln. No. US98/06801 filed on 07 Apr. 1998, PCT Appln. No. US98/10868 filed on 28 May 1998, PCT Appln. No. US98/11422 filed on 04 Jun. 1998, PCT Appln. No. US01/05614 filed on 21 Feb. 2001, PCT Appln. No. US98/12125 filed on 11 Jun. 1998, PCT Appln. No. US98/13608 filed on 30 Jun. 1998, PCT Appln. No. US98/13684 filed on 07 Jul. 1998, PCT Appln. No. US98/14613 filed on 15 Jul. 1998, PCT Appln. No. US98/15949 filed on 29 Jul. 1998, PCT Appln. No. US98/16235 filed on 04 Aug. 1998, PCT Appln. No. US98/17044 filed on 18 Aug. 1998, PCT Appln. No. US98/17709 filed on 27 Aug. 1998, PCT Appln. No. US98/18360 filed on 03 Sep. 1998, PCT Appln. No. US02/01109 filed on 17 Jan. 2002, PCT Appln. No. US98/20775 filed on 01 Oct. 1998, PCT Appln. No. US98/21142 filed on 08 Oct. 1998, PCT Appln. No. US98/22376 filed on 23 Oct. 1998, PCT Appln. No. US98/23435 filed on 04 Nov. 1998, PCT Appln. No. US98/27059 filed on 17 Dec. 1998, PCT Appln. No. US99/00108 filed on 06 Jan. 1999, PCT Appln. No. US99/01621 filed on 27 Jan. 1999, PCT Appln. No. US99/02293 filed on 04 Feb. 1999, PCT Appln. No. US99/03939 filed on 24 Feb. 1999, PCT Appln. No. US99/05721 filed on 11 Mar. 1999, PCT Appln. No. US99/05804 filed on 18 Mar. 1999, PCT Appln. No. US99/09847 filed on 06 May 1999, PCT Appln. No. US99/13418 filed on 15 Jun. 1999, PCT Appln. No. US99/15849 filed on 14 Jul. 1999, PCT Appln. No. US01/00911 filed on 12 Jan. 2001, PCT Appln. No. US01/29871 filed on 24 Sep. 2001, PCT Appln. No. US99/17130 filed on 29 Jul. 1999, PCT Appln. No. US99/19330 filed on 24 Aug. 1999, PCT Appln. No. US99/22012 filed on 22 Sep. 1999, PCT Appln. No. US99/26409 filed on 09 Nov. 1999, PCT Appln. No. US99/29950 filed on 16 Dec. 1999, PCT Appln. No. US00/00903 filed on 18 Jan. 2000, PCT Appln. No. US00/03062 filed on 08 Feb. 2000, PCT Appln. No. US00/06783 filed on 16 Mar. 2000, PCT Appln. No. US00/08979 filed on 06 Apr. 2000, PCT Appln. No. US00/15187 filed on 02 Jun. 2000, PCT Appln. No. US00/19735 filed on 20 Jul. 2000, PCT Appln. No. US00/22325 filed on 16 Aug. 2000, PCT Appln. No. US00/24008 filed on 31 Aug. 2000, PCT Appln. No. US00/26013 filed on 22 Sep. 2000, PCT Appln. No. US00/28664 filed on 17 Oct. 2000, U.S. application Ser. No. 09/833,245 filed on 12 Apr. 2001, PCT Appln. No. US01/11988 filed on 12 Apr. 2001, U.S. application Ser. No. 10/100,683 filed 19 Mar. 2002, PCT Appln. No. US02/08278 filed on 19 Mar. 2002, PCT Appln. No. US02/08279 filed on 19 Mar. 2002, PCT Appln. No. US02/08123 filed on 19 Mar. 2002, PCT Appln. No. US02/09785 filed on 19 Mar. 2002, PCT Appln. No. US02/08276 filed on 19 Mar. 2002, PCT Appln. No. US02/08277 filed on 19 Mar. 2002, and PCT Appln. No. US02/08124 filed on 19 Mar. 2002.

LENGTHY TABLE
The patent application contains a lengthy table section. A copy of the table is available in electronic form from the USPTO web site (http://seqdata.uspto.gov/?pageRequest=docDetail&DocID=US20070015696A1) An electronic copy of the table will also be available from the USPTO upon request and payment of the fee set forth in 37 CFR 1.19(b)(3).

1. An isolated nucleic acid molecule comprising a first polynucleotide sequence: at least 95% identical to a second polynucleotide sequence selected from the group consisting of:
(a) a polynucleotide fragment of SEQ ID NO:X as referenced in Table 1A;
(b) a polynucleotide encoding a full length polypeptide of SEQ ID NO:Y or a full length polypeptide encoded by the cDNA Clone ID in ATCC Deposit No:Z corresponding to SEQ ID NO:Y as referenced in Table 1A;
(c) a polynucleotide encoding a polypeptide fragment of SEQ ID NO:Y or a polypeptide fragment encoded by the cDNA Clone ID in ATCC Deposit No:Z corresponding to SEQ ID NO:Y as referenced in Table 1A;
(d) a polynucleotide encoding a polypeptide fragment of SEQ ID NO:Y or a polypeptide fragment encoded by the cDNA Clone ID in ATCC Deposit No:Z corresponding to SEQ ID NO:Y as referenced in Table 1A, wherein said fragment has biological activity;
(e) a polynucleotide encoding a polypeptide domain of SEQ ID NO:Y as referenced in Table 1B;
(f) a polynucleotide encoding a polypeptide domain of SEQ ID NO:Y as referenced in Table 2;
(g) a polynucleotide encoding a predicted epitope of SEQ ID NO:Y as referenced in Table 1B; and
(h) a polynucleotide capable of hybridizing under stringent conditions to any one of the polynucleotides specified in (a)-(g), wherein said polynucleotide does not hybridize under stringent conditions to a nucleic acid molecule having a nucleotide sequence of only A residues or of only T residues.

2. The isolated nucleic acid molecule of claim 1, wherein the polynucleotide fragment comprises a nucleotide sequence encoding a secreted form of SEQ ID NO:Y or a secreted form of the polypeptide encoded by the cDNA Clone ID in ATCC Deposit No:Z corresponding to SEQ ID NO:Y, as referenced in Table 1A.

3. The isolated nucleic acid molecule of claim 1, wherein the polynucleotide fragment comprises a nucleotide sequence encoding the sequence identified as SEQ ID NO:Y or the polypeptide encoded by the cDNA sequence included in ATCC Deposit No:Z, which is hybridizable to SEQ ID NO:X, as referenced in Table 1A.

4. The isolated nucleic acid molecule of claim 1, wherein the polynucleotide fragment comprises the entire nucleotide sequence of SEQ ID NO:X or the cDNA sequence included in ATCC Deposit No:Z, which is hybridizable to SEQ ID NO:X, as referenced in Table 1A.

5. The isolated nucleic acid molecule of claim 2, wherein the nucleotide sequence comprises sequential nucleotide deletions from either the C-terminus or the N-terminus.

6. The isolated nucleic acid molecule of claim 3, wherein the nucleotide sequence comprises sequential nucleotide deletions from either the C-terminus or the N-terminus.

7. A recombinant vector comprising the isolated nucleic acid molecule of claim 1.

8. A method of making a recombinant host cell comprising the isolated nucleic acid molecule of claim 1.

9. A recombinant host cell produced by the method of claim 8.

10. The recombinant host cell of claim 9 comprising vector sequences.

11. A polypeptide comprising a first amino acid sequence at least 95% identical to a second amino acid sequence selected from the group consisting of:
(a) a full length polypeptide of SEQ ID NO:Y or a full length polypeptide encoded by the cDNA Clone ID in ATCC Deposit No:Z corresponding to SEQ ID NO:Y as referenced in Table 1A;
(b) a secreted form of SEQ ID NO:Y or a secreted form of the polypeptide encoded by the cDNA Clone ID in ATCC Deposit No:Z corresponding to SEQ ID NO:Y as referenced in Table 1A;
(c) a polypeptide fragment of SEQ ID NO:Y or a polypeptide fragment encoded by the cDNA Clone ID in ATCC Deposit No:Z corresponding to SEQ ID NO:Y as referenced in Table 1A;
(d) a polypeptide fragment of SEQ ID NO:Y or a polypeptide fragment encoded by the cDNA Clone ID in ATCC Deposit No:Z corresponding to SEQ ID NO:Y as referenced in Table 1A, wherein said fragment has biological activity;
(e) a polypeptide domain of SEQ ID NO:Y as referenced in Table 1B;
(f) a polypeptide domain of SEQ ID NO:Y as referenced in Table 2; and
(g) a predicted epitope of SEQ ID NO:Y as referenced in Table 1B.

12. The polypeptide of claim 11, wherein said polypeptide comprises a heterologous amino acid sequence.

13. The isolated polypeptide of claim 11, wherein the secreted form or the full length protein comprises sequential amino acid deletions from either the C-terminus or the N-terminus.

14. An isolated antibody that binds specifically to the isolated polypeptide of claim 11.

15. A recombinant host cell that expresses the isolated polypeptide of claim 11.

16. A method of making an isolated polypeptide comprising:
(a) culturing the recombinant host cell of claim 15 under conditions such that said polypeptide is expressed; and
(b) recovering said polypeptide.

17. The polypeptide produced by claim 16.

18. A method for preventing, treating, or ameliorating cancer or other hyperproliferative disorder, comprising administering to a mammalian subject a therapeutically effective amount of the polypeptide of claim 11.

19. A method of diagnosing cancer or other hyperproliferative disorder in a subject comprising:
(a) determining the presence or absence of a mutation in the polynucleotide of claim 11; and
(b) diagnosing the cancer or other hyperproliferative disorder based on the presence or absence of said mutation.

20. A method of diagnosing cancer or other hyperproliferative disorder in a subject comprising:
(a) determining the presence or amount of expression of the polypeptide of claim 11 in a biological sample; and
(b) diagnosing the cancer or other hyperproliferative disorder based on the presence or amount of expression of the polypeptide.

21. A method for identifying a binding partner to the polypeptide of claim 11 comprising:
(a) contacting the polypeptide of claim 43 with a binding partner; and
(b) determining whether the binding partner effects an activity of the polypeptide.

22. The gene corresponding to the cDNA sequence of SEQ ID NO:X.

23. A method of identifying an activity in a biological assay, wherein the method comprises:
(a) expressing SEQ ID NO:X in a cell;
(b) isolating the supernatant;
(c) detecting an activity in a biological assay; and
(d) identifying the protein in the supernatant having the activity.

24. The product produced by the method of claim 20.

The application's sequence listing, which the Patent Office published only in electronic form, follows.

SEQUENCE LISTING (2050 sequences)

SEQ ID NO: 1 - DNA, 733 bp, Homo sapiens
gggatccggagcccaaatcttctgacaaaactcacacatgcccaccgtgcccagcacctgaattcgagggtgcaccgtcagtcttcctcttccccccaaaacccaaggacaccctcatgatctcccggactcctgaggtcacatgcgtggtggtggacgtaagccacgaagaccctgaggtcaagttcaactggtacgtggacggcgtggaggtgcataatgccaagacaaagccgcgggaggagcagtacaacagcacgtaccgtgtggtcagcgtcctcaccgtcctgcaccaggactggctgaatggcaaggagtacaagtgcaaggtctccaacaaagccctcccaacccccatcgagaaaaccatctccaaagccaaagggcagccccgagaaccacaggtgtacaccctgcccccatcccgggatgagctgaccaagaaccaggtcagcctgacctgcctggtcaaaggcttctatccaagcgacatcgccgtggagtgggagagcaatgggcagccggagaacaactacaagaccacgcctcccgtgctggactccgacggctccttcttcctctacagcaagctcaccgtggacaagagcaggtggcagcaggggaacgtcttctcatgctccgtgatgcatgaggctctgcacaaccactacacgcagaagagcctctccctgtctccgggtaaatgagtgcgacggccgcgactctagaggat

SEQ ID NO: 2 - protein, 5 aa, Homo sapiens
  Site (3): Xaa equals any of the twenty naturally ocurring L-amino acids
WSXWS

SEQ ID NO: 3 - DNA, 86 bp, Artificial Sequence
  Primer_Bind: Synthetic sequence with 4 tandem copies of the GAS binding site found in the IRF1 promoter (Rothman et al., Immunity 1:457-468 (1994)), 18 nucleotides complementary to the SV40 early promoter, and a Xho I restriction site.
gcgcctcgagatttccccgaaatctagatttccccgaaatgatttccccgaaatgatttccccgaaatatctgccatctcaattag

SEQ ID NO: 4 - DNA, 27 bp, Artificial Sequence
  Primer_Bind: Synthetic sequence complementary to the SV40 promoter; includes a Hind III restriction site.
gcggcaagctttttgcaaagcctaggc

SEQ ID NO: 5 - DNA, 271 bp, Artificial Sequence
  Protein_Bind: Synthetic promoter for use in biological assays; includes GAS binding sites found in the IRF1 promoter (Rothman et al., Immunity 1:457-468 (1994)).
ctcgagatttccccgaaatctagatttccccgaaatgatttccccgaaatgatttccccgaaatatctgccatctcaattagtcagcaaccatagtcccgcccctaactccgcccatcccgcccctaactccgcccagttccgcccattctccgccccatggctgactaattttttttatttatgcagaggccgaggccgcctcggcctctgagctattccagaagtagtgaggaggcttttttggaggcctaggcttttgcaaaaagctt

SEQ ID NO: 6 - DNA, 32 bp, Artificial Sequence
  Primer_Bind: Synthetic primer complementary to human genomic EGR-1 promoter sequence (Sakamoto et al., Oncogene 6:867-871 (1991)); includes a Xho I restriction site.
gcgctcgagggatgacagcgatagaaccccgg

SEQ ID NO: 7 - DNA, 31 bp, Artificial Sequence
  Primer_Bind: Synthetic primer complementary to human genomic EGR-1 promoter sequence (Sakamoto et al., Oncogene 6:867-871 (1991)); includes a Hind III restriction site.
gcgaagcttcgcgactccccggatccgcctc

SEQ ID NO: 8 - DNA, 12 bp, Homo sapiens
ggggactttccc

SEQ ID NO: 9 - DNA, 73 bp, Artificial Sequence
  Primer_Bind: Synthetic primer with 4 tandem copies of the NF-KB binding site (GGGGACTTTCCC), 18 nucleotides complementary to the 5' end of the SV40 early promoter sequence, and a XhoI restriction site.
gcggcctcgaggggactttcccggggactttccggggactttccgggactttccatcctgccatctcaattag

SEQ ID NO: 10 - DNA, 256 bp, Artificial Sequence
  Protein_Bind: Synthetic promoter for use in biological assays; includes NF-KB binding sites.
ctcgaggggactttcccggggactttccggggactttccgggactttccatctgccatctcaattagtcagcaaccatagtcccgcccctaactccgcccatcccgcccctaactccgcccagttccgcccattctccgccccatggctgactaattttttttatttatgcagaggccgaggccgcctcggcctctgagctattccagaagtagtgaggaggcttttttggaggcctaggcttttgcaaaaagctt

SEQ ID NO: 11 - DNA, 2797 bp, Homo sapiens
  misc_feature (853)..(853): n equals a,t,g, or c
ggcacgagagagcagacagaattatatgtagaggacacaggagatatttacattgtggatggagatggaggattgaataacagattgatcaaactgtcccaagatttcatgatcctttggctgcatggagaaaatgggacagggcctgctaagttcaacatacctcacagtgttacacttgattcagctggtcgggtgtgggttgctgaccgaggaaataaaagaatccaagtatttgataaagacactggggagtggttaggagcatggaataattgtttcacagaagaggaccttcttcagtcagtttactcctgatgggaagtacttgattgtggcccagctgaatcttagcaggctctcagtcgtagcagcacccccagtgggaagcattggggagtgttctgtgatcagcacaatccaactagcagatcaagttttgccacatctcctagaagtcgacagaaaagactggagcagtctatgtagcagaaattggagcaaaacaagtacaaaaatatgtccctttgaatagctatgttccttcatttggttcataatgtttctttcccgggaatatttcaagtggcagttcagattctcaattcactaagtgcttaaaaatgatgttcaagcacaagaatttatttttctagtataaaagatctagtatcagaaagatttgtttttgtatcattaagaatcttatattttgttgccctcttgggacttagttttatttgtaagtgcataaggatattttaatgaaaggaaagtaactaaaaaatggggttgggaagagggactaaggtggtaacctcattatttgccctggtagactgattctccctgngtaaaaaaaatgggaataaaaatgagcttgcatgataatttattaaatttcatgtgaagaactccagacctccagattgtgcaactaacataaagtgagctgcttgagagattgtaaataagatgaactattgattaatttgagtacccacagagtgctgtgtcttgacgacttaaaaatgaaaaagcatgattgccttttgagtagcttgcagtctagtggggagacaagcaggcaaacagtcacaacacagcaaaagcgaccttggagcatagtgggacttttggagtaggagtgctgcatttgactgagggaatcatggatacttcgcaggagaagtgaatttgagctcagacttgaaaactgaggaggagcttaccaagggacaaggaggagaaaacaataatttccaagtaaagaaggtataaaaagttagaagtgtactgtaaactttgataggcttttaggccttttttaaagcccaacttggcttctgtccattacctataagatatttaatgtcagtcagcctttaaatgtaggaataaaatggctggcatctaagcactttagtaaaagaggtttttacaaataactaaggattgtagagcttccttctctttttttttctttttctttcttttgttttacatgaactcaacttattcctaacatttgtctacctcaaagaaatttcaagattatttagataacatggatatgtgccaaatcctttgagctgttaagatgataatttcctgctttcctcctacatcttctcctcccactccctcctttggtgtgaatattggcttcccaattaagaccttttttttttccagtttgttttagcttattataggttttggaggaactttgccattttgtaatctttcaaatcattcttcacccttcctcacatcagcttcctgcttttcccagtgttttactgtaaattgtgtagcatatgacaaatcttgagctgactttcctcttcacctgttatggctggagtattttccagacctgaagggactcacacttgttttgatacttggatcacatctccgtgaggttaggaaggtaaatctaccaacaggaagccctgtactctgtattccaaggccattggtaaatgtgttggtgccactgatcggactgtatgaccttaaacaagtcaccttagttttcagtgaaatgggaatatcattgtctcctctttcatgaatgctgtgagaatcagatgtgcaacaggtacatacttgccctttggaaatctaatacctctgggataccattaagaggcattttaattaaacaaaagggcccttctaaatgtgctatttatttgacaataactatcagatttgccttaattttgtgtttatagcatttatcaaaacgtatcctcatagactttatgcagattaatatggtcaattgatttggataaaagaaagtaatttcagggtttgtttttaagccaggacaagaagtgcaaatgcctctttgaagcaatttaggctaaactgattttgaaatttcaaaatgttttattttactttgttttattaagccaggacaagaagtgcaaatgcctctttgaagcaattcaggctaggtaaaccgattttgccatttcaaaacgttttattttactttgwtttrtrtcagagtyttawaarvcctgctgcaaatatttctgaatgtctttgtaaaagtgtttgttagtgtacctgtgattatagtacttcacttttttcctttggattaattggttaaatgaatgagaaatgtgttatgttttttactaaaaagtataaattaaaattttggaaagaaaaggcaatattatctggctccccaattaaagtttgattttattgtcacaaaaaaaaaaaaaaaaaaaaaaaaaaaaaaaaaaaaaaaaaaaaaaaaaaaaaa

SEQ ID NO: 12 - DNA, 459 bp, Homo sapiens
ggcacgaggaagcgtgaaccccagggaacagcgggtcccttccctcctcagacacaagccacctcagcttgtggctcttggcccccagccccaccaacccacctgttcatttattcaacagacaatgacagctgatatttattggacatttgcaccatgccaagcattcggcttggattatcccatttgtttctcacagccggtatttattgtctgctcctctgtgccaggtgctgtgctctgggcaggggcactgcatgggctgcctgccctggtggagcttgtggtctgatgggtgaggctgacccaagcccaccccattgccaacagggccagggcaagagtacacacaggggcctcataccatatgtctaaatatttaaaaagttatcaatcaagctaacaactgttaaataaaatatgttctattctcctactttgaaaaaaaaaaaaaaaaaa

SEQ ID NO: 13 - DNA, 1939 bp, Homo sapiens
gcacgagcggctgcgggcgcgaggtgaggggcgcgaggttcccagcaggatgccccggctctgcaggaagctgaagtgagaggcccggagagggcccagcccgcccggggcaggatgaccaaggcccggctgttccggctgtggctggtgctggggtcggtgttcatgatcctgctgatcatcgtgtactgggacagcgcaggcgccgcgcacttctacttgcacacgtccttctctaggccgcacacggggccgccgctgcccacgcccgggccggacagggacagggagctcacggccgactccgatgtcgacgagtttctggacaagtttctcagtgctggcgtgaagcagagtgaccttcccagaaaggagacggagcagccgcctgcgccggggagcatggaggagacgtgagaagctacgactggtccccgcgcgacgcccggcgcagcccagaccagggccggcagcaggcggagcggaggagcgtgctgcggggcttctgcgccaactccagcctggccttccccaccaaggagcgcgcattcgacgacatccccaactcggagctgagccacctgatcgtggacgaccggcacggggccatctactgctacgtgcccaaggtggcctgcaccaactggaagcgcgtgatgatcgtgctgagcggaagcctgctgcaccgcggtgcgccctaccgcgacccgctgcgcatcccgcgcgagcacgtgcacaacgccagcgcgcacctgaccttcaacaagttctggcgccgctacgggaagctctcccgccacctcatgaaggtcaagctcaagaagtacaccaagttcctcttcgtgcgcgaccccttcgtgcgcctgatctccgccttccgcagcaagttcgagctggagaacgaggagttctaccgcaagttcgccgtgcccatgctgcggctgtacgccaaccacaccagcctgcccgcctcggcgcgcgaggccttccgcgctggcctcaaggtgtccttcgccaacttcatccagtacctgctggacccgcacacggagaagctggcgcccttcaacgagcactggcggcaggtgtaccgcctctgccacccgtgccagatcgactacgacttcgtggggaagctggagactctggacgaggacgccgcgcagctgctgcagctactccaggtggaccggcagctccgcttccccccgagctaccggaacaggaccgccagcagctgggaggaggactggttcgccaagatccccctggcctggaggcagcagctgtataaactctacgaggccgactttgttctcttcggctaccccaagcccgaaaacctcctccgagactgaaagctttcgcgttgctttttctcgcgtgcctggaacctgacgcacgcgcactccagtttttttatgacctacgattttgcaatctgggcttcttgttcactccactgcctctatccattgagtactgtatcgatattgttttttaagattaatatatttcaggtatttaatacgaaatgtggaagggaatgctggagtaaaatatcccctctcccctccgcccgcccacccgcccgcccgctcgcccgctcgcccgctcctgtggtttttctgagcgtgcgggcgccgggaggggatgctgaggctgatggagctgcctccagggctagggccactcaccggaggagggcggggcctgcacttgaagtcaggccgcacctgtctgtttttggaagggtagccgacaaatccttccagagggaaagttctttgtttaagtgttgtacttgaaaaggtcaatcttcagggcttcctgtttgaagtcaagtcagaggtaaaccggtcagttacagaagcaggatttctaggatttctaactccagctgttcccatactgtctagtttaaattatggctgttaag

SEQ ID NO: 14 - DNA, 540 bp, Homo sapiens
  misc_feature (341)..(341): n equals a,t,g, or c
  misc_feature (378)..(378): n equals a,t,g, or c
  misc_feature (425)..(425): n equals a,t,g, or c
  misc_feature (450)..(450): n equals a,t,g, or c
gaggatccccacagggcccctctgtagccctggggagtcggcagtgctggtctaggccccttaggagagggggcaggggggcagcagtagaaatgtggcggggtccgacttggtgtttccggccgtctttgtgtctrtgttgtgtatgtggagtgtcattcggtctttatgtccctcacggcttcagtctctccatgtgtgtttctgccccaggctctgcctggctgtcccttgtgtattccatctgtctagcccgtggttccatgtcagamcggstttcttctcgggamagcctggttgcatctggggcatctgttttgttggtttgcttctgggtgcangcagacccaggagtgggtgtctctgttccccgagcanctgtctctggtctctggtggtgtgtgagtccatctgcctgcctcganttggccccaaccaagccccccccanccctctctttctctctctcaatcttccctttctcttccaacccctccaaatgagatggttgagtgccgtgggttggagggaagcaatggt

SEQ ID NO: 15 - DNA, 654 bp, Homo sapiens
  misc_feature (613)..(613): n equals a,t,g, or c
  misc_feature (623)..(623): n equals a,t,g, or c
ggtcgacccacgcgtccggtcatggccatccagagcctgcacccttgcccctcagagctctgctgcagggcctgcgtgasyttttaccactgggcgatggtggctgtgacgggcggcgtgggcgtggccgctgccctgtgtctctgtagcctcctgctgtggccgacccgcctgcgacgctcccgaggcggagaacaccgaacacccagtgaaggtgaggggatcagcacggcgccgccaccgtgctggaacgagactcagccacaaggaggtgcgaagctctgacccaggccacagtgcggatgcaccttgaggatgtcacgctcagtgagagacaccagacacagaagggtacgctgtgatcccacttctatgaaatgtccaggacagaccaatccacagaatcagggagaggattcgtgggtgccgggactggggagggggacctgggggtgactaggtgacataatggggacagggctgccttctgggtgatgagaatgttctggaatcagatgggatggctgcacggcgtggtgaaggtactgaacgccacctcactgtaagacggtagattttgtattttaccacaataaacaaaacaaaacaaaanmaaaaaaaanaaaaaaaaaaaaaaaaaaaaaaaaaaaaaaa

SEQ ID NO: 16 - DNA, 1445 bp, Homo sapiens
ggcacgagggatttgaacaagatcattagaattcaaaaaacaccagaaatgaaagatctttcctgaagctgtttaggaatattcatgatatacccttaactgttctagagaacaaaatgcgtctgtgctccttcacaaaagtccctatgaatttgtttctcaatgtgatccttcttaagttctataactttttgttttcattaattttaggaaaatcctgccttgcttcgttgggcctatgcaagaacaataaatgtctatcctaatttcagacccactcctaaaaactcactcatgggagctctgtgtggatttgggcccctcatcttcatttattatattatcaaaactgagagggtaagtattcagaccagatgtttagtatttgagtgataggttcactttctagggaccagctgcagctccttctcttgaagattgccaccagtgcccctcccaccttggggctgtcctctgccttcccttcctctcttcttttatctttattcctttccagcaggagttaaaacagaaagttttcagtcacctttgtctatttttgttagttcatttgttttttaaaaagatgatgtttattgggttaagtattagcagaatacataaatcatttagtacgtttcctgtttgcgtgaattctatttatgttggtcacattttgcaaattaatgttaaaacctattaatactctacgggacagagaagcacaagctgcctgtgtggggaatagctgccgtcagcagcctgggtatatgattggagagaaagtcaagctgatctttggcaccaaaccattccacatctggtactaaaccctgagctgcagcccccaggcttgtgttgccactggagcccactcgtctagctttgtctttaactggcccatctgcattcccattagagttcgtgtattttgattatctggtgaatgatctacttaacagaaaggtagtccacattttcccagaaagtgtttgcattttgctttcaatatatggttttatgggataatatatttctaatgactaaaatgtgagtaagatgtttttgaataggagcattttcttactgtgtctttagttcctcggattactgtttcttcgcacactccctgggctttagacagtgggattgcaattaggtttggagtgtttcattctgtttgtcagttgtacggtgggttgtgccaaaatgcagtttttcttaccttttttatttatttatttttatctaatatagccaactggcagaatatattgtctttaatgtactttttttctgtctttacaggataggaaagaaaaacttatccaggaaggaaaattggatcgaacatttcacctctcatattaagtctggcaatgatgactatatgtattcctgcctaaataaatcatctattaatcattaaaaaaaaaaaaaaaaaa

SEQ ID NO: 17 - DNA, 1722 bp, Homo sapiens
ggcacgagccagagcaggctgctaggcctggggccaccactgcccctgggtgctacacccagtgtgctgggtcactgggaacttcctgaagtggtgtcacctgaactgggcccccaaggatggggtgcgggcagtaccgcaggaagaggagcagcccctgtgaagattgagagctgccagaggctctgtgattggctgcggcacgatgacccgcgcacggattggctgcttcgggccggggggccgggcccgggggacagaatccgcccccgaaccttcaaagagggtaccccccggcaggagctggcagaccyaggaggtgcgacagacccgcggggcaaacggactggggccaagagccgggagcgcgggcgcaaaggcaccagggcccgcccagggcgccgcgcagcacggccttgggggttctgcgggccttcgggtgcgcgtctcgcctctagccatggggtccgcagcgttggagatcctgggcctggtgctgtgcctggtgggctgggggggtctgatcctggcgtgcgggctgcccatgtggcaggtgaccgccttcctggaccacaacatcgtgacggcgcagaccacctggaaggggctgtggatgtcgtgcgtggtgcagagcacsgggcacatgcagtgcaaagtgtacgactcggtgctggctctgagcaccgaggtgcaggcggcgcgggcgctcaccgtgagcgccgtgctgctggcgttcgttgcgctcttcgtgaccctggcgggcgcgcagtgcaccacctgcgtggccccgggcccggccaargcgcgtgtggccctcacgggaggcgtgctctacctgttttgcgggctgctggcgctcgtgccactctgctggttcgccaacattgtcgtccgcgagttttacgacccgtctgtgcccgtgtcgcagaagtacgagctgggcgcagcgctgtacatcggctgggcggccaccgcgctgctcatggtaggcggctgcctcttgtgctgcggcgcctgggtctgcaccggccgtcccgacctcagcttccccgtgaagtactcagcgccgcggcggcccacggccaccggcgactacgacaagaagaactacgtctgagggcgctgggcacggccgggcccctcctgccagccacgcctgcgaggcgttggataagcctggggagccccgcatggaccgcggcttccgccgggtagcgcggcgcgcaggctcctcggaacgtccggctctgcgccccgacgcggctcctggatccgctcctgcctgcgcccgcagctgaccttctcctgccactagcccggccctgcccttaacagacggaatgaagtttccttttctgtgcgcggcgctgtttccataggcagagcgggtgtcagactgaggatttcgcttcccctccaagacgctgggggtcttggctgctgccttacttcccagaggctcctgctgacttcggaggggcggatgcagagcccagggcccccaccggaagatgtgtacagctggtctttactccatcggcagggcccgagcccagggaccagtgacttggcctggacctcccggtctcactccagcatctccccaggcaaggcttgtgggcaccggagcttgagagagggcgggagtgggaaggctaagaatctgcttagtaaatggtttgaactctcaaaaaaaaaaaaaaaaaaaaaaaaaaaaaaaaa

SEQ ID NO: 18 - DNA, 1453 bp, Homo sapiens
  misc_feature (946)..(946): n equals a,t,g, or c
ggtcatctttctcttgctcgtacagagaggagacacccgtagaaatggagatttctactacagatgaaaatttcttttataaaagggtaacttctctgtattatcctgtgtttgctatttctgaaaataataagctgaaaatattcctctttggcataaggattatttggtgtggcatgttctgaacctccactgttggcatcctttcttgattagcagaaacctaggaacattgttgtaataatgactaaattattgtcactgtcacatttgttagtaactttttttaatataattgccattaaatgtaaaaagcagcatctaagacattcaaaatgtaatttkgatactacttttaaaaataagatgctaaattaatagataaggtgggtttcctcagtatattttcattctaaaccatccactaaagtagggctaaagaggaatttagagtaggaagacttaggttttgtattctgcctttgttcagtatcagtgtgactttggccaagttacctgacttctgaactgcattttgcttttctctaaataagtgggggtaatacctatattagaggattatgataaaaagatgtgaacatattataaaattattttataaactagaagacatttcaaagaagttaagctgccactgttagtttcacagacttgggtgtattagatgaacagcttttcagttattgcttctatagttgtcctcttgccctttcctggattatcagtttctgcctgtctacctagtcattcccatcagtgtaaaacatttataytgttatttcttccaagttcagaaaaaaccctctytygaytccccccatcccattccagcactttgggaggccaaggcgggcagatcatgaggtcaggagatcgagmccatyctggctaacatggtgacccccatctctactaaaaatacaanacaaattagccgggcttggtggtgggcgcctgtaatcccagctaccggggaggctgaggcaggagaaaggcatgaacccaggaggcagagcttgcagtgagccaagattgcgccattgcactccagcctgggcgacagagtgagactccatctcaaaaaaamgaawaaaaaaaacaacttattttaaattattttcctagaaattatgatgtcagcagaggtagctaggtggtattatggttgacttttgttatttttaagacagcttccgtatttcttaggagttttgctgaagaacatggtatggggagaacatataatattctcatacacttcttaggatgggatagatccctgtaacagaatattggttaacaagagaaaaacaagttttaagacatgtatacctcatatatacatgggagatactcgggggaagtgagtaaatctctcagaggtggcttaaataccatcatgtcctgaaaaaaaaaaaaaaagggcggccgc

SEQ ID NO: 19 - DNA, 1752 bp, Homo sapiens
  misc_feature (356)..(356): n equals a,t,g, or c
gtcggcggcggcggcggcggttgaactgactcggagcgaggagacccgagcgagcagacgcggccctggcgcccgccctgcgcactcaccatggcgatgcatttcatcttctcagatacagcggtgcttctgtttgatttctggagtgtccacagtcctgctggcatggccctttcggtgttggtgctcctgcttctggctgtactgtatgaaggcatcaaggttggcaaagcaagctgctcaaccaggtactggtgaacctgccaacctccatcagccagcagaccatcgcagagacagacggggactctgcaggctcagattcattccctgttggcagaacccaccacaggtgntatttgtgtcactttggccagtctctaatccatgtcatccaggtggtcatcggctacttcatcatgctggccgtaatgtcctacaacacctggattttccttggtgtggtcttgggctctgctgtgggctactacctagcttacccacttctcagcacagcttagctggtgaggaacgtgcaggcactgaggctggagggacatggagccccctcttccagacactatacttccaactgccctttcttctgatggctattcctccaccttattcccagcccctggaaactttgagctgaagccagcacttgctccctggagttcggaagccattgcagcaaccttccttctcagccagcctacatagggcccaggcatggtcttgtgtcttaagacagctgctgtgaccaaagggagaatggagataacaggggtggcagggttactgagcccatgacaatgcttctctgtgactcaaaccaggaatttccaaagatttcaagccagggagaagggttcttggtgatgcagggcatggaacctggacaccctcagctctcctgctttgtgccttatctacaggagcatcgcccattggacttcctgacctcttctgtctttgagggacagagaccaagctagatcctttttctcacctttctgcctttggaacacatgaagatcatctcgtctatggatcatgttgacaaactaagttttttttatttttcccattgaactcctagttggcaattttgcacattcatacaaaaaaatttttaatgaaatgatttcattgattcatgatggatggcagaaactgctgagacctatttccctttcttggggagagaataagtgacagctgattaaaggcagagacacaggactgctttcaggctcctggtttattctctgatagactgagctccttccaccagaaggcactgcctgcaggaagaagawgatctgatggccgtgggtgtctgggaagctcttcgtggcctcaatgccctcctttatcctcatctttcttctatgcagaacaaaaagctgcatctaataatgttcaatacttaatattctctatttattacttactgcttactcgtaatgatctagtggggaaacatgattcattcacttaaaatactgattaagccatggcaggtactgactgaagatgcaatccaaccaaagccattacattttttgagttagatgggactstctggatagttgaacctcttcactttataaaaaaggaaagagagaaaatcactgctgtatactaaatacctcacagattagatgaaaagatggttgtaagctttgggaattaaaaacaaacaaatacattttagtaaatatatatttttaaataaaaaaaagaaaa

SEQ ID NO: 20 - DNA, 2321 bp, Homo sapiens
  misc_feature (787)..(787): n equals a,t,g, or c
  misc_feature (880)..(880): n equals a,t,g, or c
gtgaaagtgggccttggaaaaakttctgaattaaagaaaagctgcatgtgcacggaatgcagtgtgatacattctctaaagcaacatgttgtaaaattttactgctttcttgttgtgttttatatcttgttttctccaggcttcgtggactcgaccagagaagcaagaggtatagcttacctgaccactagccagtctttagttttgaaagcattacagtttaactcaccattgcagtttaataaccagacatgctaaactaattagtaatttagctaaagaataggtcgatagtggtagacattacttagcaatagtatcatttaggatgagcaagcaagctgtgttgggagtggatgaacaaatccatattatttcctaaaactggatcttattctcttgctggtgctggtaaaatcacatccaggtaattacaccaatagaaataaattgcccccaattcccaggccaggcattttgaaatggtgaaagttttttgactcacatggttgatgtggctctggaccataaagtcacagagttagtgatctaaaaacccactcctccctttcctttccagctcaactcatcttgttgctcacttattttataatgatcagtcttggtaaattatcacatcacgtttcatctcaaaagcaatgcaaatgacatctctcgttggttttcccaaattgctaaacgtatctctgttacttttatagagcatyaaatttatgagattagaatgatgtggtacaaatggttttatgttttttaaagtcagtancatttaacctttgaaatttctctgactcattgcttcagtttggataatgtgggacttartttgaaaactgaarttaagtattaatctttaggntttgattgccacatctcaagamcctacttatgatcatgamtataattttttacccgatttatatgaagtaacatatagtgaaaatgaaaccagtggacttcagatgagattcaaggatctaatctctaaggacttttttaaagttgcctttgccttttatccagatggggctttgatcgtgtaatgctataaatgcagaacatcatgatcctatagattctgtattttaatttggtaaatctatcccttagtctttcmgaaatgataaytattcagaacgtataactcaagtgttcaggtcaaggytatacatatttatatgctgtttaatatttaaaagttgactgcctgtccccaggcactgatcttagtttctgcmcatgaacaggctgccattgtcmaattcarttcmttataaacttccygtgtwtaagactgtcctcccygtcattgggatgactgttaagtgcacagcctcactgagaggcttcccscctgtggcacaggaatcacttagtgctgtcacaggttgggtgctttattgtccaaaagtcatggacccactgggattggggaagagagagaagggttaattatcagccaytcttaagcagctacagatctcattctgcttgccttcatacaactttccttgtcattctcatttagagctggttgaggaggagctgagatttatcagggagcattaaggagatgttaagagaattattattgtaagtggaagtaataggtttactcccatgaaagcagacacctcactctgtttttcagaagtgtccttatcatgagtgtcttactttggacgtaattgactttcaagtgaatgctgcccctagggctcagaagttccattctctcctgtttgtctcatttggagatgaagaccataagtccagatgagtgcaaaagaaggctcaggttatggccaatttcattttgtaagttctaaaagcattagcacttttacctggaaggagggagacaaaaacattttgatgagaagaataattatcattaaccttcatatttttggggaaaaaaggagttttcttgccatcaatatcttttcatacttgcccagagctcatctcctccttctgctgcagcctgggtggtcagcatgactttttgtctggatggctggtaggtggcacaccctgaagttgtgcaggagccatagtaaaagcatttcaggggaagatagtctaatgacactggagtctatctgtgtatcctcaaagggagaactgggcatctggcagataattccatcatcaaatctgtagtgagcctactgcaaaataagaattctctttagaaggctggtctgtggacatcattaaacaggagaaatttccacatggagaaatttcctgaaagaaactagataggaattaaaaaaaaaaaaaaaaaactcgta

SEQ ID NO: 21 - DNA, 843 bp, Homo sapiens
acgagcccacccgtttctgcagatgcccgcatcatggtcctgaggggatgggggctggcctggagcctttcccccgtggtgtgtggctatagcggggacatgaagggggtgtgttggggacgtagtgaccactcccttctaccgtcagagatcctgcttccccctgccccctgcccctcctcggctgtccttcataaccccccacccactccccacctgccatctcctgtgcttgtgcggatccaggaagcacctacctgggcacagagatcatcgctcggtgcctcgcccctacacaagggcgattaacttctctgttatgaactcctacttagtaattctgacatgaaactcccactaggataaaacttggcgcagaacagcaattactgaaaacacatttttaaaaaggttgatgttttgtaagagttcatcctcctccactcctcagcctcctcaaggagacacatatttagatcttctctgtgtgagtctaacttggagactgtgagttgcagtttaaaaggggctctggggccaggtgcggtggcacacacttgtggtctcagctactcaagaggctgagatgtgaggaacgcttgagcccaggagttcaagaccagcctgagcaacatgggtagatgggatctacccaaaacatttaacaataaggctggcatggtggcatatgcctgtggtcccagctacttggaggctgaggcaggagaatcatttaagcctgggagatcgaggctgcagtgaggtatggtttcaactgctgtgctccagcctgggagacagggcaatactgtgtctctaaaaaataaaaaaaaaaaaaaaaaa

SEQ ID NO: 22 - DNA, 1382 bp, Homo sapiens
acgagtgcgggcagcagcagccccggcacgmgggagagagacaaagcatggaggacacaacaatgggaggaaaggcggactctcaggaacttcattcttcacgtggtttatggtgattgcattgctgggcgtctggacatctgtacctgtcgtttggtttgatcttgttgttgatgagcagattactagccaaagcaaaggacttccgttataacttatcagaggtgcttcaaggaaaactaggaatctatgatgctgatggtgatggagattttgatgtggatgatgccaaagttttattaggcctgaccaaagatggcagtaatgaaaatattgattctcttgaggaagtccttaatattttagcagaggaaagttcagattggttttatggtttcctctcatttctctatgatataatgactccttttgaaatgctagaagaagaagaagaagaaagcgaaaccgcagatggtgttgatggtacgtcacagaatgaaggggttcagggaaagacttgtgtcatattggatttacataaccagtaaccttgattcagggactgaagtcattggctaatgaacacctgaagcagcctcctttttcttttctttccttggcttatgcagggcttaatgtgcagtggggtggttgtgatcttaccgtgcaagtcaaccatgtgatcttgcccagtacagctactagcctagtcccttgctcgctcagctcccccaacttctattgaagaaaatggtactcctcattcttgtagtcagctacaaagtacactgaaaatgatgttcttggtggtataattggtttctgtatcgttttgtttcaactcatgtattcactgaactaaatttggacacttaacagcaaattgtgttgtggttaacccttgatgcttgtctttctaacacactattaattatgatgattctaatggatttcattataaaaatatttctggcatgatttttaagttaaatgcttctctgttctttaacatgactgatgtataaaatgatggttcttttactaagctgatattttttattgtaatttgtttaggtttgtcagataggttcatacaaaattaaaagtaaaattctgtgttaatggtgcttttaaaataatttaaaaataactccatgtttttgccttagagtaagttaacttactgttttcagatagtagcatgacatatttctgtctgtgaaagcaaaatttattttaaattttatttccaaatatacatccagagaaagtaatttgtattttttttaaagtaggcatattacacaagagggaacatgtgaatatgtatcttaatgttgtacatagggaaattattcatcctaaaaaaaaaaaaaaaaaaa

SEQ ID NO: 23 - DNA, 1734 bp, Homo sapiens
  misc_feature (1714)..(1714): n equals a,t,g, or c
  misc_feature (1719)..(1719): n equals a,t,g, or c
  misc_feature (1723)..(1723): n equals a,t,g, or c
gcgggagttcctccttgctctcgcccctactctttctggtgttagatcgagcwaccctctaaaagcagtttagagtggtaaaaaaaaaaaaaaacacaccaaacgctcgcagccacaaaagggatgaaatttcttctggacatcctcctgcttctcccgttactgatcgtctgctccctagagtccttcgtgaagctttttattcctaagaggagaaaatcagtcaccggcgaaatcgtgctgattacaggagctgggcatggaattgggagactgactgcctatgaatttgctaaacttaaaagcaagctggttctctgggatataaataagcatggactggaggaaacagctgccaaatgcaagggactgggtgccaaggttcatacctttgtggtagactgcagcaaccgagaagatatttacagctctgcaaagaaggtgaaggcagaaattggagatgttagtattttagtaaataatgctggtgtagtctatacatcagatttgtttgctacacaagatcctcagattgaaaagacttttgaagttaatgtacttgcacatttctggactacaaaggcatttcttcctgcaatgacgaagaataaccatggccatattgtcactgtggcttcggcagctggacatgtctcggtccccttcttactggcttactgttcaagcaagtttgctgctgttggatttcataaaactttgacagatgaactggctgccttacaaataactggagtcaaaacaacatgtctgtgtcctaatttcgtaaacactggcttcatcaaaaatccaagtacaagtttgggacccactctggaacctgaggaagtggtaaacaggctgatgcatgggattctgactgagcagaagatgatttttattccatcttctatagcttttttaacaacattggaaaggatccttcctgagcgtttcctggcagttttaaaacgaaaaatcagtgttaagtttgatgcagttattggatataaaatgaaagcgcaataagcacctagttttctgaaaactgatttaccaggtttaggttgatgtcatctaatagtgccagaattttaatgtttgaacttctgttttttctaattatccccatttcttcaatatcatttttgaggctttggcagtcttcatttactaccacttgttctttagccaaaagctgattacatatgatataaacagagaaatacctttagaggtgactttaaggaaaatgaagaaaaagaaccaaaatgactttattaaaataatttccaagattatttgtggctcacctgaaggctttgcaaaatttgtaccataaccgtttatttaacatatatttttatttttgattgcacttaaattttgtataatttgtgtttctttttctgttctacataaaatcagaaacttcaagctctctaaataaaatgaaggactatatctagtggtatttcacaatgaatatcatgaactctcaatgggtaggtttcatcctacccattgccactctgtttcctgagagatacctcacattccaatgccaaacatttctgcacagggaagctagaggtggatacacgtgttgcaagtataaaagcatcactgggatttaaggagaattgagagaatgtacccacaaatggcagcaataataaatggatcacacttaaaaaaaaaaaaagggggggccgcnctggngggnccaagctttcg

SEQ ID NO: 24 - DNA, 1357 bp, Homo sapiens
ggcacgagtttatttacaggcatataaaatgaaattgtgagatgttttgcaagcttctttttactttgagtagcttttaatttgtatgtttttatgtggatgaagagcattttttatgcttttgtgcaataggttccaatatgcatttattagacatctgtttaaatggtaatgtagcatttattttgctaaattgaaagggaacatagatggaattccaaaatatgtacattcagctgtttggtttttcgtttttcattgttattattgtgagaatgctgttattggggttgtgtgtgagtgcccgtcagccagtgatgcctcgggccacgctgtggggccacctcagtcctgcctgggtcctggtgccttggaccccacgtgcttgtggccaggctgcccctgggcggggccatgtggcctcagaccacaagagcggactgccctggcccaagcactgcagctgcctgcacccccgggcttcgcagccttgcttgttttctctgaacagcaacagaacagtgttcacagcgattcaaagggtggcattgggttggacgttctgggtacaagccaacctagtcccacgttgtacgtgaatgtttaatgtgctctcaaaacatggaaaataagtttagtgcacatagctaaatcacaaaacatccaatttctctgtttcctcaggaagtcattactgcgccaccacatcacatgaccttaacatgatcaatgtatttctctgccttgacatttaaatacataaattgagataagtagattagaaaatcattcaaatgataccataatttgtacgggacagggtgcgggcaatggccacgtggccaaggccccgcaggaacgcgccgaggtctccctcaccctccaggtgtccttcgcacccaacagtgcgtctgaggaacgagctgcagtttgagcgttcccctgagatgtgcgtagcctccgtgtaaatgtccactcccatggcttaattgcctatcagacgcattttcccagacgaaagcaatgttgggttggggaagacagtgcagccacccagcctttaccagcagcgtacggcagacgaaggcagtcgaggtgtggaggtgatcacgaagatacatgtgtttgactgtttaatttgaaagtttacattttttatgctttgtgttggtgtgtaatttttgtactcttggtggctagtttttgtcaaatcttttttggaatattgcttaaatgttttgattttatgatagtgaagcttgtattcagtgttttgccaattaatattatatgcttgtaataaaagcaaaagaaaagcttaaaaaaaaaaaaaaaaaaaaaaaaaaaaaaaaaaaaa

SEQ ID NO: 25 - DNA, 1313 bp, Homo sapiens
ctgcaggaattcggcacgaggtcttgctgtgttgctaatgttgaactcctggccctaagtgatcctcctgccttacctgggattacaggcatgcaccttgtgtctcactaatagatttgctttctaggtctttcctgtcaggtccaccaatattttagatggatggagcacttgattagatcaggagtcaaaattctattcctgaatctattacttaccagttgtactactttgaatgaatggcttaattttttagtgactttgaattgttccagatataaaatgacaggataggtctagagagttgccttagatgaattaggaaacagtttctgagatagagatgttagtgcagtaggtttattggggagtgttctcaggaatgcctgtggggaagtgaaggatgtggaggaggaagatggactggaattcatttgccagagtcctcagcagatcctaccagcwctagagctgggatggcccttcagagttatcctgatccacaaggggtcagcccctaggcattcataagtcactttgtccagtcattggggttgaccccaggaaaaggtatggtttggggtaagaggactcttcagttgagggtagttcctaggaagctagtgagctatgagttggcatcaggcaacatttccagcaatttggtcaatgagttccccttaaggctggatctgggccacggaccatggcactcactgccatattcacagcgtcgttttcagtgtgaaattctactgtgttaaagtattgtacagtcactgaaatgagagtatttttatatttggctacccatgacatttattctcttctgattatattgtttctctcctgatctagagttttagattgttttgtttgttttgttttgttttcctgtacttttctgtctgttgaggaaaaagagttttattcttctagtatgagagtttctattagtcctcctttttagacagatgaacaccctgtgacaattccttttgtctttttgtggcgtgtaaaaaaaaagaaatccataaatagagtcgttacgcaagtcttcatgagttaatttctctctccagttttcttactactttttccagttttcattttcttcaacagaaagcttcttcttctggctggacacagcgctcacgcctgtagtcccagcactttggaaggctgagggggatgtaatcccagcactttggaaggctgaactcctgagttcaggagttccagaccagcctgggcaacatggcgawactcccaactctacaaaaaatacaaaaaaaaaaaaaaaawactcgtag

SEQ ID NO: 26 - DNA, 1003 bp, Homo sapiens
  misc_feature (990)..(990): n equals a,t,g, or c
  misc_feature (1002)..(1002): n equals a,t,g, or c
aattcggcacgagttcctctcctcctgttttgctacattctcctcagtggcaaaaagtttcactctacctctgacagcatgtatattgcaccagtagctaacaaaaactggtctagtcaaaccaaatgggcacaaaagaaccaggataccaaaagttaagctcatacagctgcaaaccatatcacttcttggtaacaatgcagacctcataaacctaaagaagagaaagaaaagaaaacttttgttactttccttttttgcttgtcacttatatacaggctatgtgagaatataatttgtaggtataacacattaagaaaaagttatcttcattggatagaattgaatggtggtcgctgataggaatagggcgtcctctagctcttatctctgtctcttactcttttctctttctctttttctctgtcatgagactgtgtgtgacagggccacctgtctttttttttttcttaaatttttttttctttttatgtgtaggtgcatgtcttggggatttaaaaatttcaaggctggtttacttatgcaaagcatgcctacgtctggaatacttagggaaagaaagcgactccatgttgtccgaattcctcaagggacagaaaaaaaattggagactgttgaaatgcagatttgaagtaatttttttaaaatattattttgggttctgcgacattgtgaaaaattaaagttgttgtgcaatacttaattcagacatgtaccacaagttaatggtagactaacactggggggtggggtctaggcatcatgcttttgtcagcatactcttgagcttttaagtctactatgtctgaactgtggtttcttgtttatccttttttccttagttggactgtaatgtatggtctgtcaacctgtgaatctttaaagtatgattcaggtattgttgtattctttactgtgtaataaaaaagttgaaaaaaaaaaaaaaaaaacccaagggggggcccggtncctttccccctnt

SEQ ID NO: 27 - DNA, 1963 bp, Homo sapiens
  misc_feature (335)..(335): n equals a,t,g, or c
  misc_feature (1959)..(1959): n equals a,t,g, or c
ggatcctcgcggcggcggcggtgcttacagcctgagaagagcgtctcgcccgggagcggcggcggccatcgagacccacccaaggcgcgtccccctcggcctcccagcgctcccaagccgcagcggccgcgccccttcagctagctcgctcgctcgctctgcttccctgctgccggctgcgcatggckttggcgttggcggcgctggcggcggtcgagccgcctgcgcagccggtaccagcagttgcagaatgaagaagagtctggagaacctgaacaggctgcaggtgatgctcctccaccttacagcagcatttctgcagagagcgcagcatnattttgactacaaggatgagtctgggtttccaaagcccccatcttacaatgtagctacaacactgcccagttatgatgaagcggagaggaccaaggctgaagctactatccctttggttcctgggagagatgaggattttgtgggtcgggatgattttgatgatgctgaccagctgaggataggaaatgatgggattttcatgttaacttttttcatggcattcctctttaactggattgggtttttcctgtctttttgcctgaccacttcagctgcaggaaggtatggggccatttcaggatttggtctctctctaattaaatggatcctgattgtcaggttttccacctatttccctggatattttgatggtcagtactggctctggtgggtgttccttgttttaggctttctcctgtttctcagaggatttatcaattatgcaaaagttcggaagatgccagaaactttctcaaatctccccaggaccagagttctctttatttattaaagatgttttctggcaaaggccttcctgcatttatgaattctctctcaagaagcaagagaacacctgcaggaagtgaatcaagatgcagaacacagaggaataatcacctgctttaaaaaaataaagtactgttgaaaagatcatttctctctatttgttcctaggtgtaaaattttaatagttaatgcagaattctgtaatcattgaatcattagtggttaatgtttgaaaaagctcttgcaatcaagtctgtgatgtattaataatgccttatatattgtttgtagtcattttaagtagcatgagccatgtccctgtagtcggtagggggcagtcttgctttattcatcctccatctcaaaatgaacttggaattaaatattgtaagatatgtataatgctggccattttaaaggggttttctcaaaagttaaacttttgttatgactgtgtttttgcacataatccatatttgctgttcaagttaatctagaaatttattcaattctgtatgaacacctggaagcaaaatcatagtgcaaaaatacatttaaggtgtggtcaaaaataagtctttaattggtaaataataagcattaattttttatagcctgtattcacaattctgcggtaccttattgtacctaagggattctaaaggtgttgtcactgtataaaacagaaagcactaggatacaaatgaagcttaattactaaaatgtaattcttgacactctttctataattagcgttcttcacccccacccccacccccaccccccttattttccttttgtctcctggtgattaggccaaagtctgggagtaaggagaggattaggtacttaggagcaaagaaagaagtagcttggaacttttgagatgatccctaacatactgtactacttgcttttacaatgtgttagcagaaaccagtgggttataatgtagaatgatgtgctttctgcccaagtggtaattcatcttggtttgctatgttaaaactgtaaatacaacagaacattaataaatatctcttgtgtagcacctttaaaaaaaaaaaaaaaaaaaaaaaaaaaaaaaaaaaaaaaaaaaaaaaaaaaaaaaaaaanaaaa

SEQ ID NO: 28 - DNA, 796 bp, Homo sapiens
  misc_feature (748)..(748): n equals a,t,g, or c
tcggcccgagaagaaatgtgacgcactctcaccaagatgctgaagctgacattcatcaataagcagctgtgcatccactaggcatttggtaaatgttaacttatctaccgaggtggtgttttcttagcctcccacctccttgctgtggagcagcttcatgtaccatgatgcatattcagatcattcttaatactcatattttgatagagaggtttttaggttttcttttaaaccaagtttattgagataaactactttggtaggatatggaacttaggaataatggtatgaaactagacagcttttttttttttattacactttaagttctgggatatgtgttcagaacatgcaggtttgttacataggtatacacgtgccatggtggtttgctgcacccatcaacctgtcatctgtattcggtgtttctcctaattctatcccwcccctacccccctgcccccaaaaaggccccagtgtgtgatggtcccctccctgtgtccatgtgttctcattgttcaactcccacttatgagtgagaacatgaggtgtttggttttttcttcctgtgttagtttgctgagaatgatggcttccagcttcatccatgtccctkcaaaggacatgaactcagtccttttttatggctgcatagtatttcgtggtatataagtgccacattttctttatycagtctaycatttgggttggttccaaatctttgctattgtgaatagtgccgcaatanacatacgtgtgcatgtgtctttaaaaaaaaaaaaaaaaaaaactcgag

SEQ ID NO: 29 - DNA, 1256 bp, Homo sapiens
ctatgttccatcattccttcccaaagccaccggaagcattccttctaggaaaggtggagtcggtagtgagaagccggaggtgcccctacagacatacaaggagattgttcactgctgygaggagcaggtcttaactctggccactgaacagacctatgctgtggagggtgagacacccatcaaccgcctgtccctgctgctctctggccgggttcgtgtgagccaggatgggcagtttctgcactacatctttccataccagttcatggactctcctgagtgggaatcactacagccttctgaggagggggtgttccaggtcactctgactgctgagacctcatgtagctacatttcctggccccggaaaagtctccatcttcttctgaccaaagagcgatacatctcctgcctcttctcggctctgctgggatatgacatctcggagaagctctacactctcaatgacaagctctttgctaagtttgggctgcgctttgacatccgccttcccagcctctaccatgtcctgggtcccactgctgcagatgctggaccagagtccgagaagggtgatgaggaagtctgtgagccagctgtgtcccctcctcaggccacacccacctctctccagcaaacacccccttgttctacccctccagctaccaccaactttcctgcacctcctacccgggccaggttgtccaggccagacagtggcatactggcttctagaattcctctccagagctactctcaagttatatccaggggacaggcccctttggctccaacccacacgcctgaactttaaggatcattggactatcttctctgtggccagcgcagctctcttctgtgttcacagaatggccactgataggcaygcctcttttcccacccactggaaggctcacaggcaaggtgagagaggacacagaaggtgccaacactgtcgctacagtaaggacctgaagtgactttgagaaattcaccctcacaaaccttccttcaggagcaggcattggtagtgcagaggcacagattccgtcctttaccagctgcagaatcttgggcaagttacatagcctctgtgagcctcatcggtaaacagtgggggttatgaaacccacctcacagggttgttgtgaggatccaatgagttgatttaggtaagcacctagcacatgccgtggcaccaagtaagcactcaataaatcactcaactccttaaaaaaaaaaaaaaaaaactcgag

SEQ ID NO: 30 - DNA, 752 bp, Homo sapiens
actgaacagtggttaatcctgactctgtttttgactgacagttaacagttacatgaaccattcatattacagctcttacttaaatttgaccaagccaggatatatctgttaggccacattcatttagggatcatgttttccaaagcaggtttgggcaaaattaatccacaggactgaaaggtatacatctgtgagttttgttctcacttccacctctaatttgaagaacactttaattgacacagaatacatttcacatatttaacctctacaataagttctgacacattttccatgaaacaaaccatcgctatattcaagataatgaacctatctatcatactcccaaattccttctkgcatctttgtaatttctcactcttccttctccctctccccgtcccatcccaaccactgatctgctcaggcaactaccaatcttctttctgtcactatagattaatttgcatttttaaagaaatttacatacatggaaccatacatcatctatgctttgtagtatgactcctgtcactcagtacaattattttgagattcatttatgttawtgtatgtatcaatagttcatcccttttattggtaagtaacatttttttgtataggtataccatgatttgttgatgaacaaatttacctgttgatgaacatttacgttgttaccaagatttttgctattgaaaataaagtttttatgaatatttatatatataaaaaaaaaaaaaaaaactcga

SEQ ID NO: 31 - DNA, 2243 bp, Homo sapiens
  misc_feature (929)..(929): n equals a,t,g, or c
tgcctcccttcctgcagattgtggacagtagttcctcagcctgcaccctggattccttcttccccttcctagctccatgggactcgccccaagactgtggcttcaaggaccaccagccccttactcttcaagccctgactgtggagttggtagatgcctctgatcctcagtattctctctggcaatgttccacggcttctccttcctgggagctggctccataacttgattttccccaaacgtgttgcaatccctgctgccccttagccacccagggtcttgtgtgggtatgagtgtagaggatgggggtatgccaggcctgggccgtcccaggcaggcccgctggaccctgatgctactcctatccactgccatgtacggtgcccatgccccattgctggcactgtgccatgtggacggccgagtgcccttycggccctcctcagccgtgctgctgactgagctgaccaagctactgttatgcgccttctcccttctggtaggctggcaagcatggccccaggggcccccaccctggcgccaggctgctcccttcgcactatcagccctgctctatggcgctaacaacaacctggtgatctatcttcagcgttacatggaccccagcacctaccaggtgctgagtaatctcaagattggaagcacagctgtgctctactgcctctgcctccggcaccgcctctctgtgcgtcaggggttagcgctgctgctgctgatggctgcgggagcctgctatgcagcagggggccttcaagttcccgggaacacccttcccagtccccctccagcagctgctgccagccccatgcccctgcatatcactccgctaggcctgctgctcctcattctgtactgcctcatctcaggcttgtcgtcagtgtacacagagctgctcatgaagcgacagnggctgcccctggcacttcagaacctcttcctctacacttttggtgtgcttctgaatctaggtctgcatgctggcggcggctctggcccaggsctcctggaaggtttctcaggatgggcagcactcgtggtgctgagccaggcactaaatggactgctcatgtctgctgtcatgaagcatggcagcagcatcacacgcctctttgtggtgtcctgctcgctggtggtcaacgccgtgctctcagcagtcctgctacggctgcagctcacagccgccttcttcctggccacattgctcattggcctggccatgcgcctgtactatggcagccgctagtccctgacaacttccaccctgattccggaccctgtagattgggcgccaccaccagatccccctcccaggccttcctccctctcccatcagcagccctgtaacaagtgccttgtgagaaaagctggagaagtgagggcagccaggttattctctggaggttggtggatgaaggggtacccctaggagatgtgaagtgtgggtttggttaaggaaatgcttaccatcccccacccccaaccaagttcttccagactaaagaattaaggtaacatcaatacctaggcctgagaaataaccccatccttgttgggcagctccctgctttgtcctgcatgaacagagttgatgaaagtggggtgtgggcaacaagtggctttccttgcctactttagtcacccagcagagccactggagctggctagtccagcccagccatggtgcatgactcttccataagggatcctcacccttccactttcatgcaagaaggcccagttgccacagattatacaaccattacccaaaccactctgacagtctcctccagttccagcaatgcctagagacatgctccctgccctctccacagtgctgctccccacacctagcctttgttctggaaaccccagagagggctgggcttgactcatctcagggaatgtagcccctgggccctggcttaagccgacactcctgacctctctgttcaccctgagggctgtcttgaagcccgctacccactctgaggctcctaggaggtaccatgcttcccactctggggcctgcccctgcctagcagtctcccagctcccaacagcctggggaagctctgcacagagtgacctgagaccaggtacaggaaacctgtagctcaatcagtgtctctwtaactgcataagcaataagatcttaataaagtcttctaggctgtagggtggttcctacaaccacagccaaaaaaaaaaaaaaaaaactcgag

SEQ ID NO: 32 - DNA, 1624 bp, Homo sapiens
ggcacgaggtcgccgccgcggccgcctggaattgtgggagttgtgtctgccactcggctgccggaggcgaaggtccctgactatggctccccagagcctgccttcatctaggatggctcctctgggcatgctgcttgggctgctgatggccgcctgcttcaccttctgcctcagtcatcagaacctgaaggagtttgccctgaccaacccagagaagagcagcaccaaagaaacrgagagaaaagaaaccaaagccgaggaggagctggatgccgaagtcctggaggtgttccacccgacgcatgagtggcaggcccttcagccagggcaggctgtccctgcaggatcccacgtacggctgaatcttcagactggggaaagagaggcaaaactccaatatgaggacaagttccgaaataatttgaaaggcaaaaggctggatatcaacaccaacacctacacatctcaggatctcaagagtgcactggcaaaattcaaggagggggcagagatggagagttcaaaggaagacaaggcaaggcaggctgaggtaaagcggctcttccgccccattgaggaactgaagaaagactttgatgagctgaatgttgtcattgagactgacatgcagatcatggtacggctgatcaacaagttcaatagttccagctccagtttggaagagaagattgctgcgctctttgatcttgaatattatgtccatcagatggacaatgcgcaggacctgctttcctttggtggtcttcaagtggtgatcaatgggctgaacagcacagagcccctcgtgaaggagtatgctgcgtttgtgctgggcgctgccttttccagcaaccccaaggtccaggtggaggccatcgaagggggagccctgcagaagctgctggtcatcctggccacggagcagccgctcactgcaaagaagaaggtcctgtttgcactgtgctccctgctgcgccacttcccctatgcccagcggcagttcctgaagctcggggggctgcaggtcctgaggaccctggtgcaggagaagggcacggaggtgctcgccgtgcgcgtggtcacactgctctacgacctggtcacggagaagatgttcgccgaggaggaggctgagctgacccaggagatgtccccagagaagctgcagcagtatcgccaggtacacctcctgccaggcctgtgggaacagggctggtgcgagatcacggcccacctcctggcgctgcccgagcatgatgcccgtgagaaggtgctgcagacactgggcgtcctcctgaccacctgccgggaccgctaccgtcaggacccccagctcggcaggacactggccagcctgcaggctgagtaccaggtgctggccagcctggagctgcaggatggtgaggacgagggctacttccaggagctgctgggctctgtcaacagcttgctgaaggagctgagatgaggccccacaccaggactggactgggatgccgctagtgaggctgaggggtgccagcgtgggtgggcttctcaggcaggaggacatcttggcagtgctggcttggccattaaatggaaacctgaaggccaaaaaaaaaaaaaaaaaaaaaaaaaaaaa

SEQ ID NO: 33 - DNA, 879 bp, Homo sapiens
gctgcatgctgggcgggaactaggaagcctccccaacctctggccccgtggagccctcagcctcagctgcagtggaggcacctcgggctctggggcaaccaagtgtgacaggtggctgtgcacgggcagaggtcctgtggaagatttcatgtgacgggcagaagaggaggaggaggcaggggaggaagcacatccatgaacagggctgtctgggggcagcctgggtggtcgtgaaataggactcagtggccttgagtcctcatttaggccctgatgttctttagcctgcctggcctttggcaaatcgccagcttcacgcacaacctcatttttcacctttgggtgtgggggtcagagtcgggagagcacctgcaaagccacaatgatccagacacacggcaaggtgggcacattcccatcaggctcctcggggagagcagcgcttctgtgcccgggagcagcgaaggtcacacaggaggacccgcacctcctcgtgtcggtggctccgctggtataatcaggactcacgtggtgttcctcgtgtcgtggcccttattgcagagggagcagcacaggctttcctggaagctcccctcggtcatgtggggtgactccagagarccccaccttgcgagactggaccagtccaagtggcctkgagccacarcggcctkgcagtacctkgggagggggtgatgacaggtgcacacggaggcccatgtggtctgtctggagaatgccggagatgtgaaatatgtaatcctgagtgtggcttctagaaggaaggttcgcaaagctgaatatccactcgtgctgttcccttctcacaggagattcctgtcaacgtccgattctgcctcgaaggcaggaggagtaagg

SEQ ID NO: 34 - DNA, 2761 bp, Homo sapiens
  misc_feature (1006)..(1006): n equals a,t,g, or c
  misc_feature (1376)..(1376): n equals a,t,g, or c
  misc_feature (2211)..(2211): n equals a,t,g, or c
gattaaaatttatttaataataaggggaggaataaaataactatgcatttttttgttgaaagcacaattgtgtctgatactttaattacactatctaatttaacctttcataaatgcccagaatatgagaatatcatccaagatttaaataccaattaccaaaatttacagctatcaaatggaagactcaggtttatgctatgccacgttttctcttctttcctttttgtgatggtgttccaaattgtggagaaagaaaacattctatttgtgattgcttctgctagttacttctgcaaaacaaactactcaaattcagtggtgtgatgcaataaccatttgtcatcctcatatattctggggtcaggggtcaaaaatgcaaagtggggtgacatctcgtggtctacagtaattggggcctctgagaattcctagctatctaggaatgaattaaacgttggacaatgaagttttctgaaagcttctttacgtttggctcctgcatkggtatgacttaaaggctgcgctcaaaataatctcttaaccagagkgtctgaatattgcttcttcatgtaacttgagcttcctcacaacatggaatcatacaggtagcttgcctgagtgttgcagttaatgggtcaatgtattgcctttaataatcttgcctcagaagtcacatagaattactttaatgctgagttggtttaagcaatcacagcctgtctgacttcagggggaagaaacatgatgtctaccctttgatgtgaggacattcaaagtattcgtggctaymttttaaaaaagccacagttatcttctttttaaagagatgccatatccttattatcagcaatagaatcaggatttgaaaatagttcttatgctacatatgcattttttataatcattctttctattataatctttttcagaaagggtgaaggggtaaggattatgtttcatactttgkgaaattctgkgctctataagcatttttattttttgnccataatagattatggtacaaagtaactcaaaactagagtgtataaacataaaaaatacaagttttcatatccaagctgtggataagatattcaaatataaaaaagattgtgaatttgttttaaaaagtcttctaattttgtaaaaagamctaagataattgtccactaatcactcattaaatctcctccttagttctacttccacaaaagctattaccatctatgattaatttggatttcagaggaagaaaatacagtttgaggaaaatggattgttggagcaatctcaatgttaactacataaaatagcttattacttgaaaaatgaggatattgtatgaattttcgcaagtcaattggtagcaaaancgacatttaagtgattgtaaatatgtcatatataaaactatcttgtaaagatgttacagagatattatatgttactagcttctggattcagaaaaataactggaacagatttaagttgggtaattgtagtgtgtctaataattttaatacaaggtaaaaacattttctgttgaaaatcagttttaatattgtttggttttatttatattttgaaaatttaaggattcttgaatattcttaagtaaattgcaatttaatgcaattgtagttatactcagtaatatagttacmcttgattraagccattataaaggaaatgtaatcccatactgattatcttcacatttcttttggttaaagatcagtctatttcattgagataacagttcaggagaaaagttattgactacatgtatctatagtattgtctaagcaacaggagtttagtttgcatgttttttatttttgagagtacatcaacgtaatgaaatgtatttaaaattgtacccatatatacataatgatatatatatatatttatgttttmcagcagtgtttttccttggagatgattcaatcaaattgcaaagrggcacttctaattaattattgggaagtmcaagctaggaytattgttttcctgaacgtttgtgmcttgtagtgatctcttmcagacgtgggggtctggmcacttggaccttaaattggaaatggttaaaaaattgttatccaaagaatgacaatggtttgtttgccaagtctttttgttttgttgtgttttgttttttgagacggaatctgtcaccctgcactccagcctgggtgatagagtganactccgtctcaaaaagaaaaaaaaaaatcaacacctaaaaatttactttcttctagtcaatttatttcgatgtgcatcataaattaataacaaaaggggtagatattttattgagctatggttcctgaatcaaaaccacaatctggaggtttccgtctcttcataaaagaagttaaaactcagtgcatgttgctagacgtcatttaatgatcttcattcttctctgtccagagcatgtgtgaagtattaggccagaaagagagagataaataatcttttcccatgcacccctgctggtcacagaagctggctctttaaagtttgagtaactgtcactttgtcaggcatggttataaagtttccagaaagaactagtaaggagcattaatataagatttccccagatgccaattttgttttctgctatatctcactcctctttgaatttcctcatacaattttccatttaaaatggagaattcagctttcttgatcctataataaacacatttgtctttatttgatacaaaaaaaaaaaaaaagkgcggcc

SEQ ID NO: 35 - DNA, 755 bp, Homo sapiens
  misc_feature (1)..(1): n equals a,t,g, or c
  misc_feature (733)..(734): n equals a,t,g, or c
natttcccgttcagttattccggtgacactatagaaggtacgcctgcaggtaccggtccggaattcccgggtcgacccacgcgtccgaactcctgaaacagtgaggacatctcacagaccagacaggagctggggctctgcatctcacagcggtgcctgtcagacaggaagaagtcccgcagaagtggcgtgtgggtcagggcctgcacgatgcagttcatgaagcatgtgttcccaaggttgatcagcccacgcagacctatggtgcagttcgaggtgatctttctccttttcgggttgtgcttcagcagttcaagctcccgtttggttggttcccaagttgaaaacttctctccaacgccttgcattttccaagcttttcgctgctcctccttggcgattatttccatgtctttgtcatagatgtagtcctggcacagaaaacagtagatgcctccgtacatcagatcaatggccaggttgtgccgcttcgccttcgcatgctcgtgaatatgcttctttgtgaaacagccgaagaagacacagtagaggcaggaatgcagcctgttgaggtggacgccacagacatggcagatacaggacttggccttgcgcttgcgggcctcagccgtgccgctccacacgaagcactggtagatggcccgcaggttctgcttccagttgtccaccttgaagctgcccaggtgcgagcagcccggcggcgctaccgccnnctcggcgtccatggcctcgcc

SEQ ID NO: 36 - DNA, 2089 bp, Homo sapiens
  misc_feature (774)..(774): n equals a,t,g, or c
ggcacgagcccggaggcctacgtcggacccggaggccctgaatgccccatgcgcaccccacagctcgcgctcctgcaagtgttctttctggtgttccccgatggcgtccggcctcagccctcttcctccccatcaggggcagtgcccacgtctttggagctgcagcgagggacggatggcggaaccctccagtccccttcagaggcgactgcaactcgcccggccgtgcctggactccctacagtggtccctactctcgtgactccctcggcccctgggaataggactgtggacctcttcccagtcttaccgatctgtgtctgtgacttgactcctggagcctgcgatataaattgctgctgcgacagggactgctatcttctccatccgaggacagttttctccttctgccttccaggcagcgtaaggtcttcaagctgggtttgtgtagacaactctgttatcttcaggagtaattccccgtttccttcaagagttttcatggattctaatggaatcaggcagttttgtgtccatgtgaacaactcaaacttaaactatttccagaagcttcaaaaggtcaatgcaaccaacttccaggccctggctgcagagtttggaggcgaatcattcacttcaacattccaaacwcaatcaccaccatctttttacagggctggggaccccattcttacttacttccccaagtggtctgtaataagcttgctgagacaacctgcaggagttggagctgggggactctgtgctgaaagnaatcctgcaggtttcctagagagtaaaagtacaacttgcactcgttttttcaagaacctggctagtagctgtaccttggattcagccctcaatgctgcctcttactataacttcacagtcttaaaggttccaagaagcatgactgatccacagaatatggagttccaggttcctgtaatacttacctcacaggctaatgctcctctgttggctggaaacacttgtcagaatgtagtttctcaggtcacctatgagatagagaccaatgggacttttggaatccagaaagtttctgtcagtttgggacaaaccaacctgactgttgagccaggcgcttccttacagcaacacttcatccttcgcttcagggcttttcaacagagcacagctgcttctctcaccagtcctagaagtgggaatcctggctatatagttgggaagccactcttggctctgactgatgatataagttactcaatgaccctcttacagagccagggtaatggaagttgctctgttaaaagacatgaagtgcagtttggagtgaatgcaatatctggatgcaagctcaggttgaagaaggcagactgcagccacttgcagcaggagatttatcagactcttcatggaaggcccagaccagagtatgttgccatctttggtaatgctgacccagcccagaaaggagggtggaccaggatcctcaacaggcactgcagcatttcagctataaactgtacttcctgctgtctcataccagtttccctggagatccaggtattgtgggcatatgtaggtctcctgtccaacccgcaagctcatgtatcaggagttcgattcctataccagtgccagtctatacaggattctcagcaagttacagaagtatctttgacaactcttgtgaactttgtggacattacccagaagccacagcctccaaggggccaacccaaaatggactggaaatggccattcgacttctttcccttcaaagtggcattcagcagaggagtattctctcaaaaatgctcagtctctcccatccttatcctgtgcctcttactacttggagttctcaacctagagactatgtgaagaaaagaaaataatcagatttcagttttccctatgagaaactctgaggcagccacttatcttggctaaatagaacctcacctgctcatgaccagagagcatttaggataatagaggacctaactgaaggaatccttgtatatgaaaggagttattttagaaaagcaataaaaatattttattcatmaaaaaaaaaaaaaaaaaaaaaaaaaaaaaa

SEQ ID NO: 37 - DNA, 785 bp, Homo sapiens
cttttagaaggtacgcctgcaggtaccggtccggaattcccgggtcgacccacgcgtccgggaaatgaactaccatttataacttctgtttttttattgagaaaatgattcacgaattccaaatcagattgccaggaagaaataggacgtgacggtactgggccctgtgattctcccagcccttgcagtccgctaggtgagaggaaaagctctttacttccgcccctggcagggacttctgggttatgggagaaaccagagatgggaatgaggaaaatatgaactacagcagaagcccctgggcagctgtgatggagcccctgacattactcttcttgcatctgtcctgccttctttccctctgcgaggcagtggggtgggattcagagtgcttagtctgctcactgggagaagaagagttcctgcgcatgcaagccctgctgtgtggctgtcgtttacatttgggaggtgtcctgtatgtctgtacgttggggactgcctgtatttggaagatttaaaaacctagcatcctgttctcaccctctaagctgcattgagaaatgactcgtctctgtatttgtattaagccttaacacttttcttaagtgcattcggtgccaacattttttagagctgtaccaaaacaaaaagcctgtactcacatcacaatgtcattttgataggagcgttttgttatttttacaaggcagaatggggtgtaacagttgaattaaacttagcaatcacgtgctcaaaaaaaaaaaaaaaaaaaaaagggcggccgc

SEQ ID NO: 38 - DNA, 1458 bp, Homo sapiens
ccacgcgtccgggaattttcaaaagatccaaacagagacttcctgcatcttctgcctttccaacagaagcggtgatcgtctaagtatgagcctgtggcttcctttgtgcatttgagcatgctgtaattaagatgagatcagtttcttagaaaaagctttcctgaatccctctgacgttgcctgggatctttctgttgattcgtcttttctggagattgggacagagcatctgtggtccagggaagttagtcctctggcctcaattctgttgtggatgtgcagtgataagcgggcattgcgtgcctcgggggatgcctagttcgtggcttcctggctgttttgtccttctgtgtcttgtagctgtagggtgccagctcagggagtggggtgttggcggcgtttccgcggttggcctccttgctttgccgcacctccaggttctgggcatgagaggccgtggcctcatttctggtggataacctttttagtttaatagcatctttaattagatcacagcattgaattcaaaatttcttctgcaaagaaagttgtggggcataagacaccgggaatgagggaggaggaagacagttgtgttttctctttaaaccttgagctctagccgatgcatttgtcaggaaatacagcactttgtcttaagaaaacaaggaaggaggccgggcgcagtggctcacgcctgtaatcccagcactttgggaggccgaggcgggcggatcacctgaggtggggagtatgagaccaccctgactaacatggagagaccctgtctctactaaaagtacagaattagccgggcgtggttgcgcatgcccataatcccagctactgaggagacttgaggtaggagaatcacttgaacctcagcggcggaggttgcagtgagtcgagatcgcgccagtgcactccagcctgggcaagaagagcgaaactgggtctcaagttaaaaaaagaaagcaaggaaagagtaatttacaacgaaggaaaaaaacccacagcacacccttcgcggctgtcagcgctctcctgatgtcacagtggctgcgtgtccttggggtgggtgaggtgtggggagcccagcccctggccctgcctcccgcgccccgctccccttctctctcttactcggttaagccatagcgaggcctccgctcgtttcagatatgaatttgttttatagattataaatatgcatatacagtgtatgtataaagcagaatgcctgcctttcctggttattttttgtaccatattgtaaattatattatttattctttaccaattttgggaataaaaggtgttttggttatttaatataataagagctgttaaacttctgtttaaatttccagttcaacttgtaaatgtttttattgtgcataaatacatactaatgttgatctaaaaaaaaaaaaaaaaaaaaaaaaaaaaaaaaaaaaa

SEQ ID NO: 39 - DNA, 2657 bp, Homo sapiens
  misc_feature (179)..(179): n equals a,t,g, or c
aatatctcatgaatgagtttgaagtttgcttggattttgaaatgaatgggactttgtctttattactaattcaccaaatttgttgagcgcaaaagcaattaatgtagtttaagtatttagtatgtacagttctctgtgttaacagctgagaagtaagcaaccttttctgactgcatatnggtgtattcctcttttgagtccccataatattttataaattgtaatgccccatcttgtactacagttgtcttattcgtattgtttataaactttgagggttaggactgggtcttactcatctttatgtgccttccttatgcttcaaagaatttaccatctaatggaagagaacatttgcaagttggctccataccaagctccttccacatactctactcatctgaactttgaatgcagaatctttaaattgcaaccccacatactaaggtcaagaaagaacttaatgggaattaatctccacccattagctttaccctgacatcaggattgccaaatccaatggactcttgtctattcttacgtgacttctgctggaaaatgcgaatgttgaccatcctgccacttggaactctcttcccactcctcacattgcttttgctaccactggaagttccttctgtttcttgtggagtaccttttgctgtctgggacttgtagataatggtgtttcctagggctccctccagggccctctgcctcactaactggatatacttttcctgagcaaatcccaggaaacttgcgtcagaccgtgacttcaaatacaggttgataaatgctaaactgtctccaaaccagacttcatcctagcctccacacccagacacccaactgctatggatcaactttttagaatatcctcacttcaaactgaccttacctaaaataatgactttttcccccaataattgcccctgctatattccttatttctgaatggtacctcctagctatatagattatctgaggagcttactgaaatgctgattctgaagataaggggcatggctttaagattctgtatttctggcgagtacccaactggtgctcatgctgctgattgagaaccacttctgaatatagcaaggctgtaaattatccactacgtgccctcgtaattgtcttagttcaagcccagattattgtagtagacttagtatttctttgccttagttgatctgtgacccctccaatatctattccacactgttgcctaagtggccttagtaaaattcaagtctggttattttattcccctgcttggaatttctcaatgtagaatgaaactcattcagcattaacacataggcccttcttgatctgacatcgtgtttctctagttagactaaagaatccccactatgaagttgtttcatccgtaagtacctttgaacccagaagccccctttctcatatgtttctcattcctgtttgcccttcagagttcagctttagttgctaaaacattcagacatccctctgacttagatcccccactactgtttttctgtgagaagcagctatgcataattcctcttcaacacagtagttcttgaaattttgcaggcctctcctggaaaggaggaaatgacttctctgactttgtatgatgcttatttgtggatgaatgggcaagggaaaaaatgaaggaacaagtgaatgaacagtatgggagtatgagaaaaggtataaattgggtatagttgagaaaaggattcaaattgatctttggttcgagagacaatttcatctttctgatgaatttaaagtgtagtctttgaaccagctgggcttaattatgtaaagttttgagcctgagataagcacacaatcacaaaacctacccaaacaagttttttgtttcacttcatctcttataaaacaatgttctaaagtaagtgatagggatgctcatcattctgctacctattatcacaatgaaaacaatcataaatagtacacaggaaaggtgagaaatagcggatagttcttatttcatagtactgtatatggaaataaaccaaatttgctcatagagatactattttattacctcaaaaatatataaaaatgaaaacgttatgaaaatattttaaaatgggatttaaaaataattgagaacatcacagcaatttagaatactaaagagcatagctttaaaatgatagtgctgagaactccccacctctaccccaccacctgtaggcttctttgacaacttacaaatgttctctagtttgtatctagaatcacttatatctttcaaataaaccaactttgtgaamaaaaaaaaaaaaaaaaaagggcggccgctctagaggatccaagcttacgtacgcgtgcatgcgacgtcatagctcttctatagtgtcacctaaattcaattcactggccgtcgttttacaacgtcgtgactgggaaaaccctggcgttacccaacttaatcgccttgcagcacatccccctttcgccagctggcgtaatagcgaagaggcccgcaccgatcgcccttcccaacagttgcgcagcctgaatggcgaatgggacgcgccctgtagcggcgcattaagcgcggcggktgtggtggttacscgcagcgtgaccgttacacttgccagtggccctagcggcccgct

SEQ ID NO: 40 - DNA, 1503 bp, Homo sapiens
  misc_feature (6)..(6): n equals a,t,g, or c
  misc_feature (18)..(18): n equals a,t,g, or c
  misc_feature (41)..(41): n equals a,t,g, or c
  misc_feature (1501)..(1501): n equals a,t,g, or c
gtggangccgctcctganaactagtgggtcccccgggctgncaggattcggcacgagaatgaatggcaaagaaatagaaggggaagaaattgaaatagtcttagccaagccaccagacaagaaaaggaaagagcgccaagctgctagacaggcctccagaagcactgcgtatgaagattattactaccaccctcctcctcgcatgccacctccaattagaggtcggggtcgtggtggggggagaggtggatatggctaccctccagattactacggctatgaagattactatgatgattactatggttatgattatcacgactatcgtggaggctatgaagatccctactacggctatgatgatggctatgcagtaagaggaagaggaggaggaaggggagggcgaggtgctccaccaccaccaagggggaggggagcaccacctccaagaggtagagctggctattcacagaggggggcacctttgggaccaccaagaggctctaggggtggcagagggggtcctgctcaacagcagagaggccgtggttcccgtggatctcggggcaatcgtgggggcaatgtaggaggcaagagaaaggcagatgggtacaaccagcctgattccaagcgtcgtcagccaacaaccaacagaactggggttcccaacccatcgctcagcagccgcttcagcaaggtggtgactattctggtaactatggttacaataatgacaaccaggaattttatcaggatacttatgggcaacagtggaagtagacaagtaagggcttgaaaatgatactggcaagatacgattggctctagatctacattcttcaaaaaaaaaaattggcttaactgtttcatctttaagtagcattttgctgccatttgtattgggctgaagaaatcactattgtgtatatactcaagtctttttatttttcctcttttcataaatgctcttggacattattgggcttgcagagttcccttattctggggattacaatgcttttatcgtttcaggcttcattttagcttcaaaacaagctgggcacactgttaaatcatgattttgcagaacctttggttttggacagtttcatttttttggatttgggatagattacataggagtatggagtatgctgtaaataaaaatacaagctagtgctttgtcttagtagttttaagaaattaaagcaaacaaatttaagttttcttgtattgaaaataacctatgattgtatgttttgcattcctagaagtaggttaactgtgtttttaaattgttataacttcacacctttttgaaatctgccctacaaaatttgtttggcttaaacgtcaaaagccgtgacaatttgttctttgatgtgattgtatttccaatttcttgttcatgtaagatttcaataaaactaaaaaatctattcaaaacawwaaaaaaaaaaaaaaaaaaaaaaaaaaaaaaaaaaaaaaaaaaaaaaaaaanaa

SEQ ID NO: 41 - DNA, 1280 bp, Homo sapiens
ggcacgagtataaaggcccctccacccagcctctagcccatttctttctctggcttttgcaggattcctcattctccctgaggtcttaactatcacatcatgcacgttctgccactgctgttatcactgctgctgctgctgctgctgctgtcagctagctttgtgactttcagcacccccacttccagcagaaattctagctgccctgattgtgagagtctgaacaccggtcttccatccctgatgatgtttggtggatctctgctcaaatgggttcagaacacacacggggtggaatcactcttgtcctctgccaaggtgcgcctgcttccaccagccctaggggttctgttcccaagactacaccctggcactctgacccttgtcttccttttaattcccttcctcacagtgtcttcttccacatctgacgttcttagctctttagagtccccaaaactatctgttaccatatttcattattgttaactctaaagattttggcatcaaacaccctgcatttgaatgctagctgtgtcacacatcagatgctttactttggcaaatcatagaactttctgtcaatagggataataatggtacctatattgtaatattgtgagtgttacttggataataaagtacatagcacagtatttggcacatagtaattgctcaacaataccaattgttattattattagactgtgccctctaaattatttgtctacggattatgatctgtataaatgacttatcaattaagaagaccacaggtatgcagagtctcatcactcatacaagactgatgtcaattaactaagagaagtttcgtcactaaccaggagtttcacatcatagttccacactttgcttctactcccaatatggcttgttgacttttcactctctttaccctgttttctttctatggttcccagggctatcacttttctttattttggttaatacatatagctgtacactgacccagtctccatgaaaaatactgtcatatactccctctttccctctttccctaatatcatcatctcatagagatcaaactcacattttctggcaccattattctttttataaaatactttacttttaaatttttacccaactacgtctatgttattttagctagctaagctgctataacaaagagatctaaatacagtggcttaaatataacagaagcatatttttctctcatgtaacagctagaggaatgtgtgtagtccagagcatacaaaccacaagtcattcatgac

SEQ ID NO: 42 - DNA, 742 bp, Homo sapiens
  misc_feature (707)..(707): n equals a,t,g, or c
  misc_feature (724)..(724): n equals a,t,g, or c
  misc_feature (726)..(726): n equals a,t,g, or c
gcgctcgagaatagtgggtcccccggrctgcaggattcggcacgagctcacttcaatycttctttgagaagtttttcctttctccgcaaccagatgtacatatttgaactctctttgtacttggagggcacttctttcgtggtagttcttttatttttattaatctctgtatccttagatagtcctccaacaaccaaaggttgggactctgtcttacatatctgggtgcccctcatagtgcagtaataagtaagttgattatatacgagctatgtaacttatattttttaatggttggatatcactgagtttttttttttaagaatttttttattgaggtaaacttcacataacataaaattaactattttaaagtgagaagttcagtgccacttagtattgttaacaatgttgcataaccaccacctttatttaaagttccaaaaaaaatgttctcctctaaaaggaaaccccatcccattaagcagatactctccattccttccttcctccagcccccagcaaccaccaatctgctttctgtctctatggatttatctattcttgctattttatataaatcgaattgtatgagaccttttgtgtctggcttctttcacttagtacaagtttttgagatttatttacatagtagcatgtatcaacacttcatttttatggccaaataaaattgtattatgtgtttntagcacaaaaaaaaaananaaaaatgaccctcgag

SEQ ID NO: 43 - DNA, 1472 bp, Homo sapiens
  misc_feature (1)..(1): n equals a,t,g, or c
ncttagctgtagatagaggcggcaacctcggaagtgcggagcgggtgggcctatatagatgttgaggtgcggaggccgtgggcttttgttgggcctggctgtagccgcagcagcggtaatggcagcacggcttatgggctggtggggtccccgcgctggctttcgccttttcataccggaggagctgtctcgctaccgcggcggcccaggggacccgggcctgtacttggcgttgctcggccgtgtctacgatgtgtcctccggccggaggcactacgagcctgggtcccactatagcggcttcgcaggccgagacgcatccagagctttcgtgaccggggactgttctgaagcaggcctcgtggatgacgtatccgacctgtcagccgctgagatgctgacacttcacaattggctttcattctatgagaagaattatgtgtgtgttgggagggtgacaggacggttctacggagaggatgggctgcccaccccggcactgacccaggtagaagctgcgatcaccagaggcttggaggccaacaaactacagctgcaagagaagcagacattcccgccgtgcaacgcggagtggagctcagccaggggcagccggctctggtgctcccagaagagtggaggtgtgagcagagactggattggcgtccccaggaagctgtataagccaggtgctaaggagccccgctgcgtgtgtgtgagaaccaccggcccccctagtggccagatgccggacaaccctccacacagaaatcgtggggacctggaccacccaaacttggcagagtacacaggctgcccaccgctagccatcacatgctcctttccactctaagccgtagcctcttctgttaataacacacagagagctctgccaagcacctgagtaggcccttgacacttgtgtgccctgggatgcctcctggcgcgaatcaggaggttctggaaggactctggctatattctgcaaatgtggctcatgccccttaccgtggctcggcgttgtggtgcctgagggacagccggccacctgcccagtactggtcagcttttcaacactattccctttgacctactggccatcttcctcacagccctcagatatcaacgggcacaaataagaccaactcaatttccacttgaatttacaaccaaaagcctgctgagttgattacagctgggccaatacagtacgaggcaataacaaattagtgtgggttgattctggaattggaaaagcttttgcttgtatggatacagcaaatccagatgtctctgaacaaagcaacaatttaaagcaacgacattttctgtcctttaagcacttaaaatcaggtgtggtgtgttttcaaaggcagaagtctgcattttgagcaaaaggtggcttcccagctctaacaaggtaactggttagcatgacattaaagcttgggcaaggcttcaaacttaaaaaa

SEQ ID NO: 44 - DNA, 635 bp, Homo sapiens
gcctaaagagagctcccccaggaccagccctggccaagggattgctgcagccctcatccaccttccaagcactggaaacaaacattggagaccaagtgaggcgtcactcaacagccgtagtaatcagggaaatgacaagttacatactgatatcctttgttttgctgattggagttgggtgcattgaaaaagatcagtcgtgcccagtgtttgggggaaggaagcgtcttcacctgttgtttgtgggaggacagttgaggcaggtgaggatgctgagaggtgagctcagctgtgcctgttaccgtccacatgtgcaagcccttcagctcggtggttgtacttgtttttgagatgcagtttcactcttgtcacccaggctggagtgcatggcatgatcttggctcgctgcaacatccgcctcccgggttcaagcgattctcctgtctctactaaaaatacaaaaattagctgggtgtggtggtgcgtgcctttaatcccagctactcagaaggctgaggtgcaagaattgcttgaacctgggaggtggaggttgccgtgggccgagatcacgccaccgcactccagcctaggcaacagagctagactgtctcaaaaaaaaaaaaatgaccctcgag

SEQ ID NO: 45 - DNA, 1153 bp, Homo sapiens
ggattaaggtgtggtccctggaccatgcccaacggcataggcagcacttgaaaactggctaaaaacgcagactctcaggccccgggccagagctactgaatcaaaatctgcatgawcacaggagcagccctctggcccataatgacggccctgtcttcgcaggtggccactcgggcccgcagccgctgggtaagggtgatgcctagcctggcttattgcaccttccttttggcggttggcttgtcgcgaatcttcatcttagcacatttccctcaccaggtgctggctggcctaataactggcgctgtcctgggctggctgatgactccccgagtgcctatggagcgggagctaagcttctatgggttgactgcactggccctcatgctaggcaccagcctcatctattggaccctctttacactgggcctggatctttcttggtccatcagcctagccttcaagtggtgtgagcggcctgagtggatacacgtggatagccggccctttgcctccctgagccgtgactcaggggctgccctgggcctgggcattgccttgcactctccctgctatgcccaggtgcgtcgggcacagctgggaaatggccagaagatagcctgccttgtgctggccatggggctgctgggccccctggactggctgggccacccccctcagatcagcctcttctacattttcaatttcctcaagtacaccctctggccatgcctagtcctggccctcgtgccctgggcagtgcacatgttcagtgcccaggaagcaccgcccatccactcttcctgacttcttgtgtgcctccctttcctttccctcccacaaagccaacactctgtgaccaccacactccaggaggcagccccatccccttccagcccctaagtaggccctcccctccctaaatctgcttccgcaccacctggtcttagccccaaagatgggccttctctctcccagataagttggtcctccctctgcctttcctctcaagcccccaaagagcaaaggcaacagcaagaccagcgggttcttgcaacactgtgaggggcagccagggcggccccaataaagcccttgaatactttraaaaaaaaaaaaaaaaaaaaaaaaaaaaaaaaaaaatgaccctcga

SEQ ID NO: 46 - DNA, 729 bp, Homo sapiens
ggcacgagcaggaaccctgtcagcagaaacttctcaagccccatccttgccaggaagctctgtgaaggtgctgctgatgacccagattcctccatggtcctcctgtgtctcctgttggtgcccctcctgctcagtctctttgtactggggctatttctttggtttctgaagagagagagacaagaagagtacattgaagagaagaagagagtggacatttgtcgggaaactcctaacatatgcccccattctggagagaacacagagtacgacacaatccctcacactaatagaacaatcctaaaggaagatccagcaaatacggtttactccactgtggaaataccgaaaaagatggaaaatccccactcactgctcacgatgccagacacaccaaggctatttgcctatgagaatgttatctagacagcagtgcactcccctaagtctctgctcaaaaaaaaaacaattctcggcccaaagaaaacaatcagaagaattcactgatttgactagaaacatcaaggaagaatgaagaacgttgacttttttccaggataaattatctctgatgcttctttagatttaagagttcataattccatccactgctgagaaatctcctcaaacccagaaggtttaatcacttcatcccaaaaatgggattgtgaatgtcagcaaaccataaaaaaagtgcttagaagtaaaaaaaaaaaaaaaaaaaaaaaa

SEQ ID NO: 47 - DNA, 1079 bp, Homo sapiens
ggcacgagccaatttgccaaggttctaaaggcttatgaggtcctgaaggagccaggccttgtgatggagtaggtgacacaggcctggttgtcctgtcagcagaagggaaagcaggggctgggctgagaggaggacacggagggctctgctgaggttccttcctgggttccaccaacagggacagggagtcacttgccttccagttctgtgctgggatggcgggacagcacttggcttgcttggccagctgcgtcatgagtttgatttggtttttttttttttgcagctgcttcatatgctctgctccagcccctccccaacagctggtagcttatggtttcttcaagaggaaagtagactttatgctgtacatttgagctgtagagctaagattcgcttactggtgagctgtgaaaccttgttgctttttcccagagtctgatggcagtgactgtgatcaagggaatcttcaccgccacaagtgcaggcagcaggtgtggttcaggtccccccccaccccactgtgctcctttgaagccaacgtgcctccctcgcctccatactggagggacgacgcaggggagaacagagaagtgcttggccctaggattgaggcacttgtttcctagcccgctgggttagggctggtgcaagcgaggcaatgttgaggatgctttaagcactaccagccgaatccgggaactctgttaacagttgtccaaccagcagaatgaggctaactgtataaagcatgggacccaggatgaggataaggaaaggacagcggctttccctgggcagtacaatggcttgaaggcaaaaagggataaagtgacagccgactgtgactctggtgaggaggggtgagcagggaggttgattctctgatgttaactaagtggcaaagtctcaaccgtgctcagccctccccctcccagggaagagaaacaaagattcaaagtaagcatgatactagtgggtttaccagtgtttcttccaaggagacatatattttttaataaacgatagttgcaatgaaaaaaaaaaaaaaaaaaaaaaaaaaaaaaaaaaaaaaaaaa

SEQ ID NO: 48 - DNA, 1959 bp, Homo sapiens
ttaaggttgccgctagccgcctgggaatttaagggacccacactaccttcccgaagttgaaggcaagcggtgattgtttgtagacggcgctttgtcatgggacctgtgcggttgggaatattgcttttcctttttttggccgtgcacgaggcttgggctgggatgttgaaggaggaggacgatgacacagaacgcttgcccagcaaatgcgaagtgtgtaagctgctgagcacagagctacaggcggaactgagtcgcaccggtcgatctcgagaggtgctggagctggggcaggtgctggatacaggcaagaggaagagacacgtgccttacagcgtttcagagacaaggctggaagaggccttagagaatttatgtgagcggatcctggactatagtgttcacgctgagcgcaagggctcactgagatatgccaagggtcagagtcagaccatggcaacactgaaaggcctagtgcagaagggggtgaaggtggatctggggatccctctggagctttgggatgagcccagcgtggaggtcacatacctcaagaagcagtgtgagaccatgttggaggagtttgaagacattgtgggagactggtacttccaccatcaggagcagcccctacaaaattttctctgtgaaggtcatgtgctcccagctgctgaaactgcatgtctacaggaaacttggactggaaaggagatcacagatggggaagagaaaacagaaggggaggaagagcaggaggaggaggaggaagaggaggaagaggaagggggagacaagatgaccaagacaggaagccaccccaaacttgaccgagaagatctttgacccttgcctttgagcccccaggaggggaagggatcatggagagccctctaaagcctgcactctccctgctccacagctttcagggtgtgtttatgagtgactccacccaagcttgtagctgttctctcccatctaacctcaggcaagatcctggtgaaacagcatgacatggcttctggggtggagggtgggggtggaggtcctgctcctagagatgaactctatccagccccttaattggcaggtgtatgtgctgacagtactgaaagctttcctctttaactgatcccacccccacccaaaagtcagcagtggcactggagctgtgggctttggggaagtcacttagctccttaaggtctgtttttagacccttccaaggaagaggccagaacggacattctctgcgatctatatacattgcctgtatccaggaggctacacaccagcaaaccgtgaaggagaatgggacactgggtcatggcctggagttgctgataatttaggtgggatagatacttggtctacttaagctcaatgtaacccagagcccaccatatagttttataggtgctcaattttctatatcggcctattaaacctttgttacctattgtttccttaacacaaaacgatcacacaccacaacacacgcaacccagacacaaacaaccaacaccagagcgcgccacacaacacacacgagggaggcgacgtgaaaaagataactacacagagaggcgcacacagatcacagtaatagaaacatatattattataaaaggtgcacccataagacgatgcgtcactataataaacctacacgacagaacagccagcacgccattgtacaacagccgacgccaccagcagcggaccaaaacaactccatcagctggactcactgcgttggaaaggaggaagccaccaaccctcgcgtgagcgcagctacacccactgggacccaacacccaccgcacagagttaaccacgccgccgtgacattctacacgaacaccgacgcgtcttgggtatccacaaacccagtataatgagcagcagagaaaaacgcatgatgacgactgattagattcagcgcgccgcaacgtaatgacg

SEQ ID NO: 49 - DNA, 812 bp, Homo sapiens
  misc_feature (17)..(17): n equals a,t,g, or c
  misc_feature (108)..(108): n equals a,t,g, or c
gaccatttttagccaancttggaattaaccctcacttaagggaacaaaagctggagcttccaccgcgttggcggccgctctagaactagtggatcccccgggctgcangaattcggccacgagaggacttccccacctcatgcagctatttgggccgtggcgtctgaaatttattatttcagagtcacccctttratgaccttggcagtgractgcagtcatctgtttaggcctttccatggcccacgtcaatgccgttatttctgtttgttgcacatttgatttccttgttgttggcatttagaaggccccctgcttcccagatcacaccacgggcatggaccacagagattgcatcttgtgagtctgtagaaatggtcaaggccttgtcctctcttaggtccagagctcaggtgaatgcagattttcccggccatctgtgctgaagtccctgtggggaggctcctggctggtttcctgtaggtagacagctacacgtcctgcccttcattggcttcttttcatgaagctcctgccatctacaaaacatgtctcccttcttgaatcacatctctgttattgaagctctggaagtcaaccgggcgtggtggctatgcctataatcccagcattttgggatgccggggcgggtggatcacctgaggtcaggagttcgggaccagcctggccaacatggcgaaaccccgtctctaatacaagtgcaaaaattggccaggcgtggtggtcactgtgctccagcctgggtgacagagcgagctccgtctcaaaaaaaaaaaaaaaaaaaactcgag

SEQ ID NO: 50 - DNA, 1756 bp, Homo sapiens
ggcacgagttttcctctcacatatatattgttttgtgtccctggctaaagtacaagctttttgaaggcagaaaccatgtctttggtttcttttgtatttcccatagcaccttttactgtgagagtgggcacacagtatatgttgtggaatgacatcctgagtgatccctccctggctgggcctcagattaaattccctgaaatggaacagtcctaaccaacacaggacaggtattctccatctggcatgttggttgctcctttcaacctgctatttgaaatggctcccttcaacatctttctgttcccacagtggggcttgctatggctaatgctgtacttgctgtatgtgttccaggcgagtctgcggacaccagaactgacctgggagcgagtgagatctcaagttgaccagtgatatggcctgatggcaagaggatagtactgctggcagaggtaagctgagactggcaaaaatactcccccacaacaggagagactgcaatacccaggtcccctcctcctcatgttctcgaatactttcaactcctctgttaagcacaagtttgactactttcccaatggattttacttctaattgtgaaagatcttttcattcagcaattaagaaactattttggttccccacttttcaccaattatcctgtctctccacgtcaatccacaggttgagttagataattattactatagaaggaattcacagatagaaccagtgccactttgagtgatgcatacaaagagataatgtcacttgtgggatgttttaatcactaagcacaaagtagatatgcccgactgtaaccaggactatcttaggcaagttctgggaatgtatgtttttactgatagattccctgtttttgaagtccattcccttgaattgagccagatgagtataggtacctacctagatatcaattgctcaattgatatttccccatcctagctcctagctcacattgacactattgactttcattttattggcttccatgtcagtgtttgaccacttttcctttcttaaaagctcctcttccctagtcctggattcctgacagctataatattagatgccttctattcttaccttgaagctttctcttcttcagagaaagataccaaaatatcaaggaggataataatacttttctcaattttgattttcagttggttttttttctttttttatattaaagaacctgaatatgaaaatgtaaaatatacattgtctttatctaggggcccataagttaggagtttttagtgtccttactgtttcttcacattttcctcactttatctcatcttctcagatacttcagggcatttgtaaagggactgaactatttcttcacaaggaaggagtatatatgaggaggagatgggcagattgccaaatatgcattaatagctttgatgtcagtctgctgactgatgacttgtttctagctgccctaggaggtcccacctggtaattttggtgacaaaagcaagtaccatgggtgtttttggctagatggttgagcaaaaaggtggtcaggcttcataggaaacaaaataggaaagggtggcattgggggcaatttctagttcttctactgtctgaatcaccaactcaaaatacaaggctgacaatgctgtctttgaattcaggagaagcaaactgaaggagaagcacaaaaatcatcacagctatggtgaaaccctgtctctacaaaaaaaaaaaaaaaaaa

SEQ ID NO: 51 - DNA, 2098 bp, Homo sapiens
ggcacgagggaccgagctattctcctgggactggctatgatggtgtgctccatcatgatgtattttctgctgggaatcacactcctgcgctcatacatgcagagcgtgtggaccgaagagtctcaatgcaccttgctgaatgcgtccatcacggaaacatttaattgctccttcagctgtggtccagactgctggaaactttctcagtacccctgcctccaggtgtacgttaacctgacttcttccggggaaaagctcctcctctaccacacagaagagacaataaaaatcaatcagaagtgctcctatatacctaaatgtggaaaaaattttgaagaatccatgtccctggtgaatgttgtcatggaaaacttcaggaagtatcaacacttctcctgctattctgacccagaaggaaaccagaagagtgttatcctaacaaaactctacagttccaacgtgctgttccattcactcttctggccaacctgtatgatggctgggggtgtggcaattgttgccatggtgaaacttacacagtacctctccctactatgtgagaggatccaacggatcaatagataaatgcaaaaatggataaaataatttttgttaaagctcaaatactgttttctttcattcttcaccaaagaaccttaagtttgtaacgtgcagtctgttatgagttccctaatatattcttatatgtagagcaataatgcaaaagctgttctatatgcaaacatgatgtctttattattcaggagaataaataactgttttgtgttggttggtggttttcataatcttatttctgtactggaactagtactttcttctctcattccgccaaaacagggctcagttattcatttgccaagcttcgtggaggaatgtaggtgacatcaatgtgataaagtctgtgttctgagttgtcagatctcttgaagacaatatttttcatcacttattgtttactaaagctacagccaaaaatatttttttttcttattctaaactgagccctatagcaagtgaagggaccagatttcctaattaaaggaagttaggtacttttcttgtattttttaccatatcactgtaaagaagaggggaaacccagccagctactttttttcatcactttttattcataacttcagatttgtaaaactaatttccaaaatataagctgttttcattagccagttctataatatcttcctgtgatttatgtagaaaatgaacacaccccttttccatttaagaccctgctactgtgtgaagagatgatacttacaaggagtgtcattacctgtgagctgactgaatgttggtaggtgctccattacaatccaggaaagtctgtgttactgatatttgtgtggaaatctttatttcacttcaatttaaccattagatggtaaaattaagatgctacttgttggtaaaaattggtggactggtttcaatgggtaaatgtgttgtggcaaattaatgtgttggaatattgctctttgtgaatttgtgcttaagtcaatgaatgtgtagtatctccttctgacaagcattccctattgggattttaaagctatgtgcacagaatattagtctcttctacatgttttatttttctatttataattcccttttttgttgttatattttatacacagaatagatcttttttctaacacatatttgaactgaataacagacttaaagaaagcctttgttcacattgctatttacttttgtgtttgggggaaaatacgagggattgattttaaataaaaaacattccatctttcatttaatatcaatatcaaaagaagaagacaaacatctatctttctcatctatatttaagtacctttttgtaatgtagtatcaaagttttttaggtaatgcaaaattttacaaatcatttgtggaatgaatggtaaaactaatctgatgaaatggaaaattattctgcaatattgtaattcatagtttgacttttcataagcaaataaatccctaggatgtaatcaggacttcaaatgtgtaattaaatttttttaaaaaaaatctaaaaaaaaaaaaaaaaaaaaaa

SEQ ID NO: 52 - DNA, 1675 bp, Homo sapiens
cttaaagacgccaggtagagacacacagaacgtatgtattaagaatatcctctctgggctctgaaattttaggagtgattcttatccactccaagttgtaagtatttgtagaaatttgtgcaaacaaacaaaaactatcaaatgaaaagaaaatgtactcaacctaacttatagttagcagctggaattctcaactcttccctgccagcactataccacagtgtggaagaaattagtcaaatgcttgttttcctgcttctcttttcaactgttactgtgctttgtttgaaagtagttttctctctcaaagccgttgcttatatcgttaagaatgaaggtttgtgtttaaaatttattgcattgcaaagggtagtttcactgaagtcatgcaccattaaataagatgaaatatttgtatttattgtcctacttcctaagccgtaacttcttttcctctgtgaatttgcattgagtcactcatgctacactacatcgctttagtatttgagatggcatttatgtttcctctcgtttatcatgaaatggggtcagattccatcagattccacctctgtcaggtggactcttgtctgccttccatgatgagattttttttctccttcccctttctttaagagaggctgacagatctaggtgtcaatcaattggaaaccagtctctgattttttttcattagttattttctatcattagtttcactgtgtaaattagatatcaactgcacttctttaaaaaaaaatacatctccctattacctccttgaaagatttacttctgtaggcctttttcaataggctcatgactgcagacaaggaaaaaaaaagtaaaaacaaaaacagtatgtgcctgaaaatgacaaaaaaaaaatttgtaacatttaaaaaagaaacctgaatagcctttaattctttaataatacacttaaattttatgtaaatcggttttcgccacgtgtgtttgttcacattctaaatgacttaatgggattctcacggtctgtgtctttgtgtcacgtgtataaaatgggcttgtgatgtaagcgtttcatctggtcagtggttcctttgatattgtactgctgctgggagtgggctgtggaacctgccttcgggtaactgggttcctcttgggtagattggagagatgggggtgggcgtgggcaaattctcacacatgttttcttaacctatttgcagaaactttcaaaaggcatttgattaaacctcttggcagtacagtattcttgtatttgttaacgtctgtgtttaggtactggtacctttttgttttaaaatgttctaagtgttggctttaaagtgaatttatctttagtatgatagttatatgaaaattataggatttgtgtgcagagaatttttttataaagtgctttgtaaaaaaaaaaaaatgtattctagcttttgcggtacatatgtgtgataactttaatacccatgacagttaagtgcaattatttcatcactctaaaaatgctatttttgtgtcagttcctgcaggtgttttcatgtctttgcaaagtgacacattttgatgccttcttgataaagtggtagacattttgtagctttctagaaactttgtattcatacggtatcaatgaaaaataaagaaaatgaaagtgtgggtcaaaact

SEQ ID NO: 53 - DNA, 1280 bp, Homo sapiens
gggcagacttaactgctgtctgctcagcatggaagccaggagccaaaccagtgggcttgatgacagtgagctatttctggtggctcagggttggggcttgggccgaagatgtggaggccctggcttcccttcctgaggacagactgaggtggaaccttttggctctgccagcttctccatgtgcagtcacagcactggtggcaaggcataggagagctgggctacaaagaagcattcagtgtctcctggggcggcagggaggtgggggttgtaattgtgaactcaccaaaccccaggtgggcagtaagtgggtgggtcataggaagaaaagtgatcttcagtcaggagacttgggttctgggctctgtctgatgactggctctgtgatgtgagccaggtgacttctctaaccctgagttgcctcatctgtaaagataattccagtcttggaggatttttatggasyaaaaaggacagagcggtcctgtgtatcccctgcaaatggttagacgttatccatttacagcccctgccaagccaccactagcttcttcagagaacttttgaaccctgcctccctaaagtagttctaaaacatttttcactgtgttacccatcaagggaaacaaaatgtttctacaaaccatagtaaataggatcgtttttgtattgtgtttcaaggaggaaaagctgaccagcaagaagaacgtcggagacaaaagcagatgaaggttctgaagaaggagctgcgccacctgctgtcccagccactgtttacggagagccagaaaaccaagtatcccactcagtctggcaagccgcccctgcttgtgtctgccccaagtaagagcgagtctgctttgagctgtctctccaagcagaagaagaagaagacaaagaagccgaaggagccacagccggaacagccacagccaagtacaagtgcaaattaactggtcaagtgtgtcagtgactgcacattggtttctgttctctggctatttgcaaaacctctcccacccttgtgtttcactccaccaccaaccccaggtaaaaaagtctccctctcttccactcacacccatagcgggagagacctcatgcagatttgcattgttttggagtaagaattcaatgcagcagcttaatttttctgtattgcagtgtttataggcttcttgtgtgttaaacttgatttcataaattaaaaacaatggtcagaaaaaaaaaaaaaaaaaaaaaaaaaaaaaaaaaammmagggsggcccgggaaccaattt

SEQ ID NO: 54 - DNA, 953 bp, Homo sapiens
ctccaatgtatatttggtttataattttcttcatccagcctcacaaagaggagagatttcttttccctgtgtatccacttatatgtctctgtggcgctgtggctctctctgcacttcagaaatgttaccactttgtgtttcaacgatatcgcctkgagcactatactgtgacatcgaattggctggcattaggaactgtcttcctgtttgggctcttgtcattttctcgctctgtggcactgttcagaggatatcacgggccccttgatttgtatccagaattttaccgaattgctacagacccaaccatccacactgtcccagaaggcagacctgtgaatgtctgtgtgggaaaagagtggtatcgatttcccagcagcttccttcttcctgacaattggcagcttcagttcattccatcagagttcagaggtcagttaccaaaaccttttgcagaaggacctctggccacccggattgttcctactgacatgaatgaccagaatctagaagagccatccagatatattgatatcagtaaatgccattatttagtggatttggacaccatgagagaaacaccccgggagccaaaatattcatccaataaagaagaatggatcagcttggcctatagaccattccttgatgcttctagatcttcaaagctgctgcgggcattctatgtccccttcctgtcagatcagtatacagtgtacgtaaactacaccatcctcaaaccccggaaagcaaagcaaatcaggaagaaaagtggaggttagcaacacacctgtggccccaaaggacaaccatcttgttaactattgattccagtgacctgactccctgcaagtcatcgcctgtaacatttgtaataaaggtcttctgacatgaaaaaaaaamaaaaaagggcggccgctctagaggatccaagcttacgtacgcgtgcatgc

SEQ ID NO: 55 - DNA, 1027 bp, Homo sapiens
gtccgcccacgcgtccgtacaatgtatggtgtgtgtttgtgtgtataggttttgataaattttaacttttttaaatagatttatgtatggtagtaaatgatagactagtatctacatgtattttatgtactcttcacatacctttattttttttgatatttctagtctatgaggttcatctggtttttcaaattgttgcaaatctccaaaaaattttccaatacatttattgaaaaaaaatccatgtataagtggacccacacagttcaaacccaagttgttcaaggattgactatttgtctatctaaacatacctaaacatagraaaggtacagtaaaaatacagtattataatcttatgggatcaccattgtctatgcaggctgacattgaaatgtcattatgtacagcatgactgtatagtgtttccgagttctgtgaggctctctagcaaactaatggagctcaagaaggggttatgggaaccctaacttatagctagttggttaggacccttggtcaccatctggggcttctgattgtcatctgaagtgggagccatcttgtggcactgagcyttcaacctatggtatctgatgctatctccggtagtgtaagaagtgaattgaattagaggacacccagctggtgtctgctgcaaaattgcttatttgcttaatgcgtggggaacccccctccacacacatctggagtcagaaagggtgttgtgagattaaagtgggagaaactgaatttgtttattcctatattcagaatggggtccttgaraacatcatagtggtaagcatagatgttctaaagtcagactgcctgggttcatctctctgctccaccacttcgagagttactttagctcactgtgcttcagtttcctattaaattgggataataataccatctcatagagtaacttaagaattaaatcagttaatatacataaagcacttggaagtgtttgaagcattaataaacactcaatagctaaaaaaaaaaaaaaagggcggcc

SEQ ID NO: 56 - DNA, 1368 bp, Homo sapiens
ctggccctcgccttcaagctggacgaggtggccgccgtggcggtgctcctgtgtggctgctgtcccggcggcaatctctccaatcttatgtccctgctggttgacggcgacatgaacctcagcatcatcatgaccatctcctccacgcttctggccctcgtcttgatgcccctgtgcctgtggatctacagctgggcttggatcaacacccctatcgtgcagttactacccctagggaccgtgaccctgactctctgcagcactctcatacctatcgggttgggcgtcttcattcgctacaaatacagccgggtggctgactacattgtgaaggtttccctgtggtctctgctagtgactctggtggtccttttcataatgaccggcactatgttaggacctgaactgctggcaagtatccctgcagctgtttatgtgatagcaatttttatgcctttggcaggctacgcttcaggttatggtttagctactctcttccatcttccacccaactgcaagaggactgtatgtctggaaacaggtagtcagaatgtgcagctctgtacagccattctaaaactggcctttccaccgcaattcataggaagcatgtacatgtttcctttgctgtatgcacttttccagtctgcagaagcggggatttttgttttaatctataaaatgtatggaagatgaaatgttgcacaagcgagatcctctagatgaagatgaagatacagatatttcttataaaaaactaaaagaagaggaaatggcagacacttcctatggcacagtgaaagcagaaaatataataatgatggaaaccgctcagacttctctctaaatgtggagatacacaggagcttctatcttgctgaaatattgcttcatatttatagcctgtggtagtgcacatggttaacataaaagataacactggttcacatcatacatgtaacaattctgatctttttaaggttcactggtgtattaaccaaacgttgtcacaaattacaaatcaatgctgtaatataatttgcacctggaatggctaacgtgaagcctgaattaaatgtggtttttagtttttaccatcaccaatttctatgactgttgcaaatacagaatctattagaaaacagggtcttggaaatgtagaattttggcgcactatgaggaaaaacaagctatctttgtaaagcataattgagtttaatgtaattgttgtaaaaaaaaaagtgtgcttgctctacttaaaattcctcacaatgttgaattttgacctgtattcagaagaattccaaaacaggtcagttaaataaggaaatatagtatttgtcaaaccagtatcagagaaaagttaca

SEQ ID NO: 57 - DNA, 402 bp, Homo sapiens
gcgtccggcagatattgtcaagttcatggccttaggtagcatgtatctggtcttaactctgattgtagcaaaagttctgagaggagctgagccctgttgtggcccattaaagaacagggtcctcaggccctgcccgcttcctgtccactgccccctccccatccccagcccagccgagggaatcccgtgggttgcttacctacctataaggtggtttataagctgctgtcctggccactgcattcaaattccaatgtgtacttcatagtgtaaaaatttatattattgtgaggttttttgtcttttttttttttttttttttttggtatattgctgtatctactttaacttccagaaataaacgttatataggaacaaaaaaaaaaaaaaaaaaaaaaaaaa

SEQ ID NO: 58 - DNA, 864 bp, Homo sapiens
  misc_feature (28)..(28): n equals a,t,g, or c
  misc_feature (706)..(706): n equals a,t,g, or c
  misc_feature (745)..(745): n equals a,t,g, or c
  misc_feature (748)..(748): n equals a,t,g, or c
  misc_feature (757)..(757): n equals a,t,g, or c
  misc_feature (765)..(765): n equals a,t,g, or c
  misc_feature (772)..(772): n equals a,t,g, or c
  misc_feature (781)..(781): n equals a,t,g, or c
  misc_feature (813)..(813): n equals a,t,g, or c
  misc_feature (840)..(840): n equals a,t,g, or c
  misc_feature (842)..(842): n equals a,t,g, or c
gagaagacgacagaagggtacggctgcnagaagacgacagaaggggaccctccgcctggacgcagcagccaccgccgcgtccctctctccacgaggctgccggcttaggacccccagctccgacatgtcgccctctggtcgcctgtgtcttctcaccatcgttggcctgattctccccaccagaggacagacgttgaaagataccacgtccagttcttcagcagactcaactatcatggacattcaggtcccgacacgagccccagatgcagtctacacagaactccagcccacctctccaaccccaacctggcctgctgatgaaacaccacaaccccagacccagacccagcaactggaaggaacggatgggcctctagtgacagatccagagacacacaagagcaccaaagcagctcatcccactgatgacaccacgacgctctctgagagaccatccccaagcacagacgtccagacagacccccagaccctcaagccatctggttttcatgaggatgaccccttcttctatgatgaacacaccctccggaaacgggggctgttggtcgcagctgtgctgttcatcacaggcatcatcatcctcaccagtggcaagtgcaggcagctgtcccggtatgccggaatcattggaggtgagtccatcagaaacaggagctgacaacctgctgggcaccccgaagancaaagccccctggcagcttaccgggcccaagcctctggnatncccttgaanagcctggncagagangggaagacnccgatgatgaacttggacccagggttgccggncccagggctcctacttccccaaacctngnccggcccttgaaggttacctgg

SEQ ID NO: 59 - DNA, 786 bp, Homo sapiens
ggcacagcggcacgagaagactttggtgtttaagagattaatgtgttagccagaacaactcatttctctaccmgtgtgtagtccatttatctttaaagattttctattggaataattttgaaattactttcttagttttcttcattaaaaactaagaaaatgctttgtttattatgaattgctatttctcttgattattattcttggagaaagtctatcagacgtaattcttctgatttgcttctaggctagaggaaaatgtgaaagatgacaaatgaaaatttcaaaggttgtcagtagtatgacttcttttatcgtttgtcattatcacaaatatatcaacataggacttttaaaagatattttgtacatattgggccttagtaggattttgcatgaattttttttttcttttatgcccagagagaaagagcaaagaaataaccaagggtgatgtactcgtattgaaggtttaccaaataaggactgcttttattatgaactatagtctatattctaagtaaatcaatttttctattatgtgttttttgttcctgcaggcaagatctctgaactttatgcagagggttcttttaaaaaaacaaagttgaatttttttatttcttggaatattttttttcattgatttctcccaagtagagcagattcaaatctcctttgtaccctatgtcttttttgttttgctattagctcagtattccgtttctacattttcctttcctagaaccagtcaataaatgacaaaaaaaaaaaaaaaaaactcga

SEQ ID NO: 60 - DNA, 1175 bp, Homo sapiens
gagcgggccgaggactccagcgtgcccaggtctggcatcctgcacttgctgccctctgacacctgggaagatggccggcccgtggaccttcacccttctctgtggtttgctggcagccaccttgatccaagccaccctcagtcccactgcagttctcatcctcggcccaaaagtcatcaaagaaaagctgacacaggagctgaaggaccacaacgccaccagcatcctgcagcagctgccgctgctcagtgccatgcgggaaaagccagccggaggcatccctgtgctgggcagcctggtgaacaccgtcctgaagcacatcatctggctgaaggtcatcacagctaacatcctccagctgcaggtgaagccctcggccaatgaccaggagctgctagtcaagatccccctggacatggtggctggattcaacacgcccctggtcaagaccatcgtggagttccacatgacgactgaggcccaagccaccatccgcatggacaccagtgcaagtggccccacccgcctggtcctcagtgactgtgccaccagccatgggagcctgcgcatccaactgctgcataagctctccttcctggtgaacgccttagctaagcaggtcatgaacctcctagtgccatccatgccaaggtggcccaactgatcgtgctggaagtgtttccctccagtgaagccctccgccctttgttcaccctgggcatcgaagccagctcggaagctcagttttacaccaaaggtgaccaacttatactcaacttgaataacatcagctctgatcggatccagctgatgaactctgggattggctggttccaacctgatgttctgaaaaacatcatcactgagatcatccactccatcctgctgccgaaccagaatggcaaattaagatctggggtcccagtgtcattggtgaaggccttgggattcgaggcagctgagtcctcactgaccaaggatgcccttgtgcttactccagcctccttgtggaaacccagctctcctgtctcccagtgaagacttggatggcagccatcagggaaggctgggtcccagctgggagtatgggtgtgagctctatagaccatccctytctgcaatcaataaacacttgcctgtgaaaaaaaaaaaaaaaaaaaaaaaaaaaaaaaaaa

SEQ ID NO: 61 - DNA, 537 bp, Homo sapiens
gtccgggggacgtgcacggggccgccctcctggccctgaagctgcgccggcctccctgagcgtttcgctgcggagggaagtccactctcggggagagatgctgatgccggtccacttcctgctgctcctgctgctgctcctggggggccccaggacaggcctcccccacaagttctacaaagccaagcccatcttcagctgcctcaacaccgccctgtctgaggctgagaagggccagtgggaggatgcatccctgctgagcaagaggagcttccactacctgcgcagcagagacgcctcttcgggagaggaggaggagggcaaagagaaaaagactttccccatctctggggccaggggtggagccagaggcacccggtacagatacgtgtcccaagcacagcccaggggaaagccacgccaggacacggccaagagtccccaccgcaccaagttcaccctgtccctcgacgtccccaccaacatcatgaacctcctcttcaacatcgccaaggccaagaacctgcgtgcccaggc

SEQ ID NO: 62 - DNA, 843 bp, Homo sapiens
ggcagctgtccaccgatcccggccaccgcccccggccacccccaccccgcgagcccatggaggctccgggaccccgcgccttgcggactgcgctctgtggcggctgttgctgcctcctcctatgtgcccagctggctgtggctggtaaaggagctcgaggctttgggaggggagccctgatccgcctgaatatctggccggcggtccaaggggcctgcaaacagctggaggtctgtgagcactgcgtggagggagacagagcgcgcaatctctccagctgcatgtgggagcagtgccggccagaggagccaggacactgtgtggcccaatctgaggtggtcaaggaaggttgctccatctacaaccgctcagaggcatgtccagctgctcaccaccaccccacctatgaaccgaagacagtcacaacagggagccccccagtccctgaggcccacagccctggatttgacggggccagctttatcggaggtgtcgtgctggtgttgagcctacaggcggtggctttctttgtgctgcacttcctcaaggccaaggacagcacctaccagacgctaatctgacccctttgggcctggactccatcctgaggggaaaggaggatgcagagggtggcctctgggcacccttgtgggtaagcggggggcgggggcgggaaaaactctggccgccagtttttggctcctgcgggcaccaagcaggccaagtgtttaatgcctgacatctcctcctgtcctgggcctggaacctgcagctgagaaaatccctcaaccacctcgtctcctccatcgcccctgctgggccccccagcctgacagtgggttg

SEQ ID NO: 63 - DNA, 849 bp, Homo sapiens
gaattcggcacgaggtataatgccattctcttcctctgtgaagtgcctgttcggggtgttgctacgtttttgttttgttgtgttttctgttgtagtgtttacatttttcttgtcgattcctaagaggactttagggtactgagtcacccatggtcatgtgttgcagagaagtgtcacagagtgaaaactgtcttttccttgatactacctttagattcatatttgggaagaccttcactaatcatgactacataagtattcacttttactttcttaaggcctttttgttttcattcttttatagtaatgtctaagccatctggaattagtttgttgattatgcaagaaagggatcgaagtgctttttctgagtcattatccacatgccgaaacatttattgaatagccctttccttattgatctgaaaacaccttcttataaaaccttgcattggtttttggacttgctgtgctttcaggagtcagaagaacattcttttgattatkgtagctttacatwaataatacatttkggccgggtgcggtggctcacgtatgtaatcctagcattttgggagactgaggcaggcggaacacctgaggtcaggggttcaagaccagactggccaacatggcaaaaccccgtctctacaaaaaaaaaaaaaaaaaaaattagctgggcatggtggtgcctgcctgaaatcccagctactttgggaggctgaggcaggagaacctcttgagcctgggaggtagaggctgcagtgagccgagcttgcaccactgcactccaacttgggtaacagagtgagactccatctcaaaaaaaaaaaaaaaaaaaaaactcga

SEQ ID NO: 64 - DNA, 2434 bp, Homo sapiens
  misc_feature (10)..(10): n equals a,t,g, or c
  misc_feature (12)..(12): n equals a,t,g, or c
  misc_feature (27)..(27): n equals a,t,g, or c
  misc_feature (73)..(73): n equals a,t,g, or c
  misc_feature (75)..(75): n equals a,t,g, or c
  misc_feature (103)..(103): n equals a,t,g, or c
  misc_feature (130)..(130): n equals a,t,g, or c
ctgggggtantncaagaaccctctgtnggacttagatgtcaagctctttcctttgggcagcgtgtttcctttntncgagtagtgtgctgtgtaaactaaattngccggttcgctttccatttcctgacanttgagatggaatgccttgaccattggtgctctgacagagaagtcatggagtcattgccatttcctggttgcccttttggaatgtgatcctgttagtagaggttttctagcttctactaagatatttctttccctaaccatcatacacttggcatgtttcattcccatctcctttcccctcaccttaaaggagactacccctttgccccatattgtcaacctaattttctctcgtactctctctagtgaatgatgtgctaccaagtatatgccaggctgtgagaggattatactgagtagtagaaagaagctaatttgaaataaaaattatttgtataattaagaaagcagattagatgcacatggtcaacaggaagttgactgtatgtctgctagttagattcaaaacatcataaagatgatagcatgtcaatatattagcctagccattatgttagcctttgttaggtgggcagcttttctgctttttcccttcctctgtggtgacaacggaggaaatatccaacagaaatacgtctaacagggaaattgggatcatagtttatatgcatctgatttgaaaggagtattgaggaaggttttcatatatgatctatctttggattaaaaagaacatttatgaaatcaagccttctaacactagttataattgagaagcaacagtaactccgtggacagcaatcaagcttaaaattgtaaataaatatggggataattcagttgttgcaaaaaaagggcagaattcagtagaataaagtccttttctcttacaggtattaaatgaggacagagaacctcaggtgttcttatgctagtgcttgctgagtgcatactaagaaagcaattccaaatagatgtatacatctagagagagtggtattagagattcagtgtatgtatttatttacatgagaggaaactggaatataatcccataaattattggaatataatcccataaattatcaccttttatgactggaaaatatttgccaatgaagaaatggtctgtaggtatttgtcttaagatttttggctgtttaataaaaatgtaactttaacggtttcttatagttgcctttataaagtgtattgtctaaaatatttttgtatcatgtgcctttgaaatttgacagctgatttgggtgttggatttctgcccagccatttatcagtattatcattttattcagtagctggcaggtgtattagacaaacgagacttaggtaaggaatggaacctttcctgtggtttgactgcacatcacaccagaagactccagtatccctcattccagaatgaggaaaaagtattctacaaagaacctaatcacctctgtgaaatctatgggatggaaacagtgtggccttaggagtcaaatagtctctgcatggtggggaggatcatgatggaatatgtgaatttctacttctagaagttgtgaaataggtcctgcacttttgcagaatgtccttctttaaacctggcttattccacagctgtagctgataacatgacctggggcttagctgctctagccctgggttcttggagacctcacactgcctggcccctggccatccacctaaggactgcctgctttctggtcacatgtggaccttgatacgactaagcggttacatatgtggttgtgcaaaagctttctgtttaatgcatagtgttaccgatttacatcttggttttcagtggcactatgtctaggaggcaatatccttttaaacagtgctttggctaagatagatacttgtgaatcaaagatagcacagaaatgaactaagtatatcccatttggaattatattttgatactatttaaaatggtttcacctgttaaagggccaacagaactcttggttttacttttgtaattactgtacagaaaatttcaagagtgtttgagtgcttgtcatcaggtgttttccttaataagtagggatatgatcatttacaggaattatatatgaaaaaagtttttgaaatgtatttttgtgatgtgctatgttgaggggaaaccaaatatttatgattttaaaacattcgtatgaaaacattgtacaatgtaatatgctcaactttctcaattttttgctaatttttctaagatacattaaaaatgttttatatttttttttaagtaaaatggacccagtaagaaaattaaaaataccagaacataaaaaaaaaaaaaaaaaaaaaaaaaaaaaaaaaaaaaaaaaaaaaaaaaaaaaaaaaaaaaaaaaaaaaaaaaaaaaaaaaaaaaaaa

SEQ ID NO: 65 - DNA, 872 bp, Homo sapiens
  misc_feature (844)..(844): n equals a,t,g, or c
  misc_feature (858)..(858): n equals a,t,g, or c
ggggaagttcttcactgccttgcatttgactccagatccctccatcctcccagagccttggcctcaaaaatgctgattctagcatcatggaaatgctgtcctcaaagtggtctaaacgggttgctgcttcacttgctcacttaatctcccttttcatagggctgttgtttttacttctgggaagttctgtttaccctggaacagaaactctcttccctaaaagttgattttattgacccatggaggccagagacacttaggcatattttccctccagactagaagcttctgaggaggacctcctgagtctgcaccctggctccctgctgtgctgagggcccccgtgttaacctcacgttgtgcctcctctgattcagagggcccagtgtggttctgtcagccaggcagtggccccagctctacagaaatgagttgtcattgcatcctagggccagggtcttcgtgcttgtgtgtgttacgtggaagtatgtggacaccaagtgttcctggatggccacagcctgcgaaggaaactggggccagcagctgctctgtgttttcagccaacaatggctcctgcccactgccgctgcataaccaccagaggcaggcttctcttgacacaggcctgtcgttggagcatgtgcctggcgagtcctatttctattcccctgtgggttagggacaggcagctgtaccttcagtgtgttgctggggcaggagaatcgcttgaaccgggaggcggaggttgcagtgagccaaaattgcaccactgcactgcagtctgcaggacagagagaggctmtatctcaaaaaaaaaaaaaaaaaaaactcgagggggggnccgggacccaattngccatataggaaaa

SEQ ID NO: 66 - DNA, 1932 bp, Homo sapiens
  misc_feature (2)..(2): n equals a,t,g, or c
  misc_feature (1022)..(1022): n equals a,t,g, or c
cncggcgcggctcggctcatgcccccgggcgcggggcacacaggccggccggcagccgctgggaaataggcccccgggggcggtggcggcggcggggccatggcgcggagaccccgggcgccggccgcctccggggaggagttctccttcgtcagcccgctggtgaaatacctgctcttcttcttcaacatgctcttctgggtgatttccatggtgatggtggctgtgggtgtctacgctcggctaatgaagcatgcagaagcagccctagcctgcctggcagtggaccctgccatcctgctgatcgtggtgggtgtcctcatgttcctgctcaccttctgtggctgcattgggtccctccgcgagaacatctgcctcctgcagacgttctccctctgcctcaccgctgtgttcctgctgcagctggccgctgggatcctgggcttcgtcttctcagacaaggctcgagggaaagtgagtgagatcatcaacaatgccattgtgcactaccgagatgacttggatctgcagaacctcattgattttggccagaaaaagtttagctgctgtggagggatttcctacaaggactggtctcagaacatgtatttcaactgctcagaagacaaccccagtcgagagcgctgctctgtgccttactcctgttgcttgcctactcctgaccaggcagtgatcaacactatgtgtggccaaggtatgcaggcctttgactacttggaagctagcaaagtcatctacaccaatggctgtattgacaagttggtcaactggatacacagcaacctattcttacttggtggtgtggctctaggcctggccatcccccagctggtgggaattctgctgtcccagatcctagtgaatcagatcaaagatcagatcaagctacagctctacaaccagcagcaccgggctgacccatggtactgagaatccatcctgcacctcctcaccatggaaactggcaagcctcataaacgaacagcagtgggtgctgaaancagcaccaaatggagatttggattccagccccccagtgacagcccagtgggaagaagcaaactccagatgggcagaaggcagggtgcacaggtggctccagtctcaggaggatgcgcctcctctcccccatcccagccctcagcattgtgccagagtgatacccttaagtgtttgggtttatgttttcagttttgtttgggaaacagcagttgcacagagagttgggggtactgctgctgccttttcaccgaggcactgccaccaccagctctascagggatgctcctgagcttggcggacatacttagatcctaacgtgccagtgagacctggctgtggagagtagcactggcagccctgcctggactccacttggcatgataccagctccagaagggaagggagtggagcaggcagtgaggagagagcctgggggtcggctggggacagccgtatgtgctaggtaggagtggagggagatatgtttaccaaatgcctgtcctgccatcctcccaggtagtcagagtgagctacatcctgccccgccttcatttccatggaaacatggcagctaggacacggggtacaacagcagccaaattcttccccacctcccttacttcgaaaaaaagtttggaaccctggtccctatactctgcagtcagaagtgggactgagccatacatgcccttgaattcctccctgtctggccctccctctccagcaagcagggttttctttaacttggcagtgtgcagaggagaagtggtaacacccccaccccattcccctgcatcggagctcagtattcctacagggtaagaggtaggaatcttgctgggacgaggggagccagaagtggcaataaaagcgtgttgacctggaaaaaaaaaaaaaaagggcggccgc

SEQ ID NO: 67 - DNA, 1853 bp, Homo sapiens
  misc_feature (1840)..(1840): n equals a,t,g, or c
  misc_feature (1851)..(1851): n equals a,t,g, or c
ctgcaggaattcggcacgagcacctataaagaatctcaacccacttcccactcaaaagcactgtgtatttctcatggcctgcctgggagcccccatctccagcctgctgtgctggctacttctggcacttatagcccttgagatagtaccgccagcagctccctgtgaagtgctaacaccccttcaaagcagcaccaacccaattgtgaacaagctaggagtaaaagacgtaaatgaattggtcaccccaatgcaggggatacagacttgttttaatataaaaaagaagtggccttaaccgtgcagggcttgcaggcctttgtaggcatgggagcatgctgtgatccctggttctgtgctaaacactcaaaagggctctctgactcaagtggaggtgataaaccttttcaatagtaacaggagagagtgtgatatcaaagtgccmgaasycctcacggaccaacatttagcacagacattcaaactgctgaaagawccaawcagaactcaactgaaaaaaacagaccttttaagaaaagcaatagatcttaatttggtggcaagatccctggtttaccttttgaagtcaaaatgttcaatacatcacccgagcttgacttttgagcacttggcaagattgttttttgccacttgacacaagtatgatgtccagctatgcaaaatgactgtttgatctgccttttcagtgtatttgtgtggcgatgtctgtaaaatgccagaagcctcttatgttattgctgctgctgctaccagccagcaactgcagaggccatgctgaggtgcctccttgccaccagccgttgggaaatgcctaccatgctgccccggatgcacaagctcaaaacgctgcagaagttacacaactgctcccataatctggactctccaaaaccgtgatgccacgaaggaaggtcaagttttaaaatgttaaagactgcttgcctctgttcctgagactaaacagtatacatactaactacattgacaaagaaatcctatctgataatgtagcccgctgacgaattttgaagcctcggttaccctaaccaatatgtagcttttaatttgcatcaaaacttttacaaagatgttttgctattgtttctatatacttcaagaatgttcatttttacaaataagttgaacaagacagcctaagttagatgcaccgaagtactagaaatatcgctagcctctgttctccagtttagctttcaaaaccaaatgagccatgtataaaggagttgagaaacttaatttttaaatgtttcatttgcagagttttatatccattaagtgcctttgaaagtttccagttgtgtgggctgctgtctcacctcccaccaatttctcctttctccttatggtgctaaaacctcaaagctgaggagggctgcaggacccttagcagattcagtgtgtcacccttgtcctgtgttcacgccaaggcttcctaaatgaaagacatcggttacctgcttatgggaagactcttcatgctgatcggatcttgcattgaaataaccatgtggaagaacaatgaatcgattaatgatgacatgtacaaccatatttaaagagcaatagtgtccgtgtgtcatgaaaaacttatttgtaaacgtttatatggtatgattttgattttatgtatgttcataaatcctgcactgtatgatatatgtgagttaaaacattggtgcatgaatttattttcaaagtataaaacacatcacttaaacattttatgtgtcaaataaaatttgattatgtaaaaaaaaaaaaaaaaaactcgagggggggcccggrcccaattcgccanatggagatccnaa

SEQ ID NO: 68 - DNA, 1061 bp, Homo sapiens
ggcacgaggattctaggacagggatgggggtgcagcactgatccaggacccagaatggaggcatcatggagggtccccggggatggctggtgctctgtgtgctggccatatcgctggcctctatggtgaccgaggacttgtgccgagcaccagacgggaagaaaggggaggcaggaagacctggcagacgggggcggccaggcctcaagggggagcaaggggagccgggggcccctggcatccggacaggcatccaaggccttaaaggagaccagggggaacctgggccctctggaaaccccggcaaggtgggctacccagggcccagcggccccctcggagcccgtggcatcccgggaattaaaggcaccaagggcagcccaggaaacatcaaggaccagccgaggccagccttctccgccattcggcggaaccccccaatggggggcaacgtggtcatcttcgacacggtcatcaccaaccaggaagaaccgtaccagaaccactccggccgattcgtctgcactgtacccggctactactacttcaccttccaggtgctgtcccagtgggaaatctgcctgtccatcgtctcctcctcaaggggccaggtccgacgctccctgggcttctgtgacaccaccaacaaggggctcttccaggtggtgtcagggggcatggtgcttcagctgcagcagggtgaccaggtctgggttgaaaaagaccccaaaaagggtcacatttaccagggctctgaggccgacagcgtcttcagcggcttcctcatcttcccatctgcctgagccagggaaggaccccctcccccacccacctctctggcttccatgctccgcctgtaaaatgggggcgctattgcttcagctgctgaagggagggggctggctctgagagccccaggactggctgccccgtgacacatgctctaagaagctcgtttcttagacctcttcctggaataaacatctgtgtctgtgtctgctgaaaaaaaaaaaaaaaaaaaaaaaaaaaaaaaaaaaaaaaaaaaaaaaaaaaaaaaaaaa

SEQ ID NO: 69 - DNA, 920 bp, Homo sapiens
cccccgggctgcaggaattcggcacgagctggagtccatgcccctaggatggggtgagggagtatcactctgtggggtttcacagcaccctggatcctgccttccagcccctgccaaggtaaacagtgctgcctgcctcctgtggggaatgcaggatggggcaatgccctggcagcagggtcttgcctcagctgatgcaactgtggctgctcctgtgtgcacagatcatgtgcctggaagccttcctgcagcagggcagtgtcagaaagtggaagagtggtgtgagcagcttccccggggaaagcctggctgagcaactgaccttgagcaagcactgcagatggcccttgttcctgccgggctcctccagctgggagctctcagcccctggtaaattctggcagtgaaagacacattagcacctccccctacaatgaggcacctatctagacaacttggctgtccgggcttaacctgcgtggcagggaaggacgcctgcccagccttagcctctacgcaatggtggaggcagggagggagagaaccacacagctcccctcatttcccagcagcccccatggagcctagtcaacagggtgtggtcacaggctaaatgagcaaagatgtgagctaatatactggtaggtgtcatgggggctttcagagctgggtaaggagggaaagagatggagatactggttccccactccttaacgtgccacctgccttccctgtcctttaccctccctcattctgctggacctgaggaaaatgcaagggaggctaggcctagtggctcatgcctgtcatcccaacactttgggagactgaggtgggagaatcacttgagcctaggagtttgagaccagcctagggaacatagtgagactttcgtctctacaaaaaaaaaaaaaaaaaaa

SEQ ID NO: 70 - DNA, 601 bp, Homo sapiens
gctgccaggaattccggcacggggaacagtgtaatattgaagcaaatgctgtataacaaccacctggaagcccctcatgtatctctttttgaaaacactcctctctttctccactctaatgatgaccaccgccttgtcttttatggtaatcactgttctttgggttttattactgcatttattggctaatatatgcatccctagaaaatgtagttttgcctgcttttatataaatggaatattactgcatgcagtcttttgatttgtgattgttttgctctaaggcttgtaagggtcatccatgttttgcatatagtttgtttattgtcattgccatagagtaaatcattgtatgaatatactgcagtttatttactgttgacatatgtttcagttgtttttaactactaggaaatgctactctgtacattcttgtatatgtaccttggtgcacatatgtatgtttttctagagtatatacagtggcatgggattgctgaattaaaaggtttgtatatcttatactagaagataataaaaacttttcctgatggattctgccaattcaaaaaaaaaaaaaaaaaaaaaaaaaaaaactcga

SEQ ID NO: 71 - DNA, 1356 bp, Homo sapiens
ccacgcgtccgcttcacagtttcaccttcaggctcaaagctggctctgcaggggacatgagaggcacaccgaagacccacctcctggccttctccctcctctgcctcctctcaaaggtgcgtacccagctgtgcccgacaccatgtacctgcccctggccacctccccgatgcccgctgggagtacccctggtgctggatggctgtggctgctgccgggtatgtgcacggcggctgggggagccctgcgaccaactccacgtctgcgacgccagccagggcctggtctgccagcccggggcaggacccggtggacggggggccctgtgcctcttggcagaggacgacagcagctgtgaggtgaacggccgcctgtatcgggaaggggagaccttccagccccactgcagcatccgctgccgctgcgaggacggcggcttcacctgcgtgccgctgtgcagcgaggatgtgcggctgcccagctgggactgcccccaccccaggagggtcgaggtcctgggcaagtgctgccctgagtgggtgtgcggccaaggagggggactggggacccagccccttccagcccaaggaccccagttttctggccttgtctcttccctgccccctggtgtcccctgcccagaatggagcacggcctggggaccctgctcgaccacctgtgggctgggcatggccacccgggtgtccaaccagaaccgcttctgccgactggagacccagcgccgcctgtgcctgtccaggccctgcccaccctccaggggtcgcagtccacaaaacagtgccttctagagccgggctgggaatggggacacggtgtccaccatccccagctggtggccctgtgcctgggccctgggctgatggaagatggtccgtgcccaggcccttggctgcaggcaacactttagcttgggtccaccatgcagaacaccaatattaacacgctgcctggtctgtctggatcccgaggtatggcagaggtgcaagacctagtcctctttcctctaactcactgcctaggaggctggccaaggtgtccagggtcctctagcccactccctgcctacacacacagcctatatcaaacatgcacacgggcgagctttctctccgacttcccctgggcaagagatgggacaagcagtcccttaatattgaggctgcagcaggtgctgggctggactggccatttttctgggggtaggatgaagagaaggcacacagagattctggatctcctgctgccttttctggagtttgtaaaattgttcctgaatacaagcctatgcgtgaaaaaaaaaaaaaaaaaaaaaaaaaaaaaaaaaaaaaaaaaaaa

SEQ ID NO: 72 - DNA, 1411 bp, Homo sapiens
  misc_feature (1395)..(1395): n equals a,t,g, or c
  misc_feature (1397)..(1397): n equals a,t,g, or c
  misc_feature (1401)..(1401): n equals a,t,g, or c
  misc_feature (1408)..(1408): n equals a,t,g, or c
ccggtccggaattcccgggtcgacccacgcgtccggcgtgaaccaccgtgcctggccggaagtctttaaaaaataaagtgattctactcttctaagcttacagagaccagaccaggtgaatgtaactggggaaaatcaagatggtacctctctgcattatcccgccagacactgtattttatgcattcatgtctaggatacagtgtgaaaattaaaaagtttagagggcagatgcaattgtggcaagtgacctgccaataaagcaggtgcagctatagaagctggcataggtatatccttaatggtgctttctccctgggcttgtctttttgttgtttttttcccctatattcagagctccttgagaagtgataaacacctccagctttctaacatcctccccacaccatctcaccatatccatctcccagcatccatctgcattcagctaagggcgggaaactgacctagtgcctgtgttgcagaccatttctgaggtctccaccatccaaggaggcacagccgtcattactgtcctccatgccttcagcagcccccctcacagctaaggtacataccaccccttctgccgcgcctccacccctggcaccaaggtcttctgctgcttatgtctaaagggatcacctatatttaactgcctcagtgacctaacctctttcttctcatgtgccagatgttaagatgaaggaggaatacmacacatactcaagcctcagcctgtttagttgttttcactggggctcgcttttctgggacggtatttattatcagactggcaagcctaactccataggtttacaggaagtagggatatttttataaaacaattgtgtcctccccacattttgctatgttaatatttgcttctaacaatttgcagctgtttcactttttcctcatttgtctctaagttgaaggctttgttggaggggacagagcacaggaacagccttgacagtctgtaattattgtacagatattttaatagcatataaataagtatattccttttattttgaaacaaaaatgatcagacactgccttttgtgtgtttgctgcctgtggcatccttttttaaaaagactgttacatattaaaatagtgtacatatataaatattacctcttttgctgtacagttgtgatagagactgaagattttattttttgtgtgctttttataagaaaaaaattaatacactaaagaatcttgctgatgtgattgtaatgtacctatgtaacttatttacttttgaatgttcttctgtatctttaaaccttttattaaataaggttttaaaaattcaaaaaaaaaaaaaaaaaaaaaaagggsggccsctytaraggatccaascttgcgtacgcgtgcaacganancagngtcgagnggt

SEQ ID NO: 73 - DNA, 2229 bp, Homo sapiens
  misc_feature (2227)..(2227): n equals a,t,g, or c
ggcagtatataaaatttgtggggcttacagcctcgcccacctgcttcacttctgcagcccacagcatcatattctcgaaaagataaagaccaaaggaagcaacaggcaatgtggcgagtgccctctgatttaaagatgctaaaaagactcaaaactcaaatggccgaagttcgatgtatgaaaactgatgtaaagaatacactttcagaaataaaaagcagcagtgctgcttctggagacatgcagacaagccttttttctgctgaccaggcagctctggctgcatgtggaactgaaaactctggcagattgcaggatttgggaatggaactcctggcaaagtcatcagttgccaattgttacatacgaaactccacaaataagaagagtaattcgcccaagccagctcgatccagtgtagcaggtagtctatcacttcgaagagcagtggaccctggagaaaatagtcgttcaaagggagactgtcagactctgtctgaaggctccccaggaagctctcagtctgggagcaggcacagttctccccgagccttgatacatggcagtatcggtgatattctgccaaaaactgaagaccggcagtgtaaagctttggattcagatgctgttgtggttgcagttttcagtggcttgcctgcggttgagaaaaggaggaaaatggtcaccttgggggctaatgctaaaggaggtcatctggaaggactgcagatgactgatttggaaaataattctgaaactggagagttacagcctgtactacctgaaggagcttcagctgcccctgaagaaggaatgagtagcgacagtgacattgaatgtgacactgagaatgaggagcaggaagagcataccagtgtgggcgggtttcacgactccttcatggtcatgacacagcccccggatgaagatacacattccagttttcctgatggtgaacaaataggccctgaagatctcagcttcaatacagatgaaaatagtggaaggtaattgccaaatcaagagaactgacttgcaagctaccttgaccctgaattttgctgtagttggtgctcaaatttgtcatcagtcagataatcagatttggtcttatttcttcattatctcgacctgaaatagtaatttggaaactgttggaaggtggcacagtttagtctaagacagcagtagtacatgggaaaaacagtatgggaagagttctttgtaatgtaaggaaataacaatgtagttctctattaatttagcaaatttgtacattcacaaaaggcagtttgtctactacagcagaaggctggttaactgccagaaaatgtacctccaggccctgcatgccgtcagtaacccgcccggcattggtgctctactgtctttggctagagcttagttgtgtttaaataatcatctttatatttggggttttaattacagttccattagtgcctgtagattagtgaacagaaaattgctttggaagagattctgccctgtagacactatgtgaataactgaagtaacactagactgaatctcctttttggagtatgtatcttctctcacttgttcaagtacaggcacactgttcaaccgcatggtatctttctgttgtgtgacttctacaaatgtaattttaaatgaaattaagttaacatggattcattacgttcctggccctgtagacacgtgtaagattatttaaaattctttcatttttttctgcctcttactatacgactgtagtgcaacaaatattttaaagcccccttttcttctttattttcattagttgtacattgatttcagtgtcaacacatttaaagattcattcatgttgcacagtggcttacatgaacgtgaaactgtgatataaggttttctttcatactcataattagcccaaaacagttgccaaactttgccattgtgctcctgcatttgtgtttgagctgctatatatttgtggaaattacactgaaagttgactaagagactattgaaaaagcatgaataattaaatatacatgtgagagacatctcatctgctgtattttacttagtgaatattgttcactcttccgtgtctgatgtcttgctgaatgctgtgactcatagtttacttttgttcaaaatagtttgcactttttgttaataaaatcaacttgagaaaaaaaaaaaaaaaaaaaaaaaaaaaaaaaaaaaaaaaaaaaancg

SEQ ID NO: 74 - DNA, 1554 bp, Homo sapiens
  misc_feature (695)..(695): n equals a,t,g, or c
  misc_feature (874)..(874): n equals a,t,g, or c
  misc_feature (1190)..(1190): n equals a,t,g, or c
gctttaatagtgtacacttacacatctggaaggaagagagttccatatggcagggatgattgggacaggagggatcttttgataactttgtgtgagcatgaaaatcgaatggggaagggagagctgtgaaaaaaaaatgttatctctttttttttgcttctggaaacccagctttttggtcagccgtcttgtgatttggctgggcctggtttgtgggggtcgctctctgagttgggtagctcttggagaagattatctgggaactcccatccttatcccaaacatacaccaaacctgcccccatccaccattatgggaattagtaccagagcatccttgcagattagttctcattttctctctttgtgagcacacacacatcaggtagagttccagaaacccagctttaggacactgttcacatatcacaggaggagcaaggacatgaatacaagagagctctttcctgaccagcagtgggargtggttgtactatctatttawttgtttattwatttatttattttttgagatggartctccttctgtcacccaggctggagtgcagtggcatgatctcggctcactgcaatctctgcctcctgggttcaagcagtcctcctgcctcagccccccaagtagctgsgattacaggctgcaccaccatgccccgctaatttttgtatttttagtanagatggggtttcaccatgttggccaggctggtctgtaactcctgamctcaggtgatccacctgccttagcctcccaaggtgctgggattacaggtgtgagccaccgtgcccggsctggttccactatttattaaaatgtatatatgtgttttycacttttttggtaggcattttattgntaataatttggaaattaaaaaaatttctccacaagcttattttttgtggagacaaggtctccctgtgttgcctaggctggtcttgaattcctgggctaagtgattggtctgccttggcctctcaaagtgctggggattacaggcataagtcaccatgccctgtttgscagcaagktttawackgctctttttggtagggawwtkctmaggtwcagtgatagagaacatgkagttgtggtgggawacagtggctyatgactgtatccgcactttgggaggctgaggcaggaggattgcttgaggctgagagttgagnacaggcctgggcaacatagcaagacaccttctctaaaatgaaaaaaattagctggatgtggtgtcatgtacctgtagtcccagttgcttgggaggctgaggcaggaggatcacttgagcctgggtgttcaagataggcctggtcaacacagcaagaccccttctctaaaaatgaaaataaaaaaattagctggttgtggtggcatgtacctgtagtcccagttacttgggaggctgagacaggaggattgcttgagccaggggtttgaggctgcagtgagctatgactgctcccctgcaccccaggctgggtgacagagtgagacccagtctctaaaataaaaaaaaaaaaaaaaaaactcgta

SEQ ID NO: 75 - DNA, 2083 bp, Homo sapiens
ggcacgagcgacctttgtgagcgagctggaggcggccaagaagaacttaagcgaggccctgggggacaacgtgaaacaatactgggctaacctaaagctgtggttcaagcagaagatcagcaaagaggagtttgaccttgaagctcatagacttctcacacaggataatgtccattctcacaatgatttcctcctggccattctcacgcgttgtcagattttggtttctacaccagatggtgctggatctttgccttggccagggggttccgcagcaaaacctggaaaacccaagggaaagaaaaagctttcttctgttcgtcagaaatttgatcatagattccagcctcaaaatcctctctcaggagcccagcaatttgtggcaaaggatccccaagatgatgacgacttgaaactttgttcccacacaatgatgcttcccactcgaggccagcttgaagggagaatgatagtgactgcttatgagcatgggctggacaatgtcaccgaggaggctgtttcagctgttgtctatgctgtggagaatcaccttaaagatatactgacgtcagttgtgtcaagaaggaaagcttatcggttacgagatggtcattttaaatatgcctttggcagtaacgtgaccccgcagccatacctgaagaatagtgtagtagcttacaacaacttaatagaaagccctccagcttttactgctccctgtgctggtcagaatccagcttctcacccaccccctgatgatgctgagcagcaggctgcactcctgctggcatgctccggagacactctacctgcatctttgcctccggtgaacatgtacgatctttttgaagctttgcaggtgcacagggaagtcatccctacacatactgtctatgctcttaacattgaaaggatcatcacgaaactctggcatccaaatcatgaagagctgcagcaagacaaagttcaccgccagcgcttggcagccaaggaggggcttttgctgtgctaaattaggatttgagggtgtgggaccctcaccaaattcattgattactgaaaattgaatgttttttgggtccacatttcaaggctgaagtgtgtagtgtatatataacctttcctatggaaatgtgacattgagtacattttgtgttgctgttgtgaagccattaatataaatctttggtaatgacccatatctctatatgtatgtgttcccagttgtgggagcaggcactaatgaaatcctgtgcctggaatggagatatttaggtacctgaggcttagtgtcctgtggtctgcatgtaagatagatgacatcctagaacaaagaagctgttttaacttaatccccctgatcagcaggatatctgtgtgttcagtgacatcatacattctgtatctagaagtctaaaatttctgcctttctcctaaagaatgtgttcttgcattttggttgaaataacctacacagtgttaaaaatcagatacctcctttagtgaccagttcaaattttaatagcgataggtagcccctgagaaatttatcactataactccacaggaaatatgacttggaagtgctctgtgtactaaacaaaataaagcccctctttgcatttaaaaccaaagtcaaaacaaaactcttgtaatgcaattaattaacttcatgtcttcccatgactcaagttttgttaaatatgcccaaaaactttgattggcagtttcttcggttaattattcctatagaatgtattttaagaaatctatacaaattggatatatgcttggtaattctccagtttctaggaggtacctatttctaccgtttcaagtgatgaagtgaaaataatttacattcgatagtgttactgataacaaacctacttaagagatatgttgctttttacttaagggatagtgttgatagataaattagaatgtatagataggtttgtgaaagtctaaataatggctgtatagatatgtatatatggttcacacatctggatctgtgtatttgattttgtactttaaatgtgacaaataaaccttttgggagaaaaaaaaaaaaaaaaaa

SEQ ID NO: 76 - DNA, 427 bp, Homo sapiens
ggcacgaggtcatttcagccttatgaattgcccagaataagctagatcacctttaaggccatgtggttagggaaacttgggcacagaatttacattttcaacttggtgataagatgggtttaaggtaagaatcaaataggagaaagccttagctgttccagcggcccatgtttaaaagaatgtgcttctttttccaagtatttctgccgcttgcatgcactgagcttctttggaaaggagcaccatgcaggcatattttccagacaggaccggatttgctcgttactcagaggtgtgtgcattctttgcttttaggatatttaattagcatcttttaatagtgatattacggtgtcttaaaagtttatgcatttgaaaaaaaaaaaaaaaaaaaaaaaaaaaaaaaaaaaaaaaaaaaaaaaaaaaa

SEQ ID NO: 77 - DNA, 863 bp, Homo sapiens
  misc_feature (7)..(7): n equals a,t,g, or c
  misc_feature (298)..(298): n equals a,t,g, or c
gggcagnagttccatttctgccgtggtcccagcagcgtcgctgtgggtctggcctgggttgcgtgtgtttcgtatgtgggccgtgctccctgcttggttcccttttcctggaacgtgtcactgcctccctgtctcgctccgtggacatttctgggaggtcaggccgtggccacctggccccctgttcaggtctgaggctcccacctgcttaggttcgggaagctcaggagtgaggccatgccctcctcaggacatcccatccaagccagccatgtccggtgatgggccgctgcccggnaaagtccttttccttcttgtaactgagaagaacttgccttgagccacgtcaagtcccgtccgtcgcagccactgcccacaagcgtgagtctgctgtgagccagcggctccatggcagggcatcccagcgccattcctgccttcacacacacttgctgccgtttccctgtgctgggggctgtgcargtctgcctcggtgtggacttttctcttaggaaagagccccaggtcggccgagcacggtggctcatgcctgtaatcccagcactttgggaggctgaggcgggcagatcacgaggccaagagatcaagacaatcctggccaacatggtgaaatcccgtctctactttttaagtattttatacttaaaatttttgtattttatacaaaaattagcgggcttggtggcagatgcctgtagtcccagctactcgggaggctgaggcaggaaaatcacttgaacctgagaggcggagattgcagtgagccaagatggcgtccactgcattccagcctgggcgacagagcaagactctatctcaaaaaaaaaaaaaaaaaactcgta

SEQ ID NO: 78 - DNA, 1276 bp, Homo sapiens
gtgagtgtgtggcactggtggcctggagccaaatttagcttgggtgagagttgacaatggtagttttccttcctcaagcccctctgtgcccctagagcaccctggctgtggctgcctccttcatccaagagcagagtccatgttgggccaggagacttcagatccatgtcctggtgctgcctctggctttgtctttcctcagtgggcaggactgggtctgctggtccatctttacccttctctgagctatgcagccttggcctgctgcgtctccggcctgtattctctccccttcactcaggccctgggaaaccagcccagtttctkgcaggagaggcagaggaggtcaatgcctttgctctgggcttcctgagcaccagcagtggtgtctctggagaagatgaagtagagcccttacacgatggagttgaagaggcagagaaaaagatggaagaagaaggtgtgagtgtgagtgaaatggaggcaacaggagcacaaggacccagcagggtagaagaggctgagggacacacagaggtgacagaagcagagggatcccaggggactgctgaggctgacgggccaggagcatcttcaggggatgaggatgcctctggcagggcagcaagtccagagtcggcctccagcacccctgagtctctccaggccaggcgacatcatcagtttcttgagccagccccagcgcctggtgctgcagtcttatcttcagagcctgcagagcctctgttggtcaggcatccccctaggccccggaccaccggccccaggccccggcaagatccccacaaggctggactgagccactatgtgaaactctttagcttctatgccaagatgcccatggagaggaaggctcttgagatggtggagaagtgcctagataaatatttccagcatctttgtgatgatctggaggtatttgctgctcatgctggccgcaagactgtgaagccagaggacctggagctgctgatgcggcggcagggcctggtcactgaccaagtctcactgcacgtgctagtggagcggcacctgcccctggagtaccggcagctgctcatcccctgtgcatacagtggcaactctgtcttccctgcccagtagtggccaggcttcaacactttccctgtcccacctggggactcttgcccccacatatttctccaggtctcctccccacccccccagcatcaataaagtgtcataaacagaaaaaaaaaaaaaaaaaaaaaaaaaaaaattgggggggggcccc

SEQ ID NO: 79 - DNA, 2494 bp, Homo sapiens
ggcacgaggagatgtttaaggattacccgccagccataaaaccatcctacgatgtgctgctgctgctgctgctgctagtgctcctgctgcaggccggcctcaacacgggcaccgccatccagtgcgtgcgcttcaaggtcagtgcaaggctgcagggtgcatcctgggacacccagaacggcccgcaggagcgcctggctggggaggtggccaggagccccctgaaggagttcgacaaggagaaagcctggagagccgtcgtggtgcaaatggcccagtgacccccagacgcggaaaccgggtggcagcgcccagcctggccccaagcatggaaacgcacaacccctaatcgccctgagctactgcttctaacacctcttttcccttgtgtgagggcaaaccaggctgcaggtggggttttcacttcctagggtagtttaattttaaaataggccaatgttggctagtctgtgcctcagtgagatcagtcagctccgagtggctcccgtgtcgtaacagcaggagcatggccgcaacttcccaggccgaggaagggcccccggctcggcctcttgagagccccacccctgaactggccccagctcctcttcctgcctctctcatggcttgggctggagtgggctctctggacctgaccagactgtgggtccctgcgtctcctgcccactctgaccgggcttcctccctccacgcttagggtctgtcccgggtactcagtcagcccagtgggatcttacccacttccctgcaaggtgcacctgccccaggctcaggctgcccagcggctcttcctggacagtgagagcagggctgggcgcctctgtcctggcccgggagccgcaggggcccctcctccagagcctgggcgcaagcgacacaggctgccgctgctctcccaggtgaaatccacaccagtccacgccgggtcgcctgccctgtctccctacttagacccagtcattctagagggatccaccgccacactggccggcccacgtcctgggtgctgtcatgcccagcttggagtgccacgtggccgctgcccacgtcccgggcactgtcatgcccagcttggagtgccacatggccgctgcccacgtcccgggcactgtcacgcccagcttggagtgccacgtggccgctgctgtgacaggcagtgttcttgggggtggggctgcatccaaggctttgtaaaccggctggaccacgtctccctggccccagtgaccgggggaagctgagcccctccctcctgtgtttgctcccattactcaaaatgcaggacagatcaggtcagagcccaggaattctcacaggttcacccagcgccctctacctcctagcaagtactttgtcttgatcctcactgagaaggccccagggcagcggtcttctccatctccgctgttttggggtcttagggtacagcccaggcggtcactgcccacctgccaggctgcagggacagttgggtgtgagaataacactggctttgggtagtgccatggccaggagtgggtttccctgcgtctcctcgtcccgagggcgcctgggtcctcccagctgacggcagtaaatccacagtgagttggggcgactgtgaaactggaatgctgttactttgataattactttccagcaggtgttttccttcacaatggttttgtttctttccttctgatctgagaagacatgaacgttttctcttcaccgccgtggggtgtattgactggtcccccatgggctgctggaaaggcccggagatgcatctgtggcctggggccatcaagatcaaagaaccaggaggcctgggagatgcagctggatggggcggcctgcagaccctgccagggggtttgaggaccctcccaggtttcccactgcggaacaggagtgactctggctgccaagataccttcatggtgttcatgacaagtggaatcattattttcaaccattgaagggggatgcaggcaagacaccttcccagctgctcctagaggggacaagccaggccctctctgcagtcctcggcagctccggaaggacacagtcaggggccgggcaaacactttggccacagccccaaacaagcgccaccgtgggagaggagaggctgctgtcactggtaccggatgcagaccccaccctgtctgcaggccacccccacctccctgcagctttgaggctggcggggtctgctcctgggaatggggtgggagccacagggacgacccggggcgggctgatgtcttcttgggggcagaccagagagctcaagtttcagagtcagaattaggcacttggagcgtttttgctggcttgcactttcttattttcttattttagagcgcttaaaaaaatccggaaaaatggggtttaaaagaactgtctctttcagtctacatttttgtttaatacgcttgagcaataaacgcttacttgcaaaaaaaaaaaaaaaaaaaaaaaaaaa

SEQ ID NO: 80 - DNA, 1630 bp, Homo sapiens
  misc_feature (527)..(527): n equals a,t,g, or c
  misc_feature (546)..(546): n equals a,t,g, or c
gaattcggcacgagattatctgtcttcttcttaccaatttatagaactttttagtattgcagataaagttcctcatcggatatcttctctccttctattgggtacctttttattgtcttaatgggggtcttttaatgaccagaagttcttagttttaaaatagtccagtttatccatttttaaattgttagtgctatttgtgtcctgcttgagagatttttgcctactgcaaggtcacaaagatgttttcctctaaaagccttttggttttgcccttttgttttagatctgcagctcatctggaattgagtgtgtggtgtgtgtgtggtgtgaggtaggggtcctttttttcatatggatatccaattgacccagaacagtgtattgaaaaaaaaaatctgtcttagtcaatttggactgccgtaacaaaataccataacctgggtggcttagactacagaaatgtagcgctcacagytctggaggctggaaggccaggatcaagacaccagcagattcggtgtctngtgaggacccactttgtgnttcatagatgtcaccttcttgctgtgtcccagtggtgraaggggcaaactagctcccttaaacctctttttataagatccctaaaacctttaatgagggctccaccctaatgatctaatcacctctcaataccttatcttgggggttaagatttgaacagaggaatttgggggagacatagacatttggagcatagcatcttcttttcctcagtgcacagcagtgctgccttcatcatcagtcaggtgtctgtaggtgtgtggctatttctggacttggcactctgtcctacttgttgatttctctgccttataccaatgccacaccatcttaattattgtaaccatcttaattatttataaaaagtcttttttttttttttgatacagtctcactctgtcccccaggctggagtgcagaggtacagtattggctcactgcaacctctgtccccaggcttaagcaattctcatgcctcagcctcctgagtagctgggattacatgtgcaccaccacacttggccttctttcttttctttccaayccattkgttttttatttctttccctkgctttatkgcactggctaagatttccagtgctgaataggagtgatgacagtgggcacccttgtctttctcccaacctcagagggaaaagtatccaatgcatttgtagatattctttatcagattagcttcctttctagcggcttgtgtctttgcattgtttttcatgagcaagtgttgaactttttcactgagttttccaaatactttttccattgagtttttttactttaaccgtcatattgccaaaagtctgcatttgttatttcctcccaaattgctgggattataggcattagccactgcacccagccagactttatagaaaatcttgatatctggtcatggaagtcccctagcttggttatttttttttggtaccgctttgtctattttcggccctttccatttccatgtaacttttaggatcagcttgtcagttcctaccaaaaaaaaaaaaaaaaaaactcgaggggggcccggtacccaaatcgccgggtagtgatcgtaacaatc

SEQ ID NO: 81 - DNA, 1860 bp, Homo sapiens
  misc_feature (912)..(912): n equals a,t,g, or c
cctagctgtccccctgagatgaagaaagagctccctgttgacagctgcctgccccgctcactcgagcttcaccctcagaagatggatcccaagagacagcacattcagctcctgagcagcctgactgagtgcctgacggtggaccccctcagtgccagcgtctggaggcagctgtaccctaagcacctgtcacagtccagccttctgctgkagcacttgctcagctcctgggagcagattcccaagaaggtacagaagtctttgcaagaaaccattcagtccctcaagcttaccaaccaggagctgctgaggaagggtagcagtaacaaccaggatgtcgtcacctgtgacatggcctgcaagggcctgttgcagcaggttcagggtcctcggctgccctggacgcggctcctcctgttgctgctggtcttcgctgtaggcttcctgtgccatgacctgccggtcacacagctccttccaggctggctgggggagacactgccgctctggggctcccacctgctcaccgtggtgcggcccagcttgcagctggcctgggctcacaccaatgccacagtcagcttcctttctgcccactgtgcctctcaccttgcgtggtttggtgacagtctcaccagtctctctcagaggctacagatccagctccccgattccgtgaatcagctactccgctatctgagagagctgcccctgcttttccaccagaatgtgctgctgccactgtggcacctcttgcttgaggccctggcctgggcccaggagcactgccatgaggcatgcagaggtgaggtgacctgggactgcatgaagacacagctcagtgaggctgtccactggacctggctttgctacaggacattacagtggctttcttggactgggcacttgccntgatatcccagcagtaggccctgccttcctggccactgatttctgcatgggtagaccatccaagactgcagcgggtagaaggtggcagttcttcatgggagtctttttaacttggtgcctgagttctctcctaggcaagtggccagttgcctccacctcagttcttccatctttggtggggacagggcccagcagcatctcagcctcctacccacaattccactgaacacttttctggccctactgcacatggcccccagcctccatccttgtgctggtagcctctcacaactccgcccttgccctctgccttccacttccttccatctcatttctaaaccccaaacagctcatctctaaaaagatagaactcccagcaggtggcttctgtgttcttctgacaaatgattcctgcttctccagactttagcagcctcctgttcccattcttggtcacagctctagccacagcagaaggaaaggggcttccagaagaatatagcaccgcattgggaaacagcagcctcacctccacctgaagcctgggtgtggctgtcagtggacatggggagctggatggaaatgcctctcacttcaaaatgcccagcctgccccaaatgcctctaagcccctccctgtcccctcccttgtagtcctacttcttccaactttccattccccatcatgctgggggtcttggtcacaaggctcagcttctctccactgtccatccctcctatcatctgtagagcagagcacaggcagttgtgtgccttgggcccagggaaccctccatcaacctgagacaggactcagtatatggttcttgggtatgccctaccaggtggaataaaggacacagatttgatttctaraaaaaaaaaaaaaaaaaaaaaaaaaaaaaaaaaaaaaaaaaaaaaaaaaaaaaaaaaaaaaaaaaaaaaaaaa

SEQ ID NO: 82 - DNA, 1509 bp, Homo sapiens
ggcacgaggatgtacctaatgagcttctccattcactttgtaaaaataatttgtatgtgtaccatcttggtcctctcccctcccgttttgttaaaatatcaggatagcactcccaggccactttggtctcagtgtaagatccctattaactatctgaaaggaaaatagagccaagacctctggtctcaaatatataggaattgcctttctttagtcttcaggactattgtgtgaaaacaagtaggggtctaatctcctagaaggtaggggctttatccttaaagagaatatgtccccagattattagcacttttagaggagaagccaaggtatgtaggggtgtgtggctggcccatcagtggagcacgaagagagaatgggataccattgtgggaagagaagaaaagttcctcaggggcctcccactgctaaagttttttgtgagatgttgatctgtgcttcctggatttgacttttaaaggaattattctggcagcacatgtagtattcttggatgatcttgctgctcttatttctccttttgtgtgtgtgtgtgtgtgtgtgtggctatgggttttcatttgtaactccatctgcttaggagagtgggctctctataagggaacctgctgtaaacttcattgcagcaaggatgtagagagaaataggacttaattccactaggggctctcatctcacaccttaaggaggagatttctagaaaaactgggccagattttctttgttctccatcattttaatgtggcaggctgttcagttttcttactcttacctatgtgatatttcttcgtaacgtgtccaaaaagaaaaaagacccaatcagtgtctcttgactttgttctttgatccctcagtttcttcttgatttcagcatgtgtcgggttcctaattttgggtatgagttagcaaatttaaccattgtgtttgtgccctacccaggggactccccagtttctgacttgaagtagactgagaagaatccacgaggtgctatctggccagatttaagtagattctatttccttggttctccctctccctgaggacctcttattttattgtcccctcttctaggttaattctcctttgatttgactttgttgagaaggaggttggacagtagattagcaaagttccaagtgcaaaattacagtgtgttagagtgtggggggaaaattagtcttatttttccctacatgggatacaacactgtgaattcaatcttcaactgaaggccctgcagttctcctaaaacatagttgtttgtttttctttaacaaagtttaagctagtgttaataaattaaaaaaaattgcttgtctgtctacttcagctttgttttatgcccatttcatattgttgtctgtgttgtaattcataacttttgataccatttctgatgtgtaaaattggttgtcttgtaaatatcttataaagagttcaattgtaaataaactattgtggctgttaaaaaaaaaaaaaaaaaaa

SEQ ID NO: 83 - DNA, 967 bp, Homo sapiens
ggcacgagggcttcttggctgggactgtctccacgctggggtacaagttcttcacgcccatccttgaatcaaaattcaaagtccaagacacatgtggagtccacaacctccatgggatgccgggggtcctgggggccctcctgggggtccttgtggctggacttgccacccatgaagcttacggagatggcctggagagtgtgtttccactcatagccgagggccagcgcagtgccacgtcacaggccatgcaccagctcttcgggctgtttgtcacactgatgtttgcctctgtgggcgggggccttggaggcatcatattggtcttatgcctcctagacccctgtgccctgtggcactgggtggcaccctcctccatggtggggggcagagaagcctcacagatcctcccctaccaccaccagggctcctgctgaagctaccctttctggactccccccccagactcccagcactacgaggaccaagttcactggcaggtgcctggcgagcatgaggataaagcccagagacctctgagggtggaggaggcagacactcaggcctaacccactgccagcccctgagaggacacgctccttttcgaagatgctgactggctgctactaggaagttctttttgagctcccattcctccagctgcaagaagggagccatgagccagaaggaggcccctttccacaggcagcgtctccacagggagaggggcaacaggaggctgggaaatggtggggagtggggccgtaactgggtacaatagggggaacctcaccagatgcccaacccgactgccctaccagcctgcacatgggtagaagaggccaaattgaggcacccagtgatccactggccccacgtcacacagttacagtgaagcccaagccaggcctggttgagggtgataaacgccactgtctctaaaaaaaaaaaaaaaaaaaaaaaaaaa

SEQ ID NO: 84 - DNA, 885 bp, Homo sapiens
  misc_feature (233)..(233): n equals a,t,g, or c
aattcggcacgagagggctgcatccttgcgttctgtgagctctgcccgttgggagcatccatgctgatgtgcaggggccgtgcagcactgcattcttcttgccttctctgttctgtttagtacaaccaccccagcaggtctccagttcctgccaggttagtgtggatggcccagcaccatctcctctccatcttgttggctatcctctcttgttcctcacaaccccgccaggntcgcggctcaggagctctgccgtgtgaagtgtgctcagcagttctcctcacatgtctacgcaaaatctctggctccctgtgtgtctgagcccaacagacacactgagcacaggagttggctctcagctcctcccagcttgccgtgactgagccytgccgtcctgtggcamcgccasggagaccacagtgtccaactgtccaacctttacgtaattggcatcccaggaggagaagcaagagtgaatggggcaggaaaagatcattaaagaaatcgtggctgacataaaaaaggatgagttcatgtcctttgtagggacgcgtggatgaagctggaaaccatcattctgagcaaactatcgcaaggacagaaaaccaaacaccatgtgttctcactcataggtgggaattgaacaatgagatcacttggacacagggtggggaacatcacacaccggggcctgtcgtggggtgagggggatggggcagggatagcattaggagatatacctaatgtaaatgacgagttaatgggtgtcagcacaccaacatggcacatgtatacatatgtaacaaacctgcatgttgtgcacatgtaccccagaacttaaagtataataaattaaaattaaaaaaaaaaaaaaaaaactcgtag

SEQ ID NO: 85 - DNA, 853 bp, Homo sapiens
gggtcgacccacgcgtccgggtgaattaacacgtacccaatggccaagagtagatttgggtgtcagtgataaaattttcattttcaaaaacctggtgttctcagttacagctttatataagtatagtaataactttagcagagctgtagagagatagatttgcaaacttgaagtgatatgggataaatctccatacgtggtagaattttatataaaatggcatatttcaaggtatgtgtgattatttggtttcagcaattctgtgttgaagaaactagtatcataaaaaatgttcgtatgctgacatcagaattccagaattcatatgccacccctgtttctgggctccttcctggtgctgtggcttggaggggtggtgctgtgtacgggtgggtgaggcacgccatgcaggtattgcagaaggaacccacgcaaccgtcatcctttctacccccaagtgatgctgcctcattctggggtcctgaaagtaggcttcacttaacatggtagggaagtttctggctgaaaaagcaaaaggcttttatcactggagtctatcctgagccccctgtgcaaaaggcagtgtgaactcaggggacagaatcactgaagcttttgtaaaagcacaacatctgcctatcacagtccaaaggggacttcaaaatcaagaatgtctgtgacggagaagatggaaacagagcctggctgatggttgtaggtgaatcttctctgtgtcgagatgttatcagtgaccgttttctttatttcatgaagaaacatttttaatatattcacctccctgcatatattctgtttactgtgttattgttaaaaaaaaaaaaaaagggcggcc

SEQ ID NO: 86 - DNA, 400 bp, Homo sapiens
tcgacccacgcgtccgccctgcatggcgagatgtcctcctttcccgggccacagtgtgtgcaactaataaacctcctccatctcatctgcccagtgtcgggtcttgtgtgttcagccatcaccatagccctcaggcagaagtccatccctcaccaacagggaagagaggcagtgatcaaaacacctcctccaggaagtcttccctgaagttcgtagtctggcttcagtgccacttcttccctgccctcatattcgctaaccgccacttactgcctggttttcagcctcactaggatgtgggccactaagggccaacatggtcctacttgcagctgcattatcagggcctaccataacaccttccaaatgcttaaaaaaaaaaaaaaaaaaaagggcggcc

SEQ ID NO: 87 - DNA, 1261 bp, Homo sapiens
  misc_feature (481)..(481): n equals a,t,g, or c
gttttcaaactcatttctaagccaaatagtttagataaatatttacccttatatttggggggaattcaggctcaccatttgccgaggcaagcccatcaacagtctagaggcatattctgtgtcattccttcccgtctccttcatagaatactactttttccttttgtctcctggccattctccatcatctgctgattattgctaaccacaggatgctggcaaagcttacagtgataggcacatgtgttcagtgatgtccaatacactcttatcacagtggttattgcttcttactcttttcaaatgcattattctacccctcaacctayatccaatcattagaactatacctgactggagcccagaacttgggaccaatacttaattcaaatagcaggggcttgctcacaaacattaagcccaamaagaagcacagcactttkgaaaagtcaaataggsctttggtagctctgtacatttngcaatttacattgttattaagtttatagcactaataacacttcagtcgtgaatctacagtctcaatatgataagtcttagaacatgttctagaaatagtggtaccttgctgctattatacttagtaacttataccccaatataataataagtattaaatacagattgtgtatgcattctttgtgtgtatatgccaactgtactacttaacctcactgatgagcaattagaaaaatacacaaattgtcatagtgaaaataagtcttggtcaattcagatgatacgtgaacctgataaatgctctaatagatatgctattttgtcctgtattgcttgttttacagtatggtgcatgttgtttgctaagtaaaatgataataataataaagtatacccaattttaaggttagaattaaaattttgcacatatgcttcttgatattctgaaatgtattctgtggsttmattatcttattcatacacattkmgctwggctttttacccctaggaaataactgtccaagtatatatctcgtcttctttcttgtaactttgattaaactgcttacttcaacttacaacattgtaaagccagaatacctcattttaacagtgaaaaaaaatattatgacctgatgtgttctcttgtatttgatttgaactacctaaataggcttaactgtaataataaatatacaattttggcaaaaaaaaaaaaaaaaaaaaaaaaaaaaaaaaaaaaaaaaaaaaaaaaaaaaaaaaaaaaaaaaaaagggcggcc

SEQ ID NO: 88 - DNA, 639 bp, Homo sapiens
gaaaaaatgctagggagacaaaatcaaatgttaaggggctgggctctcagcacattcttggtttgcattctccagtgggtcagaagcctgacaatccgcctagcctctgctttgagcgtcaggggacccagttctattcctgcatccttagccatcatctacacactttttatcttttcttttaaatttttaaaaattgtgaaatctatatacatataagccatatgttcaacttaaagaatagtaaacaactgtgtccctaggatccaagttaagaaatagatcagagtcagtttcttagaagcttctatatgtgcttctccccagtcatgtgctctcctgtctctacctgagggaaattacagatttcatgcttttctttatagttttcctttacacacatacccttaagcctctaagtactatatggttcggttttgcaaagcccagaagcctattttaatgctgtatataagaatatgctagccgggtatggtgactcatacctgtaatcccagcactttcagaggctgtggcaggagggttgctgaagcctaggaattcaagaccagcctgggcaatatagggagaccccttcactacaaaataaaaaattaaaaaaaaaaaaaaagggcggcc

SEQ ID NO: 89 - DNA, 3576 bp, Homo sapiens
ttcatctgcctctcgcaagaaaaagtcctggtaaatacacattagcatttccgttttacacagaacactgacagatactttcctaagatcatggagttaatacccaccagaacctagactcaatacttatggaacttcaaatctcatgcttttctcattgcacttatgattactccattatgtaggagcaagggagagttgagagcatttgaagaggttatgcaaaggaccagctctgaggagtaggcttagcaaagtaacatgagggaaggtaacaccgttcatctgtgtagcggagtgggagccaagagacaaggagaaagtttcatgttcgtcatgtgtctcggatattccggtttctgcagggacgagaacgcgcagtttcgcctccatcccttgacctccaacacagcttctccactggatcatcggtggcgatgaaggggcggctggggaaggatgtcagagaaaccagaagcttgacggtgaatcctcgggttttaaggagagagcaaagtcctgagagggcgacgtattgtccctgctcacctagcccagaatgaacaaacacgcgccagccagggagcagcgagccgagaattcggacgagcctctgcaaccgccatttgccgttctcgcaaagactaccaagaccacaatgcaacggggcgccgagctaattcccagtgagcagcaggcgaggcgccaccgacgcggaagactataagccccagcgggcgacgaccgaacgcccccgggaacaccgggccccgagctcggtcccgcgcccgaggatcctccacggggctagatggctgcgtcgggggcgggagcggaggtgagcgggcgctagggccgcgagcccccgccggcccttcctccagcgccctgcggaccccgcagaaggcgctcgcctccctagcccgcaaaaacatatcgatttttctcgctgtggcaacggggacgtcctgatagatcctctgctccaataggcaactccggccttccctgccctgacctggaacctctgggagggctgcagagtaagtgccgcctctgcgctccgacggaggcacgaggcctgtggagtaggtccctctgttccgacaggtgcgacacttggcgctccatgcttgcgggtgccgggaggcctggcctcccccagggccgccacctctgctggttgctctgtgctttcaccttaaagctctgccaagcagaggctcccgtgcaggaagagaagctgtcagcaagcacctcaaatttgccatgctggctggtggaagagtttgtggtagcagaagagtgctctccatgctctaatttccgggctaaaactacccctgagtgtggtcccacaggatatgtagagaaaatcacatgcagctcatctaagagaaatgagttcaaaagcttgccgctcagctttgatggaacaacgcttattttggaagttcgaaggggctgtcgtgtgtgtggccctgatcttcgcttgtcttgtcatcattcgtcagcgacaattggacagaaaggctctggaaaaggtccggaagcaaatcgagtccatatagctacattccacccttgtatcctgggtcttagagaccctatctcagacagtgaaagtgaaatggactgatttgcactcttggttctttggagccttgtggtggaatccccttttccccatcttcttctttcagatcattaatgagcagaataaaaagagtaaaatggtttccttcccttctgtaacttggagcaggaagtcatgggggcagagagggaaaggaggtggttacttaaggccccaatctaccaagtcttccccaccacttctcccttgttttccccctcttctactacttatttcaaacttctgggatacaatttcagctaaaacgtttatttctcactcaaaacttatttcccctcaaccctatacccaaagaagaaataaaatcacagatacataacagaagtatttgaggtaccctctcatatatgcaaacaaatgcagactaggcctcaggcagagactaaaggacatctcttggggtgtcctgaagtgatttggacccctgagggcagacacctaagtaggaatcccagtgggaagcaaagccataaggaagcccaggattccttgtgatcaggaagtgggccaggaaggtctgttccagctcacatctcatctgcatgcagcacggaccggatgcgcccactgggtcttggcttccctcccatcttctcaagcagtgtccttgttgagccatttgcatccttggctccaggtggctccctcagtctggactctaccacttgggtctccagattttctgttacgtccttgtgggtcaggatatttctggaagtcactccgtgaggctggtaatcctcagacccagcttctggtcgactctggaatggactgaagctgggcaggatgatgagagccagggaaaaaagaagaatcaaaacacaagtgctggtctgggcagctttgttggaagtttgagcaattagcgtctgcagctggcggagctgagctaccaaggagatgttgtgcctctccagctcctggacttttttctgtaattcttggttctgtgcagaacaggctgccaccctgctctccagcccatcaatgtactccttcttccgccgccgactgtcctgagctgactgcttgttacggattttcctcctgaccttcttgaggaccctctcctctgccttggtgaggggcaggtgagagggcagggaaaccccttcctgccccagcagacgcttctcctcatcggtcaggaacagggtttgacagggcagcagggttgtacagggcactggggctacggtgcctgctctgggcaggatgtgggcatgagcatcaaagggcagctcactgaccatgcaggaatcaggcaccataaatgctgggctccactgatctagctggatggagataaggcctacatttggcccagtttccccctgcatcctctccagggcccctgcctcatagacaacctcatagagcataggagaactggttgcctgggggcagggggactgtctggatggcaggagtcctcagagatgccactgtcactgccaggagatgcttctgagcagtacacctcattgggatcaatgaaaagcttcaagaaatcttcaggctcactctcttgaaggccacagccacggtccccaccggacttccagccttgcagtccctgttcctgtagcctagttaccggaacctctggaggggggcagtggagtcccagctccaggacggatcctgtcgagaagatatcctctgggggctccagccacgcgtccagcaggtcagggattccgagatccatgcttactacaaaagtggatgccaccttgccaggagccacggtagggccgctgtatctgggagtaggggactaagagtctgagggtccacaaacggaatttaagaagtaggtagccgcgccctttctgctgcagttttctcttagctatagtaaatcttcctgagggtttggtgtctcctagctgaagaacagaaaaggctgtgac

SEQ ID NO: 90 - DNA, 1262 bp, Homo sapiens
cagcatgtacccagttgttctttctcctgagaaagcaaaatgcctgatatttcttataatccaggctgccacgtttaccttgtaaaatcaatacttaatttttagatttttatattatcttttctcgtgaagcaagacttctaaattatggctataatatcttttgaattgttgttcttaatgaatcttccaactgtaaactcatctaatttcaaacttatcatacctgaggatgtaacattgtcctttgtttctcatcttgatattaccgtcaatcattttgtatttctgagtacatttgaacttgctggagtaatagagggaaaacctctgcctgattctaaatcagatctttgtcctatactcggacaattatggtttcatattttattattttttattttctgggtttaacaaatgagataacattttagacataatatttgtaaacatcttgacttatttcagcattttccttttttgtgtatcttcagagagtttgttgaaagtagcaatttccaagtaattttaaattattgaagtctactagcacgaaaggtcaaattcttaggatatttaaaaaatgttgtttaataatcaaactcatcttaaaaaatgttcatcagactctgtctttgatgcacattttgccaaaagagagccttatttctgtgaaagaaatacagtatgtactttgggatttactaaagtaaaactgttactttaaggcacagagcagatatagaatccccctctctccccactcctagtgactggtattctacattaatatttatcttccatgcatagtgtacttgagggaaaaaaacaataactcttaattgtttaatatcaaacaataaaatcctgtgtatcagtgactgtcaatagatggctttctgtttaaaaactgaagctactccagaagtaggaattaatttatttagtaaacaaagtcagtcaaaccagagccatgtcctggggaactgtcaaaagaatggttcctaagggccagaggccacatccactggtagatgacagaacaaccatacttcagatggcaaaaccggtcagtttggtttgcgttgtgtgcctatcctctttctgtgtgcttcagctgaattaagtgcttggagagctcaaatagttcaagatagccaagatgaccaattctgccaggtggcaagcctgatcttgcaattttgattaaaataaagaacattccccaagaacagtttgttgcaaaaaaaaaaaaaaaaaaa

SEQ ID NO: 91 - DNA, 614 bp, Homo sapiens
ggcacgagccaatatccactctacccagctgggcccccagtctacaaccctgcagctcctcctccctatatgccaccacagccctcttacccgggagcctgaggaaccagccatgtctctgctgccccttcagtgatgccaaccttgggagatgccctcatcctgtacctgcatctggtcctgggggtggcaggagtcctccagccaccaggccccagaccaagccaagccctgggccctactggggacagagccccagggaagtggaacaggagctgaactagaactatgaggggttggggggagggcttggaattatgggctatttttactgggggcaagggagggagatgacagcctgggtcacagtgcctgttttcaaatagtccctctgctcccaagatcccagccaggaaaggctggggccctaatgtttgtcccctctgggctggggtggggggagggaggaggttccgtcaggcagctggcagtagccctcctctctggctgccccattggccacatctctggcctgctagattaaagctgtaaagacataaaaaaaaaaaaaaaaaaaaaaaaaaaaaaaaaaaaaaaaaaaaaaaaaaaaaaaa

SEQ ID NO: 92 - DNA, 958 bp, Homo sapiens
gaattcggcacgagtgagattgcatccagacagagttttaaaagtttcccggttgagtttaatgtacagttgaagttgagacatgaatctctgcatgtaggggaaattttgtgtctggttagtcaagaaactatggaaaccaattcttgatattttgaaccattcacgaagatagtttgagtcatgagcatgctgttgtctagagtgggcggggatgactcattggagtggatgcgctgctctgtacttgatttttttgagtctgaaattagctttccaggctggggcagggaggggagcacaggtgggatcagtactgcccccaagcggtggagctgtggtggtggatcaaatactgctgccgcctgtctgcacaaacatatttctctcttccagcccttcagaagtgtattggaatatgtcgwtaacaataatgatggtagtgaagatgatgatgatgtgggtaattctggctaccttattgggtccaagctccccacaattcgttgcacaaagcactctacatacattctctttagtcctgatcaaaccacctttcagagtaggatttagtgtcctattttaaagatgaaggagctcgggctcagagagagatcgtttagacacacacacaactttggaatgaaacatttacagccgggcgcggtggcgcgtgcctgtagtcccagctacttgggaggctgaggctggaggatcgcttgagtccaggagttctgggctgtagtgcgctatgccgatcgggtgtccgcactaagtttggcatcaatatggtgacctcccgggagtggaggaccaccaggttgcctaaggaggggtgaaccggtccaggtyggaatgaaacatttacaaaaattgacatttccttatgcatagatatttcactaggtccttaaaacccacgtgaatctgtgattaaaaaaaaaaaaaaaaaactcga

SEQ ID NO: 93 - DNA, 712 bp, Homo sapiens
  misc_feature (20)..(20): n equals a,t,g, or c
  misc_feature (44)..(44): n equals a,t,g, or c
  misc_feature (56)..(56): n equals a,t,g, or c
  misc_feature (128)..(128): n equals a,t,g, or c
  misc_feature (625)..(625): n equals a,t,g, or c
  misc_feature (692)..(692): n equals a,t,g, or c
  misc_feature (699)..(699): n equals a,t,g, or c
tgttgtttggaattgtggancggattaacaatttcaccacgggnaaccggctttgncccatggattccgccaaggcccgaatttaccccttcactaaaggggaaccaaaagctggagctccaccgcgntggcggccgctctagaactagtggatcccccgggctgcaggattcggcacgaggtttcctgtcagtgctattgagattttattttattaatgtctgcacttagttttacttcctactttctacttttattgagagttaaacctgttgaagtctcaggttcaattcctcaccctgagcaacctaatgttttatgtcttgttcttcctacatttggttattgaaactgaagttttaggttaccagatttgatagaagcacataagactacttactgctttagtctcaattattaattgagaaattatcaattaacaataaggatttctcttatttttccccaagataagttatatatttaaagtgtgttttatagtagaaaggttttagaatatttgggttgctacattaattgaaatggcagctgaagatgtgatttccagccagggatttattaaaaaaaaaaaaaaaaaactcgagggggggccgtacccaatcgncctatagtgagtcgtatacaatcacgggcgtcgttacacgtcggactggaaacctgcgtaccactancgctgcncacaccccttcgc

SEQ ID NO: 94 - DNA, 1106 bp, Homo sapiens
  misc_feature (1017)..(1017): n equals a,t,g, or c
gagcaagctcatttttttttcctatgaggcttttgtaagtcctgacctgtatttactgttaacttcttagcttgggttcatgcacccccagtcagtataactgtggacctcatacccactttggcacaggcttggagtatggatttattacaggtctgtttctttttgtttttctcccatttatggtcctggacagaaggtaagcttccttgcaacttccctggtccggtgggtagagttttcttgtcccctttccagatgttaggttttaaacaatgactgttctttctccatcatgtagaccaaaggccaagttctgtgtccccatgggagattaaaacccaagcccctatgtctaggtccagtgcccactgatttctctaattgtgagtctttctgcttacctagtacctagagtttctcttcccaagttttaaaaatatcagttctaagtaggcctagcgtttctacatatttttagggagaggggaccctttctgtggcagctcagtgttcagcattcctgtaagttagcatgctctgtgtatagcagatatcactagtaatagcatttrgtaagtgatgttcacacatgctgctgtcatgaacactatctcatgttgtgtaacactttcatttttccaagaactttataatcagccgacttgaaactcacagtcgtcccctcagaaaggcagggcaaatgttgttatttccaatttgtcagaagctcagaaagcttattctgttgctgacagtccttgcaagggtcagaatcaggaccggagccccagatgcgctggtgtcactgatgtcccgtgccgggcatgagcccttctgtgcaaggagctccagtgtctcccggacagtgatgatgtgaaaacatttagaaccgacctacacaataaggcagattttcattctgtacccaaaacaggaacacagatttaatgcagagcaaaagggctttaatcaacagatatgttcatttttcacgtagacctattttacaagctnacttgtaagccagaaaatgacattcgagattttcaagtgagaacaaatgatttggtccaataattaaaaaaaaaaaaaaaaaactcgag

SEQ ID NO: 95 - DNA, 1089 bp, Homo sapiens
  misc_feature (353)..(353): n equals a,t,g, or c
  misc_feature (528)..(528): n equals a,t,g, or c
cggcacgagaaacgcggtgcttgctcctcccggagtggccttggcagggtgttggagccctcggtctgccccgtccggtctctggggccaaggctgggtttccctcatgtatggcaagagctctactcgtgcggtgcttcttctccttggcatacagctcacagctctttggcctatagcagctgtggaaatttatacctcccgggtgctggaggctgttaatgggacagatgctcggttaaaatgcactttctccagctttgcccctgtgggtgatgctctaacagtgacctggaattttcgtcctctagacgggggacctgagcagtttgtattctactaccacatagatnccttccaacccatgagtgggcggtttaaagaccgggtgtcttgggatgggaatcctgagcggtacgatgcctccatccttctctggaaactgcagttcgacgacaatgggacatacacctgccaggtgaagaacccacctgatgttgatggggtgataggggacatccggctcancgtcgtgcacactgtacgcttctctgagatccacttcctggctctggccattggctctgcctgtgcactgatgatcataatagtaattgtagtggtcctcttccagcattaccggaaaaagcgatgggccgaaagagctcataaagtggtggagataaaatcaaaagaagaggaaaggctcaaccaagagaaaaaggtctctgtttatttagaagacacagactaacaattttagatggtaaggttcacaaataggttgatttctttcttcagctttctgacatgtccagcccatctctaatgaggactcccagatcatcactttatggctgttaggtgtttcccatatgaaattagaggagctgggtcagggagacaaaagtcttctattagtcttatggatagctcctccttgagtgtattttgtgcaaaagattaagaagctggactctactgccattaaagctgagagaatcctaaggttaaaaaaaaaaaaaaaaaaaaaaaaaaaaaaaaaaaaaaaaaaaaaaaaaaaaaaaaaaaaaaaaaaaaaaaaaaaaa

SEQ ID NO: 96 - DNA, 1254 bp, Homo sapiens
  misc_feature (1036)..(1036): n equals a,t,g, or c
  misc_feature (1069)..(1069): n equals a,t,g, or c
  misc_feature (1100)..(1100): n equals a,t,g, or c
  misc_feature (1165)..(1165): n equals a,t,g, or c
gcgtccggagagctacctagtcaacctgtctctcaatgacaacgatggctccagtggggcttcagaccaggataccctggctcctctgcctggggccaccccctggcccctgctgcccactttctcctaccagtaccctgccccacacccctacagcccgcagcctccaccctaccatgagctttcatcttacacctatggtgggggcagtgccagcagccagcatagtgagggcagccggagcagtgggtcgacacggagtgatgggggggcagggcgcacggggaggcccgaggagcgggcccccgagtccaagtccggcagtggcagtgagtctgagccctccagccgagggggcagccttcggcggggtggggaagcaagtgggactagcgatgggggccctcctccatccagaggctcaactgggggtgcccctaatctccgagcccacccagggctccatccctatggaccgccccctggcatggccctcccctacaaccccatgatggtggtcatgatgcccccacctccacctccagtccctccagcagtgcagcctccgggggcccctccagtcagagacctgggctctgtgcccccagaactgacagccagccgccaaagcttccatggccatgggcaatcccagcgagttctttgtggatgttatgtagcccactgtggggccaggctgggccgggcgctcctggtgtgtgactgggtgtcctggccgtcatgtgcttgctcttacagtgcctgggctcagcctaccagctgctgccatacaggagattgtggccactgtgactctcaccagcagtgcctggttcctcccccttccctcaggggtagacaagggacctttgattatttttagctttgtttttttataagcctttttgggggttaaaatagagtttcttacatttttgggacttttttaataggcatttcctcttttatatgaagaattcccatccattgggccccttttaaccccagaatgtgacctcctcctccagttacccanagccctgccgtttgcagggttgggggtggtcancggtaccccggggttaggcatcctagacagnagcctgaggaagctgggagatttgggccatgtagctgcctttgttactctatttattttagtcanttgtataaaacaccaaataaagcaatagaggcaaaaaaaaaaaaaaaaaaaaaaaaaaaaaaaaaaaaaaaaaaaaaaaaaaaaaaaaa

SEQ ID NO: 97 - DNA, 865 bp, Homo sapiens
  misc_feature (365)..(365): n equals a,t,g, or c
gaattcggcacgagtgccctcgtatctacatgctcacctataccctcacccgacttttccctcctcctcaccccatcaaaggcaataatgcacctgtttttattcatctgggcctttggtcttccccttcatatttcccgagacctcgctttcttctttctcttgtattttttatttttctatctcttatgtgtccttctctaaaagttataaacatgcacaaaatctttccatctcaaaatataataccctttacctggtgtcccctgcaggccatcttctttatttatttacttttgcgccaggtcttcctctgaagcccaggctgggtgcgtacgcgatcatggctcactgcagcctcggantcccgggctcaagcgatcctcctgcttggaggatcagattttttatccttgcagaagtgataatatggcttcttcctcatctcctaaacaccagtcatctgacatacactgcagatctaaaatgggccttacgtgttctgcccttccttgcctacctgttgagcttgcaccgcttctgtgagtctccccccacccacaagagatccttcttccttcgcgctccactaacccgacataaatgtttatcatataaagttttccgttgcactcttgtgtttatgtctcctggcttcttcaccaagctgtgtgacagctgggccctgtcgcctccttcctcgtatatgcagcgactatcgcagagccgcttaatctttgttgaaggcagctgcggttcagccctgagggccacgggacggacgccactcattcagycctaccgggggcgctgtggcagccggcattggttgccgtgccctccgcttgtctcgctcagccctcga

SEQ ID NO: 98 - DNA, 1139 bp, Homo sapiens
acgcgtgggtccggacgcgtgggcggacgcgtgggagcaagcccaggcggcggtggaaaggctggaggacacacctaaacatgtggaatcccaatgccgggcagccagggccaaatccatatccccccaatattgggtgccctggaggttccaatcctgcccacccaccacctattaatccaccctttcccccaggcccctgtcctcctcccccaggagctccccatggcaatccagctttccccccaggtgggccccctcatcctgtgccacagccagggtatccaggatgccaaccgttgggtccctaccctcctccatacccaccgcctgcccctggaatccctcctgtgaatcccttggctcctggcatggttggaccagcagtgatagtagacaagaagatgcagaagaaaatgaagaaagctcataaaaagatgcacaagcaccaaaagcaccacaagtaccacaagcatggcaagcattcctcctcttcctcctcctcttccagcagtgattctgactgaatacaggccctggacccttccctcaagtctcaccagttctgctctcccatcaagcttcagatgccatgttgtactgggggaatgtagcccttgtgctccccaccccctacctscacctgagcctcaccctgctgttgagccctgagtggctaggggaaatgggaagaggattgccatggcctggccatcttgttgctgcttggttagatcatatagctaatgaattaggcaggggagctattttttgaagatgatgaactaaatgttgaagacaagtttgagatctgtaaaatgtgattttttacttccacttataatacttgtgattggggaggtttgtggaaattcaattatgatgaaaaacctatcttttttgtaatgttggcatacttggggaatttagtggcaaatacattccccagcaggccttttgttggttgcactaactgcaaggttgctgggaagtagagtccatttggttgatgagctttgactgcggttttggaaccttacctctcctccttagcccaatatgctgtcttgggtcctattcaaataaagttatttctcctggtcwmaaaaaaacggcacgagcggcacgagctacgtggg

SEQ ID NO: 99 - DNA, 1222 bp, Homo sapiens
  misc_feature (772)..(772): n equals a,t,g, or c
  misc_feature (796)..(796): n equals a,t,g, or c
  misc_feature (823)..(823): n equals a,t,g, or c
  misc_feature (855)..(855): n equals a,t,g, or c
gaattcggcacgagcacatgwktatatatatattactgttttgcctccattgaacatgccttctacttcctaatttgtgccagaattgactagtagacgctatgaatgcatcatgctctttggcccatttcgaacactcaggtatgtctgtactcttagttcatctattcatcattgtttctacagttccctcatgctttaaaaaatatatggcttttataatttatccagctttttcttgtcattttaataagagtatgtgtcttatacaactactacattcatcccagaagtagaagcaaactattataatcccattatttttattcctactattctcttttcagaatttcttttagatattccttggatagttttattcaatcctccatggctttcagcttatcttatgttctatcttttggttcatattctgcattctggataattcttcatcttcactttctagtttgttgatattccttttggtgactataagctgctctttaaaatggtcaataatgcctaagatgtttattatcttgccctttgcagaaaaaaattttcagcttttgctctggaatgattttgcatctcttccaccaaacttccagtgtatcaatggccagaaaataatctatatgttaatttgttaatttgatggttcatggttcaaggctgtataatttaaaagtttgaagtcaaacaacacatgatgggataatcctgatgttacagattctcaagggaaaatatgtttttgttttttctnccaattgttctartatttacaganaaacttcttaattatactgggttggtnaataartatttttcttwactctttcaatctangtccarctatgcatcaccccttcgctgatgagcattaagaaaatccaaatttggcccgggcgcggtggctcacgcttgtaatcccagcactttgggaggccgaggcgggtggatcacgaggtcaggagatcgagaccatcctggctaacacggtgaaaccccgtctctactaaaaatacaaaaaaaaattagctgggcgtgatggcgggcgcctgtagtcccagctactcgggaggctgcggcaggagaatggcgtgaacccgggaggcggagcttgcagtgagccaagattgcgccactgcactcccgcctgggccacagagcgagactccgtctcaaaaaaaaaaaaaaaaaaaaaaaaactcga

SEQ ID NO: 100 - DNA, 367 bp, Homo sapiens
cggcacgagtgtaaatgtcaccaccaaaggtttgcaccctgatcaaaaagagtatgaaaagaataataccacaacacttatggcctgtcttggaggccttctggggattattggtgtgatatgtcttatcagctgcctctctccagaaatgaactgtgatggtggacacagctatgtgaggaattacttacagaaaccaacctttgcattaggtgagctttatcctcctctgataaatctctgggaagcaggaaaagaaaaaagtacatcactgaaagtaaaagcaactgttataggtttaccaacaaatatgtcctaaaaaccaccaaggaaacctactccaaaaatgaaaaaaaaaaaaaaaaaa

SEQ ID NO: 101 - DNA, 875 bp, Homo sapiens
  misc_feature (66)..(66): n equals a,t,g, or c
  misc_feature (872)..(872): n equals a,t,g, or c
ggcacagcgcgaggctgggtcccggcccaggagaaggaagtcgctgaaggcagtggccatgctggncgtggaaatgggaggcggttgcagrgggtctatggggcccggtcctggatactcggcaggaagccgtgtctgcagaggctcctccctgcctcaggtggccccgttcaaccccagccgtgcccatctcctgccaccgcctgtcggtgggggtttaaattcggtgtggctttctggggtgcagctcagcacccccccttatgcagactgggagggggtcgggcagtcccctcagccacgaggaccctggatgggttctagttcacttgggaccgtggggcctggctgcgtactgagtgggtgccccacagtcaaggccaacgggggctccccctgctctgagatgttgggagaaaggcggcttctggaaccttccgtgggacccgtaagtggctgtccagaaaggcgggagggtgggcacggggcacggggggcagctggggtcgtcgttaagggtcacgcatccgtacagttgaatttcctttctcttatcatgttttacccaccttgtcccttttttccccaattgtgcttttgcatttttttccttggcaaatgtaaactcagcctttcattcatgacgtgtgaaatttcagtttctctggagtttgtcagacggcgtgggaaccacgcctgaaactcaggtaataggaggaaaaaaaaaaaacttaaaaaaatttttaaaaaacataaaactactctctacctctgctggsccagcctgtctcgccctggccgcggcagggtggcctgtaacaatttcagttttcgcagaacattcaggtattaaaaggaaaaaaaaaaaaaanggg

SEQ ID NO: 102 - DNA, 1283 bp, Homo sapiens
  misc_feature (1)..(1): n equals a,t,g, or c
ngggcgttccatcgaggcctttgatcgcagcatcgacctgctggtgtcgcgcctgcgccagaagctgggggatgaccccaaggctccgcaattgatcaagacggtacgcggcgaaggctacctgttcgacgcccgggatatcggttgatgcgcgcgcccttcaacacgctgttcgggcgactgttcggcctgttgctggtggcgattgtgctggcccatgtgctggcgttcttctggttccaccactacggcccgccgccaccaccccgcgcggccttcgtcgaacaaccagatggcagcctcacgcccttgcgcaaagcgcctcgcccctggttcggcggcccggtggtgcccctgacatttcaatttatctcgctgatcatcgctgcctggtacggcgccaaactgctgagccggccaatccagcgcctgagcgcagcggccgagcgcctgagcgtcgacctcgacagcccgcccctggtggaaaccggccctcgcgaagcacgccaagcggcctcgaccttcaacctgatgcaaaagcgcatccgcgaacaagtcagccagcgcgcacgcatgctcggcgcggtctcccacgacctgcgcaccccgctctcgcgcctcaagttgcgcctggaacaaatcgaagaccccaagctgcaaggccagatgcgccaggacctggacgacatgatcggcatgctcgatgccaccttgagctacctgcacgaacagcgcaccagcgagacacggcattggctcgatgtacaggcgttggtggaatccctgagtgaaaacgcccaggaccaaggccgcgacgtgcagtttgccggcacctgtacaccgttgcaggtacagccgatggccctgcgttcatgcctgaacaatttgatcgataacgccctgcgctatgccggcaccgcccgggtggaactggccgacagccgcggtgcgttggtaatccgggtgatcgaccacggcccgggaatcgccgccgataagcgcgaagcggtgttcgagccgttctttcgcctggaagggtcgcgcaaccgcaattccggaggggtcggtttggggatgaccattgccagggaggccgtcgagcgactcggcggccacctgagcctggaagatacaccgggcggtgggttgacggcggtgatgtggttgccgagggtttaagcactcccatttacctgacgcgccgcgatccaaatgtgggagctggcttgcctgcgattgcgcagtgtcagtcgatgaagtgttggctggcccaccgctatcgc

SEQ ID NO: 103 - DNA, 2777 bp, Homo sapiens
ggcacgaggggacatgtctgggcacaaggaaaggcaagcaatggaggcagcaagagcccttggcagcaagtttccatcacctttgcctgccagtgtgtgagaggcgcagaggggcagtgagcaggtgacatgcagcttccagatacccacacactgcttttctcccgcccagctcccaccccagttaattgagatgggattgtttctctttctggtttcttcctaagcccctctctcatattcctggtgtgcttatggcctggcacaccttgtgaaacagaaacccaagctcctcatttcggagctgggatttcgattggctatctgcctccctaaccaagctgtcccttccacctcatccctagagtcaccctctggtctcatcaacatccagtgggcatttcagtggcccaggatccttcaaattgcagatataaagcatcaggaccccacacctgggatggaagcttctaggaattaatgaagccccagtagaggtgagggtaaacctaaaacgggctggatagggcctctcccaaggccctatggaaaggtgatgggaaactgggggctgaggcctcatcctaggagacccctggagggacccacttaccctagataggcagcggaggccagaaactggaaaacagccactcattgtcggtgcattaccgtgagcaccacctgtagggactctgttggcctccagccgtcgtcacacgttcctgacaaccacaaaagttcatttgagggtgcccagtcagctgactttgcttccaccaggaatacccacctggccctggtccttctgctgagctacaggaggcattcccagggtcttagcaaaaacaacccctcaaataggcccagtgcctacaactctagagaggtttcagatggtattggagacccagagaagttaactgactttcccaaaagtcacccactgtaaatggcagacagatctcaaacccacatctgagcctgagtccagtgttttttctctagtatcatcattgtcccttaaatgtgtttgacacatcatagtttacaaatcaccttcactcatattctctcactactcatcagtcatgaattcagccaatgagaagggctcagagaggttaactaaccagccacgctgtttacatggggcatagactgcttcatgaacgcttgactgcagctttgccttcctcatgccctcaaaaaggaaggagctgaccaaagcttactataccatagctggggtctgggacccccagccaggtctcacagatgatctgggaatggcctccctgttgctctcaggggtccggcagtcacacagaagagtcaggttgaaatcttggcaagactttggtgtggctttgggaactgggtttaacctcttggggacttcaccaagacagtggcaaaggacaccacctacagcttccagtgcctctctactctcccacctgtgctcctggggttgaatgagaccagaagcagctgggacaagatttggaaagataaagagagccaggagacaagaccttgagagaagcagaggtctggctggctgctgccctctggtggtgacaatggtgacactgtaaacccctctgtcaaggtgacactctcccctgactattcaggagggagaagcaatcgccccaggacagagacggggacatcccaggagcagggtacaggctctagcaatatccatcttgcggtactccctccctcacaacaaccagaccacacatgtgttaaatccttctgcagggatggaatgcggctctcagttttttccaagaacttctaatctaggaattaggagaggtggtcaaagctgaatgaagcagtgggcaaagagagggtgagggatgggagagaagacaggtcaaggaggaggtgggagagaaggggagggttgcatgagggacaaggaaatggcatgggttggagctgtccccagtccctatctggagggacttccaaccttccagattcccagctgatatcacatgtccaacctcagccaggcgatttataagagaaaggtcagggatgccactccccttgtaaaagcaaacatgcagcatctggagaagcaaggggtagatacaaagattccaaggggtcaccaacagctacccagagaccagctttcatcctatagagaagggtctcattactttgcccttccttccttccttcctctctccttccttccttccttccttccttccttccttccttcctccttccttccttccttccttccttttttctattctattgatcattaattatggtcaaaacttctcattttttcagccaggcagggtggcttaagcctgtaatcccaacactttgggaggcgaggcaggcagatcacttaagtctaggagtttgagaccagactgggtgacatggcaaaaccctgtctctttaaaaacaaaaattaaggccgggcgtggtggctcatgcctgtaatcccagcactttgggaggccgaggcaggcgaatcacgaggtcagaagatcgagaccatcctggctaacatggtgaaaccctgtctctactaaaaatacaaaaaattagctgggtgtggtggcgggcgcctgtagtcccagctactcgggaggctgaggcaggagaatggcgtgaacccgggaggcggaacttgcagtgagccgagattgcgccattgcattccagcctgggcgacagcgagactccgtctcaaaaaaaaaaaaaaaaaaaaaaaaaaaaaaaaaaaaaaa

SEQ ID NO: 104 - DNA, 710 bp, Homo sapiens
ggcacgagctgggcctccaggttcttcacctgtcacatgatcattttacatattgtggtctgtttatttaccatcagcatcatagaagagcaaaaagaagaaatactgtgctccactaaaagccaggctgagaaaacagttactcacattgagcagtgagtgaccactaggtgggcatttgttcatagctgcatggagaacaagtgcccatatacatctttctgctgatgcagcctctaaattttgaatgcatcagttttttaaactgcattgagcaatattccgtgggtgtgatccataatagcgtaactatttacgcctgtgacagagaggaaaactgtatggatatcagatatctttaagagctttttaatctttaatcaagttagtacttcttaaggatgattaaggccaggcagtggctcacacctgtaatcccagcattttgggaggccaagatgggtggatcccttaaggtcaagagttcaaggccatcctggccaacatggtgaaaccccatctctactaaaaatacaaaaattagctggggtgtggtggcaggcgcctgtaaccccagctactcaagaggctgagacaagagaatcgcttgaagccaggagttggagattgcagtgagccaagatcatgccacttcactccagcctggacagcagagtgggacttcttcttaaaaaaaaaaaaaaaaaaaa

SEQ ID NO: 105 - DNA, 1540 bp, Homo sapiens
  misc_feature (651)..(651): n equals a,t,g, or c
  misc_feature (1124)..(1124): n equals a,t,g, or c
agaattcggcacgagggcatattactttcctaggactgccacaacaaactattaccaactagcggcttaaaacaacaagagcttattcctcacagttctggaggccagaagtccaaaaccaaggtgtcaggaaggtcatgctctctccaaagtctccaaggatgctccttccttgcctcctccagcctctggtcgtggccaacatcccgagggttccttggcttgcagatgaatcacttaatcccacccccatcatcacatggcagtccccctgtgtagctcagctctgtccaaatttcccctttcctacaaggacattagtcactggattatgacacagctcatcttaactggattatatctgcaaagaccctgttatatctgcaaagacgagttaacattcacatgttccaggggagatatgaattttaaggggacagtattggacccagtataggagggcaggcagcagcgagggagccagggagggctggcctgacttgagcctgtttgaaaagcatcatcctcctaccaagactgggggctgctggttctgacaaggtttgcaggatcagctgggatgatgggttscamccaytccttcgagytacgttggacccctgggcccacttacagcaaggagcttgcccntycgtgtagctctycgtcagtgtgggaaaatctgartgagccagagaagggtgagattccccctgcagagcaggcagtactgagcaaatccaggatccagaactccagttctaatcctggctcttgcctgctttcctgtgtgaccctggggaagtggttttccctctctgagactctccttccccatgtgagtcacaagggctgggcctagctgacccccaaggcccttacatgagtggatagttgcattttaaacctggtgctccccaggataagggagtcaaccccaaggagactggggtttctcctgagcctggcccctggggatgagcactcactgtggaaaaagctggccacttcttagcccttgtcatgggcagaaaacatgcccctccagccccaccagcaccaacacacagccaagctcactgtttcatttttagagagaaatcagggctttcggtgcagctgantgacacagacaaggggcggggggacatgaaagggagcgggcaaggacggaaattacacttctcctagcaacctggttctgcagctcctaggcctggggccgcgtgatacatgccattcccaattaacgggatgttaaatataccccggctcagcctgccccatgctgagccccgcctggggcagtgcagggagccatgtgatggtgtagagcactctgcaacaccccatattcatgttcccactcctagggccccgctcggtccccaggaggccagagcggtcctgccctctgcctgagcatggctcagctccagcctccacttgccctcccctatgctggccagctcgggggtctgcaggcagcctgtggggcagggccagttggccaaactctccaagccagaagcccctcgag

SEQ ID NO: 106 - DNA, 1428 bp, Homo sapiens
agcagggtttgagcctcctggagacattgaatttgaggattacactcagccaatgaagcgcactgtgtcagataacagcctttcaaattccagaggagaaggcaaaccagacctcaaatttggtggcaaatccaaaggaaagttatggccgttcatcaaaaaaaataaggtactgatggttggcgtgaaatgagttttctaaggtgtggagattttgacttgatcttttagtcttagaaaaactaagatcctaaacctgtagtttcagaatgcaaaagaagaagctagtgtgctaccttatgttgagacagtatttctttttggtggtggtatctttgccatggccctgtgtcttatttcagatgcattatcctcgtaccgtgactcccacactaacagagtactgacctctccaccgtttcgcctcatgcctttccctccttcctctcctagactgctggttaccttggctgggagagaggatgtagtgggacattcctgtaacactttatccgcacatctactggaaatcgttaccatgttaataacttggttttgaattcatgttaacatgtgtacccatgaacatttttcattttcttttcatagtgcgatacataggtgcatgacagcattaacctggggacgtagaatatgatcaaggcagcattactgctttaactttagaatgacttactatttattaatttaaacagactgctgtttccacaaccttagcattgaaggtctttcattttctcccatcaagctatgttagtttaggtaatgtagaaatatttaccctctggcttaagctggtttagagtaactaactagagctatagtttgcatgggaaagtctgcacgagcttcttgtcagatatttcttgctcttctgtcgcattacttactaaacctcccaactctcatcatattcttcatttaaccacctcctacatgttttcttttggaccatggcctaaaatttaattgtttgtgttttacttgcgttggatttcaaatattatttgatgcttatttttgttttgtgtcttcttgtttctgatttttactctgtcacggctccatctcttacatgtagcttatgtcccttttaacatccccccatcagcctccccctccccctcctgcctctgcctcaccctctgctgttcccaacggcccccagtctcccaagcagcaaaaggaacccctctcccaccgcttcaacgagttcatgacctccaaacccaaaatccactgcttcaggagcctaaagcgtggggtaagttctgctccggaatcctgtctctctggcgtgctttggttgcatgtttggttctgcataactaattttgtttgtgaatgaatccattgtgttttcccataacatataaaaaagttaaaaaaaaaaaaaaaaaactcgag

SEQ ID NO: 107 - DNA, 3061 bp, Homo sapiens
  misc_feature (2755)..(2755): n equals a,t,g, or c
  misc_feature (2849)..(2849): n equals a,t,g, or c
  misc_feature (2919)..(2919): n equals a,t,g, or c
  misc_feature (2983)..(2983): n equals a,t,g, or c
  misc_feature (2987)..(2987): n equals a,t,g, or c
  misc_feature (2998)..(2998): n equals a,t,g, or c
  misc_feature (3027)..(3027): n equals a,t,g, or c
gtgtgggggccaccttcggtggcggccgctctagaactagtggatcccccgggctgcagggaattcggcacgagcaacattgaagaccgggacgagcttgcctaccacatcagcatcatgttctatataataggaggtgtggccactctcctcctcatccttgtcatcattgtgttcaaggagaaacctaaatatccccccagcagggcccaatccctgagctatgccttgacctctcctgatgcctcatacttaggttccatcgcccggctcttcaaaaatctcaactttgtgctgcttgtcatcacctatggtctgaatgctggtgctttttatgccttgtccactcttctgaatcgcatggtgatctggcactacccgggggaagaagtgaatgctggaagaattggcctgacgatcgtcattgcaggaatgcttggggctgtgatctcaggaatctggctggataggtccaaaacctacaaagagacaaccctggtagtctatatcatgacactggtgggcatggtggtgtacacgtttaccttgaacctgggacacctgtgggtagtgttcatcactgctggcacaatgggcttctttatgactggctatctcccactgggatttgagtttgctgtggagctcacgtacccagaatcagaaggcatctcctccggcctcctcaacatatctgcacaggtatttgggatcatctttaccatctcccagggccagattattgacaactatggaaccaagcctgggaacatcttcctgtgtgtgttccttactcttggagcagccctcactgcattcattaaggcagatctccggagacagaaagcaaacaaagaaactcttgagaacaaactccaagaggaggaggaggagagcaacaccagcaaagtgcccactgctgtgtcagaggatcatctctgagaggaaggtggtgacaactcagggaacacgaacaccccaccttttccttcagcacagctctcaccgccagcacaaagggcttcgctagagatgtttttggagggaatcagtgggactatttgtggcatggatggcctattcctcctagaacccacgtaagagcttggatgatttagttggagaaaattgcacctatcaccaaatgcaaatttgattcccacctccacccccttttaggttatgggagttggtgttgggacagggtggcagagaatattggagtcaatcctagcttggtctcttgccttccctcttttcctccatccatcgtggacaatgcctgcaaaattttcacaggaagaaagcctattcaggatattaacttgaaatttccagtgtcctaagagcctctcatgaagcccagttctaataagtggcaagctgctctgccggggtcatctcctgggtcatcggactgattgctcaagttctgcaggagaggaagcaccattagaacaactccatcagaacagctccaccgggacttgtgggcctaaattttcctggcctaacgggtctgtctccaaaccctctttcctaagagctgagcaaaccaaccataataaacttgacaaaagactttgttgtggccatgacagagataccgactcaggagggctacctacctaggtgtgatcatgctgggggctaccttctgagtatatttgtgaaagcacatatttgggaactctggtagcttgagttgggaatgggaaggttcttttttacagaagtacttccccagggacttctgtgtgtcacagtcacctctgatgcctttatcttgatgttgcattgggaatctcagccatcagcccaagtgcttgttttattccaaggcagggtaatccccgtcaacttactctaacctttgctgaaaactaatcttgattcattctactctgaaaatccaaaggtgcttctgagagataagagggaaggggtagaaggaaaggtgccccttgaaatgggaattgagcctgttagaattaaaagcttatctcacctctgctggggacagtatttgcaccaccaacccctctcctcacctgctttgagcgataatctttatcagatattctaaacttaaagggattccctttaaaccaactcaagctgatctttcctatctagcctgctgtttggctgtactcatgggctttggtaatatctcctaaaaatgaggttttggtaatttttcctatgcattgggcaactgtgatcgtgaccactgtgctgtcttgctccagccactgccctggcctcagcatatcagggcagcctgtgctggctgcaatactgtggtgcttgggccactgcctgagaggagccaggtttgtgtgtgtctgcatgtgtgtgtgtgtgtgtttgtacagattcaagcaatggatgcaaggaacatgctgtatgtaatagaagaaagaagtccacgttttcggcagaagtagtgagtcagtgtggaagagaggtgagggtgtgctttactttttgataaagagaaagatgtttactcataaacccttcaaaaggtattaacaaaatgtttaccaaacctattgctttattttaaaaacataatttgtgttttctatttgtaagatctgacatttcgaggcaataaaaacttctcagaaaaaaaaaaaaaaaaaaaaactcgagggggggcccggtacccaattcgccctatagtgagtcgtattacaattcactggccgtcgttttacaacgtcgtgactgggaaaaccctggcgtnacccaacttaatcgccttgcagcacatccccctttcgccagctggcgtaatagcgaagaggcccgcaccgatcgcccttcccaacagttgcgcngcctgaatgggcgaatggcaaattgtaagcgttaatattttggttaaaattcgcgttaaatttttgtttnaatcagctcattttttaaccaataggccgaaatcggcaaaatcccttattaatcaaaagaatanaccnaaatagggttnaatgttgttccatttggaacaagagtccnctattaaagacgtggactccacgtcaaagggcga

SEQ ID NO: 108 - DNA, 1691 bp, Homo sapiens
cccacgcgtccgcgcacctccagctcgggccgatgtggaagctttggagagctgaagagggcgcggcggcgctcggcggcgcgctcttcctgctgctcttcgcgctaggggtccgccagctgctgaagcagaggcggccgatgggcttccccccggggccgccggggctgccatttatcggcaacatctattccctggcagcctcatccgagcttccccatgtctacatgagaaagcagagccaggtgtacggagaggtacagccccgacgggccccgggcagggagggccgccaggctggcccgggctggccagggccttcctggttggacttatggccgcccctgggccgactagtcgggacctctccgtgtgccggctgccctttgagggacacccgcttcccgggtctggaagggagaagtcctcgacgccgtgcccccttgcagggggagccccgcccctgccggtgacccactccgggccgaggctccgaggcgatccagtcctgattttcccgctaccgctcgagctcttgctcctgcgcctgcgccgtttggctcgccagccgcgccgccacttcaggtccagggtggacgcatgccctcaggtgcgggcgtcttgcgagtcggcctcgcagctctgtggaagctgcacgcggcttgtcggaaaatcaaggcgttctgagttctagatggttaatagcaggttcttcggtgtctgcagtcgacgaacgactggtgtaggcgtttgctgtgagaatggagaatgcaggggaacgcccctgactgagaagcgggccctgggaaacgattgtgaacgcgtgaatgaattgatgactaaaatccgctgcgggggtcctacagcgcagatggtaatgccgttctgactggctgggaacggcaccttagcagatacttaaaaggcgccttctgtgtgccactgtcactgccaacttggtgactcatttaaaactcataaccagccggtgaggtcggtacttcgctcctcctcattctgcggaggggaaagcagcacggaaatgccctgtgactggcagcggaaaaggcgaccaccgcttgtgtgtgggtgtcccgacgtccggagggggcaggagtttccacgggtcctgggacagagctcacctgttttgttttgaattacacttatttatatgcaactacaggcctgacgctagcggtgaagaaggcagatacagccttttaaggagttggcagatgagtgggagagagaaaactaatctcattatcggccacaggctgtggtcagtgttttgaaggaaaagtacagggatgtttggcaactgtggtatttcaggtttgaccttaaatccttacttaaaccagtttttacaaggattggtctaggtgcccgggcgcggtggctcacgcctataatcccagcactttgggaggccgaggcgggcggatcacgaaatcaggagatcgagaccgtcgtggctaacacggtgaaaccccatctctactaaaagaatacaaaaaattggccgggcgtggtggcgggcacctgtggtcccagctattcgggaggctggggcaggagagtggcgtgaacccgggaggcggagctttcagtgagccgagatcgcgccactgcactccagcctgggcaacagagccagactccgtctcaaaaaaaaaaaaaaaaaa

SEQ ID NO: 109 - DNA, 1421 bp, Homo sapiens
ggcagagggagcggagagcgtgctaaccaatgacttgagggagtagggggccgggtttgggccctcagttgctaagggctacccgagtgggaagcggttcaagagatggggtgaagggtggttcaccggttcttcaagtcctcagccttctggcccgmggaagttaagcaaccaagaggcgggcctaagaccggaagcaggaaggagggcgcaggaagcagggcgccgcagcctgtcgtacggtccttctgtgggtctgtcggtgccgagggcaggatggagaagctgcggctcctgggcctccgctaccaggagtacgtgactcgtcacccggccgccacggcccagctggagacagcagtgcggggcttcagttacctgctggcaggtcgattcgccgattcgcacgagctgtcagagctggtgtactctgcctctaacctgcttgtgctgctcaatgacgggatcctacggaaggagcttcggaaaaagttgcctgtgtcgctgtcccagcagaagctgctgacatggctgagcgtgctggagtgcgtggaggtgttcatggagatgggagctgccaaggtgtggggtgaagtgggccgctggcttgtcatcgccctcatccagctggccaaggctgtactgcggatgctcctgctgctctggttcaaggctggcctccagacttcaccccctatcgttccactggacagagagaccaggcacagcccccggatggtgaccacagccywggyaaccatgagcagtcctacgtggggaagcggtcaaaccgggtggtgcgaaccctccagaacacgccgtccctgcactccaggcactggggagctccccagcagcgggagggacggcagcagcagcatcacgaggagctgagtgcgacccccacccccctggggcttgcaggagaccatcgcagagtttttgtacattgcccggccgctgctgcacttgctcagcctgggcctktggggtcarargtcgtggaaaccctggctcttggctggtgttgtggacgtgaccagcctgagcctcctgagtgacagaaagggcctgacccggarggagcggcgggagctgcggcgccggamcatcctgctgctctactacctgctgcgctctcctttctacgaccgcttctccgaggccaggatcctcttcctgctccagttgctggccgaccacgtccctggcgttggcctggtcacaaggccgctcatggattacttgcccacctggcagaaaatctacttctacagttggggctgacagactcccggaaggagggtgtggggaggggtgggcagggagcccctcttccctaataaaactgactccggcagcaaaaaaaaaaaaaaaaaaaaaaaaaaaaaaaaaaaaaaaaaaaaaaaaaaagggcggcc

SEQ ID NO: 110 - DNA, 1489 bp, Homo sapiens
  misc_feature (7)..(7): n equals a,t,g, or c
  misc_feature (345)..(345): n equals a,t,g, or c
  misc_feature (549)..(549): n equals a,t,g, or c
  misc_feature (1408)..(1408): n equals a,t,g, or c
  misc_feature (1477)..(1477): n equals a,t,g, or c
  misc_feature (1488)..(1488): n equals a,t,g, or c
ggagganaggatgatgatgaaggaccgtacacaccattcgacaccccctcgggtaaactggaaacagtgaaatgggcgttcacctggccgctgagtttcgtcttatacttcactgtacccaactgcaacaagccgcgctgggagaaatggttcatggtgacgtttgcttcctccacgctgtggatcgcagccttctcctacatgatggtgtggatggtcacaatcattggttacaccctggggattcctgacgtcatcatggggatcaccttcctggctgctgggaccagcgtgcctgactgcatggccagcctcattgtggccagacaarggatgggggacatngctgtgtcaaactccattgggagcaacgtgtttgacatcctgattggcctcggtctcccctgggctctgcagaccctggctgtggattacggatcctacatccggctgaatagcagggggctgatctactccgtaggcttgctcctggcctctgtttttgtcacggtgttcggcgtccacctgaacaagtggcagctggacaanaagctgggctgtgggtgcctcctcctgtatggtgtgttcctgtgcttctccatcatgactgagttcaacgtgttcacctttgtgaacctgcccatgtgcggggaccactgaaccgccgggtgcccacagargctcagctccttcttttctgtgcaatacgaracccggccgcacccgartcacacaggcccctggggccacggcgttcgtctctcctgtgctgtcctcaggcctccgctcctgttttggtggcccargctctcccctgccccatcctcgctcccccacctccttgggtcatgcccacccaccctttcctgcctcctccgtgtkaagacatccaacatccacgtgacttttccagctccatttttgaacagtgactgagattctagaaaaacccggctgctaactggcctgagccaggcaacactgattccaatccctyytccttttttaagttatttgatggaagactcacctaatttgtgacctgagactgttgaagaaatagagaggagggggcccgttgattacagagagcatttgggattttgtttggtttggagatgatgcctaggttactgggtttggggggattgttttcttttgggggccttccccttttactccttttcttccagagatcaagagcttctcttgcatcttcttccactgggctctggattaatcaattacccaaaggctgcacctgccgtgttgtctgggcttgcatcccagatgtgttggagtatgcatggatgtagtgctttttagaggagccactgggcaaggccaccaagaacaaatgcatgacattttatagccaaggacgcctcactaaagtcttatgggcgtnccctggggttgggggggcacaaggttttggaggaagaagacaacttcctcattccatcatcaccatctntttctcactang

SEQ ID NO: 111 - DNA, 4463 bp, Homo sapiens
  misc_feature (3308)..(3308): n equals a,t,g, or c
  misc_feature (3469)..(3469): n equals a,t,g, or c
  misc_feature (4119)..(4119): n equals a,t,g, or c
cagcaatgaaatcctgctttcttttcctcagaactactatattcagtggctaaatggctccctgattcatggtttgtggaatcttgcttcccttttttccaacctttgyttatttgtattgatgccctttgcctttttctttctggaatcagaaggctttgctggcctgaaaaagggaatccgagcccgcattttagagactttggtcatgcttcttcttcttgcgttactcattcttgggatagtgtgggtagcttcagcactcattgacaacgatgccgcaagcatggaatctttatatgatctctgggagttctatctaccctatttatattcctgtatatcattgatgggatgtttgttacttctcttgtgtacaccagttggcctttctcgtatgttcacagtgatgggtcagttgctagtgaagccaacaattcttgaagacctggatgaacaaatttatatcattaccttagaggaagaagcactccagagacgactaaatgggctgtcttcatcggtggaatacaacataatggagttggaacaagaacttgaaaatgtaaagactcttaagacaaaattagatccttggagttctttttctgtgcttcagtctcctgtctggcactttgctgcacagactccagctgacatagtctccccagattcccatttcatgctctcaactcaagggatgagctgggctcagcttgtgttcctccttcctgcatcacggcctggaaactctcaagacaagaggcgaaaaaaggcttcagcatgggaaagaaatttggtgtatcccgctgttatggttctccttcttattgagacatccatctcggtcctcttggtggcttgtaatattctttgcctattggttgatgaaacagcaatgccaaaaggaacaagggggcctggaataggaaatgcctctctttctacgtttggttttgtgggagctgcgcttgaaatcattttgattttctatcttatggtgtcctctgttgtcggcttctatagccttcgattttttggaaactttactcccaagaaagatgacacaactatgacaaagatcattggaaattgtgtgtccatcttggttttgagctctgctctgcctgtgatgtcgagaacactggggcttcataaacttcacttaccaaatacttcaagggattcagaaacagccaagccttctgtaaatgggcatcagaaagcactgtgagacgcacagacggcgtcttctgccaccaagagaccgagaactccagattcacgacattcctgtcccatgtagaagcatttccattcawccgtggsccctcttcagaacctagacctatcagtgccatttttttttcataatctacgaagaacttggctatggctgatcttttttaaatttaactttctgatggaccctgtagtttccagttaagtgcagattccttacagacatatagaacagcgcattcttctgtagacatttgctcatgttggtaaatacaatcacccatatgaaaaaattgttttcacctgatatgaaaatgttagaaaaggcaaactccgggacttctaaagatttacttaaatcccattatgtactttattcagaatgtagaagctgacttgaaaggcatccttggtactaagtgaagcttattcagaaaatgcatttttcaaatgcaatggcaactgcttgtagatatcatttttgcagtgtatgttggagctgtaatggttgcaattatgtttcttatttccttaaaagcaaaaagcgtagtttctgatttatgttatagaatgatactgattagactttgagccaaggggaaaatactaaattcttttaaacctggagccttagagagccacaggaatatcttctgttgtacagtctaataagctgtggtaggaagtatcatgtaatcacagtttaatgacagtttatgtatatatataattcagtattccctctgataacatagttgccagtgtttaatacacttgtaacttggatttttaccttataggctatatgtatactcagttttttaaagcatttttttcagagatcacttaattccccatgcttctgcaatgcatataaaaactataaatgccgagtggtagaaactcctctttcttcatagtcctcaggctttggttacatttgcatatgccatttgaagcctccagcttttaccagtttaacatccaaagttcacagcatcagcattcatggtgtaagaacagttttgcagtataacacgatctgataatcattcagttattaaattgtaaataattattgggatggtttcttggctttaagtccactgaataaaaactatgaaattgcactctgtgtcaaccatccactaggatagaataccgaaatctgtgcatgcaaaaataggagatgggcccatttgcacacaattcgtagttatgcagtctgctatataaatatgttcacatgcactgtgtgtatgaaaatagatggtctgtgttcagacaaaagtaaaacatttttttcaaattgttacatttaaaggttttctgggagaaatttatgaaacgcaggctgtgtctatttgacatcagaaatttccactttaaaccaaaataataagaaactttaatctgtatatttacaacctttgttgagtacacttcccccttatttatacgtctgcatttccttccgagcttcacatctttctaaaatgcagcttggttttaaaataaaagaacattcattttgtgattctaaacaagcttcagtaaataccaccagtatagtactggtgaatttctcagcataaaatcgacatacctaaaaagttaataaaattcagctcttttccaatttcattgttatgcctattgaagtattaattgccaggtttgatttttagtgaagcttggagtccatactttgagcagaccaagtgaagggaagaacagaaagaaactcaggagtagagtaatatcacttctgcacttacaccactttcaggcacatccaaagagttcctagatacttggaaaatgtctgaaaatttttaagtaaaatactaaacttttcagtgtttagctcaactttttgttcatttggaagtttctctccatccgaggacttaagccagttttggatttgtaagccctgagtacaatacacttcctggaggcatcctcactgctgttgaagcaaaggatatgcatggggtggaaggacggcttcgaacctgggactcatatgccttgagaacaaatagattgttacagccttgggntgctgcgtaatcacggttcctcgaggctcttcctgagcacatgcccaagcatctgcctctggagagactgactccaaatgcaggtgcttccattggagctaggtcggaggctgctttatatgacgaactcccagaaatggatgcccagaatacggaggccnaaacgttctgagcycctggtaaggacagtcgctctgggggtcctcattttacctgcagttcctgcacgcccagtgaaagagaggagatagaccctggaaggcagagctgcagatgctcatcatcaggtcaattctggagctacagttttgtttctgactggatagggatgcaccagtgactgtcacatcaagcagtccttttattctctctcctttagtatcgattttaaagggcattaggcactatggttccagagtttcttggggaaaacttgcagattcttattaattggttctgcaatacttaaataaattattttacaattataagttttcagattataacatttgtattaatttttactgattttccaagatacttcttagatttactatttacgtagctttatgtacattctctgtaaaaatagacctctaaatatgaggctttacatgaaatttgtacacacatacacactaatgttagctccttaaattgctgcactaaggtgctggttagtagagatggacggagcctctcgcgttttgctctcagatgtgttaaaggcgcacgtgtacctgctctcagcggcagtgcggcctccccatctgctgggtgcccatggccctccctgcagcctcagtgatgnacctcgtctgccmrgggacacaggttttcatcatttacaggstcttatgtgctagttttgttggtagcacgttatttaatgcataaaggcagaattcttacaagtttttttttttaatgtgaacatagatgcagcaccgactttttaaacttgaaaaaactggtataatgttaacttttaaaaataacatttggacacactagtaattgatttttgtttacagattgttttgtttacaaattgttagtctttgtttctatgagatacttttagtgtgactttttaaatgtcttagaaattaaaagttgtacaaaaagtgatttcaaaaaaaaaaaaaaaaaaaa

SEQ ID NO: 112 - DNA, 1477 bp, Homo sapiens
  misc_feature (7)..(7): n equals a,t,g, or c
tgcaggnaccggtccggaattcccgggatcaaacagtactgttgcacgtcgaattaaggatctagctgctgacattgaagaagagcttgtttgtagactgaaaatttgcgatgggttttcactgcaactagatgaatcagctgatgtttcaggacttgctgtgctgcttgtgtttgttcgttataggtttaataagtctattgaggaagacctactcctgtgtgaatctttgcaaagtaatgctaccggtgaagaaatattcaactgtatcaacagttttatgcagaaacatgaaattgaatgggaaaaatgtgttgatgtttgtagtgatgcttctagggcagtggatgggaaaattgccgaagctgtcaccttaataaaatatgtggctcccgaaagcaccagtagtcactgcctattatacagacatgcactggcagttaaaataatgcctacatctctaaaaaatgtgctagaccaggcagtacaaatcatcaattatattaaagctcgaccacatcaatccagactattaaaaattttatgtgaggaaatgggtgctcagcacacagcacttcttctaaatacagaggtgaggtggctttctcgaggtaaagttcttgtaagactttttgaacttcgtcgtgaacttttggttttcatggattctgcttttcgactatctgattgtttaacaaattcatcttggctgctaagacttgcatatcttgcagatatttttactaaattaaatgaagttaatttgtcaatgcaaggaaaaaatgtgaccgtttttacagtatttgataaaatgtcgtcattgttaagaaaattggaattttgggcctcatctgtagaagaagaaaactttgattgttttcctacactcagtgattttttgactgaaattaattctacagttgataaagatatttgcagtgccattgtgcagcacctaaggggtttgcgcgctactctgttaaaatactttcctgtaacaaatgacaataatgcttgggttagaaatccatttacagttactgttaaaccagcttcattagtagcacgggactatgagagcctgattgatttaacatctgattctcaagtgaagcaaaattttagtgaactttcactaaatgatttttggagtagcctaattcaggaatacccaagcattgcaaggcgtgcagtgcgtgtacttcttccttttgctacaatgcacctgtgtgaaacggggttttcatattacgctgcaacaaaaacaaaatataggaaaagacttgatgctgcacctcatatgcgaatccgacttagcaatattacacctaatattaagcggatatgtgataaaaagacacaaaaacactgttctcattaaaattggaggagtttgcatgtctcatgataaccaaatgtaagatgaaaataaaagatgatttacttcaaaaaaaaaaaaaaaaaaaagggcggccgc

SEQ ID NO: 113 - DNA, 1984 bp, Homo sapiens
ccacgcgtccgcttgaatctatatttctaaccacagtgacttcagtaaaaataccgtataatgaacatttcagcttcttcttacttactcgagagtttattgcaaatcttaaggattttattataaagattttttttttagtttggtagcacattttgtaccaaaaatgtcaaacactgtgctgtaagaatatccatgtttgtagaaatgtccacttttcagataatataatgcctaccattatactaacagaatcatatggtagttgatttatttttttatttattatgtatatttttggtattgtgggttcttgaggcaatgataaaacacttaatgtattctgacatgagtgctctaatagcctccttctcctcatttttaaactgcatacattactttcaaaataggtatagatattctgtcccgccttttgagctattagcctgttcctgtttccctttgtcacctaagcaaggctttttctgagaaggtagtgaatggtttcaaatgttgcatactataagaataatcattgggtaactgttgtttagaccaacacttagaaatactatatttgtgccttttcatttttaattttaatgtgtgttgatatttggagcacaaataatgaaggtgccataatatggcttgccaatgttacctccttgaatagtcatgtgtcattgtcttgaattggtaattggagaaccttgcatgaaatatgtgatcgtgtgtgtgtgtgtgtatgcgcgtgtgtgtctgtgtgtttgtgtacatacctgtatttgcttggggcttgtgtgtggtatgttacaaagagtgaatttctggaaatagaaatcagttaaatgttgaaagttcaggttagcagaaatatttcatttaaatatgctttactttggaggacaattgattaacagaggaaatgataattttcaaaaatgtgatcaatttactgcatgatgaaatgtgaaaacagtgcctttttaggacatcaattatgataaaattgttttaaaatattaacaaagatctcaaaaagttgtcatgaacattattcatttatttttaaactggatctaaataagagcttagatggccaaaattagaattaataatatacccatttaaattttgttcataaatttaaaatcttaatcagaattctttataaaatgtgggtcatagatatgacccagtgttactaaaatagaacagggattgtgaaaatccagctcaacatacttaagtatacttggcttagagccaagtatacttgaagaggtgaattattctgacttggacatgcatgctctttgatggataaaataaaaatattcaatttattcttacaaaagaaggtgggtgggtgagtgggttcgttttagtgttctcagattataaagacagctataaagacagcactttccgcacacaaagtgtattttacaaaccttttttatacaaattaatgagctctactttatttaagtgttcatggaatgatgtaaattttaggtccagttgaacaaatattgagtgcctatcatatgcaagactaactccttactaggaatgaaatcacacagtgtcttctgtttgcagtatgtgaactttatgtttgaaaagaaattattatatttaaatttttttgttgtcagagtttatcattgtatactgtaacccagtaaattttgcattcagttttaaaaaatgaagatgtaacttacctgagtctcatttttgaaaatgaaattctgcaaaaattatttaaaaattagttcttggggaaattgattttcaagattcaagtgtataaaaacttatattgaacttttcagcctcgtttttaattagctgatgttaatgataagatacataatacatgtatcttgttgctgaaaatattttttgcatttcaacacattgagttaaaataaagttgttactacttattcaagattaaaaaaaaaaaaaaaaa

SEQ ID NO: 114 - DNA, 1513 bp, Homo sapiens
  misc_feature (1463)..(1463): n equals a,t,g, or c
  misc_feature (1490)..(1490): n equals a,t,g, or c
  misc_feature (1503)..(1503): n equals a,t,g, or c
gggcctcagggaccccattccccgagagacggcaccatgacccagggaaagctctccgtggctaacaaggcccctgggaccgaggggcagcagcaggtgcatggcgagaagaaggaggctccagcagtgccctcagccccaccctcctatgaggaagccacctctggggaggggatgaaggcaggggccttccccccagcccccacagcggtgcctctccaccctagctgggcctatgtggaccccagcagcagctccagctatgacaacggtttccccaccggagaccatgagctcttcaccactttcagctgggatgaccagaaagttcgtcgagtctttgtcagaaaggtctacaccatcctgctgattcagctgctggtgaccttggctgtcgtggctctctttactttctgtgaccctgtcaaggactatgtccaggccaacccaggctggtactgggcatcctatgctgtgttctttgcaacctacctgaccctggcttgctgttctggacccaggaggcatttcccctggaacctgattctcctgaccgtctttaccctgtccatggcctacctcactgggatgctgtccagctactacaacaccacctccgtgctgctgtgcctgggcatcacggcccttgtctgcctctcagtcaccgtcttcagcttccagaccaagttcgacttcacctcctgccagggcgtgctcttcgtgcttctcatgactcttttcttcagcggactcatcctggccatcctcctacccttccaatatgtgccctggctccatgcagtttatgcagcactgggagcgggtgtatttacattgttcctggcacttgacacccagttgctgatgggtaaccgacgccactcgctgagccctgaggagtatatttttggagccctcaacatttacctagacatcatctatatcttcaccttcttcctgcagctttttggcactaaccgagaatgaggagccctccctgccccaccgtcctccagagaatgcgcccctcctggttccctgtccctcccctgcgctcctgcgagaccagatataaaactagctgccaacccagcctgtggccaggtcactgtctaccccagcccagcccagccctctgccgcttgtacatacgccatggggaccctgaggaactgaggccacgtcaatccctgtgccgccccattcgcccgttacatcttccaaactgggacggtcaaggctgaaggctcctctgggtttgagggtccaagggacaaggaggagaagcctagcaggatttcagatgcaggagagagacccaggaagcccggcagagccctgagccccactgcaattcctcctagggctgcacaatcatgtggccttagggcacactgtcctgcatccagtctgtgtcctcctgtctttctcatccaggtcaggcattgacatttgtaagaaanggggtaagggacacagctgggcaagtngattggttggcangattgctgtc

SEQ ID NO: 115 - DNA, 2312 bp, Homo sapiens
  misc_feature (2312)..(2312): n equals a,t,g, or c
gcccttgtaggtgacactatagaaggtacgcctgcaggtaccggtccggaattcccgggtcgacccacgcgkscgggggctgaggggctgccatggcggcggcgggccggctcccgagctcctgggccctcttctcgccgctcctcgcagggcttgcactactgggagtcgggccggtcccagcgcgggcgctgcacaacgtcacggccgagctctttggggccgaggcctggggcacccttgcggctttcggggacctcaactccgacaagcagacggatctcttcgtgctgcgggaaagaaatgacttaatcgtctttttggcagaccagaatgcaccctattttaaacccaaagtaaaggtatctttcaagaatcacagtgcattgataacaagtgtagtccctggggattatgatggagattctcaaatggatgtccttctgacatatcttcccaaaaattatgccaagagtgaattaggagctgttatcttctggggacaaaatcaaacattagatcctaacaatatgaccatactcaataggacttttcaagatgagccactaattatggatttcaatggtgatctaattcctgatatttttggtatcacaaatgaatccaaccagccacagatactattaggagggaatttatcatggcatccagcattgaccactacaagtaaaatgcgaattccacattctcatgcatttattgatctgactgaagattttacagcagatttattcctgacgacattgaatgccaccactagtaccttccagtttgaaatatgggaaaatttggatggaaacttctctgtcagtactatattggaaaaacctcaaaatatgatggtggttggacagtcagcatttgcagactttgatggagatggacacatggatcatttactgccaggctgtgaagataaaaattgccaaaagagtaccatctacttagtgagatctgggatgaagcagtgggttccagtcctacaagatttcagcaataagggcacactctggggctttgtgccatttgtggatgaacagcaaccaactgaaataccaattccaattacccttcatattggagactacaatatggatggctatccagacgctctggtcatactaaagaacacatctggaagcaaccagcaggcctttttactggagaacgtcccttgtaataatgcaagctgtgaagaggcgcgtcgaatgtttaaagtctactgggagctgacagacctaaatcaaattaaggatgccatggttgccaccttctttgacatttacgaagatggaatcttggacattgtagtgctaagtaaaggatatacaaagaatgattttgccattcatacactaaaaaataactttgaagcagatgcttattttgttaaagttattgttcttagtggtctgtgttctaatgactgtcctcgtaagataacaccctttggagtgaatcaacctggaccttatatcatgtatacaactgtagatgcaaatgggtatctgaaaaatggatcagctggccaactcagccaatccgcacatttagctctccaactaccatacaacgtgcttggtttaggtcggagcgcaaattttcttgaccatctctacgttggtattccccgtccatctggagaaaaatctatacgaaaacaagagtggactgcaatcattccaaattcccagctaattgtcattccataccctcacaatgtccctcgaagttggagtgccaaactgtatcttacaccaagtaatattgttctgcttactgctatagctctcatcggtgtctgtgttttcatcttggcaataattggcattttacattggcaggaaaagaaagcagatgatagagaaaaacgacaagaagcccaccggtttcattttgatgctatgtgacttgcctttaatattacataatggaatggctgttcacttgattagttgaaacacaaattctggcttgaaaaaataggggagattaaatattatttataaatgatgtatcccatggtaattattggaaagtattcaaataaatatggtttgaatatgtcacaaggtctttttttttaaagcactttgtatataaaaatttgggttctctattctgtagtgctgtacatttttgttcctttgtggaatgtgttgcatgtactccagtgtttgtgtatttataatcttatttgcatcatgatgatggaaaaagttgtgtaaataaaaataattaaatgagcaggaaaaaaaaaaaaaaaaaaaaaaaaaaaaaaaacaaaaaan

SEQ ID NO: 116 - DNA, 6107 bp, Homo sapiens
  misc_feature (5749)..(5749): n equals a,t,g, or c
  misc_feature (5892)..(5892): n equals a,t,g, or c
  misc_feature (5896)..(5896): n equals a,t,g, or c
  misc_feature (5906)..(5906): n equals a,t,g, or c
  misc_feature (5957)..(5957): n equals a,t,g, or c
  misc_feature (5966)..(5966): n equals a,t,g, or c
gcagttagttccttgatgtcagtagtgggctaaaggcagcttactgtgtgtttgctggagctttcactcagccaagtgttagagtcaggaaacccattgaggcaatggcgtcaaatggtgtttcacaagaatgagccattcagtctttgctcactatatatttaatattttattattgttgttattgttattattaattggctttctgtattctatgccttttatttataaagacactaagaaaacccatgtttgtaattttaataacatttttcccatcttgtaatatccagagctactttataaattctctgaaccaaaagtattttcctcagtgtatctcttctcccccagcccctattgggaaaaattacccagtatagttcaggttatgaggaggatcagccacacaatccagtgcttcagtttgaaaatgtaaaattctaaccctaaagtagggttggttgaaatttcagacaaagcaaacccagcaggtataaaaagtagtataaatacaaatctgtaagttatttttgaattttctgaacttttttctaagagattacataggagactaaagaaatctatctgttcaagttctaattaggatgattgttaatactgcactgtggatgaagtggcgactggcttgtgtgctgacttctgtggtttagcaagaggtttattgttatcaaatgctaattggcaatgccaagtcactgggaccaattttctgttttataatatctaagtttagaacagaatatatacctgaactgtagtggtttgatcggatggagacagaaaacccgatttttattctcataaattttgtggttatttatacaagggctgtgctatgctaccatattcttgttcaataataataggtttgttgttttttttacattgttaaatgttccttacccctaaaggtcaatgttaagtacaacattctgaaaatacaatttggctacgaagagtattcatcttctttgaagctcagtggttgatatttgtgctaataatgcaatttcctgattcctgttacaagttatagctacatatgggagagactcagtgagccagcaaaggccatagaaacaacaatttattaaatgtatttatggcagaaggacctaaataaactgtgagccaccttttcttctttatattgttacatttaagtgttcttgctttcagcaactcacattaatgcttggagcttatctctttctctctctctctctctctctctctctgtgtgtgtgtgtgtatgtgtgtgtgtgtgtgtgtgtgtttccttattgtcattccattatatatccacaccaacatgggtgacgataattcaaagtcatattttgcctctaagcttgatcatgttacctttatgattaaagtatcatgttatttagccaatgcaaatctgttttaaaacaaatagtttaaaaaaagaacaagtttttaagggctttattatagaagaagtattaatgaaggactttccttcctccctccctttcctcccctccctgcctcccttcttcccttccatctccccctcctccctgccttctttgtttctccttcccttattcctccctccctcctttctcccttccttcctttcttccattcatccttccttgccttttatttttattttttgtaatatcacatgtgctgtagtttggaattttattctagtgcatttcttgctcatcagaacctcagctaatctacctaggaaaaatagtatcaaaggaaatgagaaagttgtatctgagtccctccagaactaagataattctttttgaccatttaagcctttataaatgcgttttgaccatttaagcctttataaatgcttgttttaggaaagtgaatctgttagatgcatcaacaaataatgaccaggacaaaacgatttaataattaaagtctcaaatcaccatggttatacattttcaccagaaatagtaatcttacaatttttcatttttctgatgaagatttctgttccaatatctgtttcctaatagattttttaaattaattagctttcctctgctttatgaccacaggttttatccctaaccgagacagctgtcttatatctgcatgccttagactgtgtggagggactccatgaagaaagaccataggttagaaaaataactcatagtatataccctagtaagtgggttagtagaatctcataacatgtattaaaaagaggttttcttctctgcttgtttgtgtcactagagcaaaattgtagagataatgctcataatgcagtaaatatcagaataatctacaatatcatttgtggatggtcccaggtcccagtgctctagttactttacttctttttttttttttgagatggagtcttgctctgtctctcaggctagagcagtgtgcgatctcagctcactgcagcctccacctcccaggttcaagcgattctcctgcctcagcctcccaagtagccaggattacaggcaccctccactaggcccggctaattttttttgtatttttttagtagagatggggttttgccatgttggccaggctggtttcgaactcctaacctccagtgatccacctgcctcggcgtcccaaagtgctaggattacaggcatgagccaccacatccggcctaattacttctttaatccccatttatttttatgccattctagcctcatttattaataaaattatgtttttactttctctttcaggaaattttttaaattaatattttatatctagatctaatgctatggaaaagtgcctttttatcatttataatttcatttttcactatttccaaaaacacataaacaaatagtttcagtaggtcccagcttttactttttccatttaaaccttcttttctccatttcttccctttggcttaagaataaaagaaaaggtacattgctagaattgtttctttgggagagggtaaaagattacagaattagactgttcagcctttatataaactaaatttgtcttcatctcaaccagctaatggtaggtcttatctgaatactcatgagaattttagcatctgtgaaactccatgcaccagatgtgtgtaaatttcaggaagaaagtgttgaaagcattttctctgatgttaattagatggaaataaatcactaaaacatagtttaggtaaagcctgattatgccacttttttttaactagacagggcaaagttgtttatgttagtgtacttcttgtctatcctcagttaatttacctagacaaaaagtgtcaaaggaaatgagaaaaaggttatatctgactccctccagacctaagataattccttttgatcagatacagtcagatggagtgccttggtttttgttaattttgcctctattccagctccttaccacagcggtggtgcttaaagaaaggatcatcagcaacaggtcaggatagttctacctttgggatagggctgctttccccgtgctagtatttctgtgactgttagtggcactgaggactgcaaacttttatgcaatattcttaataccctattgatattatgcactttaatcattccaaagaagccaagaatgctgtatagtgatgattccttcctaatgaattcatcttaactatttagaatgttatgtcccttttcttttggatagccaacttggtataaatgttatatggatttttctaaaatgactatataggacttaagactttgaaatgtaatttacttataaggggaaataattatgctttagcacatcattttagaaacgtcacattttagaaacattcagcttgctaacctacatgtttgggaattcattaaaaccagttgtctatatattttgtgccatgtatataagaacattacaatatatctttttctacatatgtagtatgtgcaaccagtggttctcagagtatggttctcagcccaccagctagtatcagtatcacctgggaactagttagaaatgtaaattctttggccccatcccagacatactgagtcagaaattctggaatagggcccccgcaatctgttttcacaagccctccaggtgattctgatgcacactttaaagtttaggaaccactgggctaagactctgttgagatatagagtttttcttccactcagactgatatagttatacattgttcttcatgtaaattcagcttaacctggttatctataatcttttattggcaaaagttaattctcagtactgcctatagagatacagtgtattttatgtacatacacaattagtctaattcttgataattcagttaatttagtttggcattttcctaccacttactaaaaggtttacattaaatgactgatttaaatatataggtgcaatgttctatgtttattttaattgttatgacatttaagtagctaatataattgaccggtgctaaagtctcctgtttatccataaaatgggtacattatgggcagtgtaatacaagctttcttttcattgcctagtactttaccagcagaccacagttttgccctggctagaccaaccctcagaacaaaatcatcattccttgtatttatatttgtatctgagatagtaaacaagatggctggccaggtcaacatggcaccttaacttatttttttaataggtaaaacttcttcaaaagtagcttgctttgtataagaactaagctatcagtatagatatagctatccttggagcttatgtttcagacaagaattatttactaaaataaataataaacaagataatgcattatacaatttgggcatttctcgtttctcaagtgtatgcatcatggtaaatataaactaaccacaagataggtagattgattcatttcattttaatctccttgtgtaattcagtacctccataattgttctaatcttcttcccactgtttacaaattaccagttaattaactcgtgaaagaaaaattcacatatcagaataaaaataaatgtatactcactttataaaaatcaccactgctgtctttccttaatactagcagtggaaatgtaagtggcttactctacaaattttggtgctggcaaatacataggcaaactgttgggagctgctctagttacattcctcccttcttattccctttttctcttcctcactttattgcataacatattcctgtacccaaagcattctaccacagttctatttgactcccacttgtaataactcctttaaaaaattccatgtttaaccatatgaccctgcttgcttactcatattctccctccctctccccttcctttctctctcttccagaagtcatttgcctggtttgaaatattttgtagggattgcttattatattattttagctgatgaacctcaggacaacgtctacacacacacacatacatacacgcacacaaaatctcagctgttgaagagtgggcttggaatcagacttctgtgtccagtaaaaaactcctgcactgaagtcattgtgacttgagtagttacagactgattccagtgaacttgatctaatttcttttgatctaatgaatgtgtctgcttaccttgtttccttttaattgataagctccaagtagttgctaattttttgacaactttaaatgagtttcattcacttcttttacttaatgttttaagtatagtaccaataatttcattaacctgttctcaagtggtttanctaccattctgccatttttaatttttatttaattttatttgcttgagcacactgatcaaccactgaactgccttcttccattgtcctgcaatgatataagggttacatttttgtgtatatggctttcatagttgggatttcanagcnctgataccanatattttcagtttgttctctgggggaatttcatttgcatctatgtttttanctatctgtnataacttgttaaatattaaaaagatattttgcttctattggaacatttgtatactcgcaactatatttctgtaaacagctgcagtcaaaaataaaacactgaaagttttcaaaaaaaaaaaaaaaaaaaaaaaaaaaaaaa

SEQ ID NO: 117 - DNA, 767 bp, Homo sapiens
catgaaaacacattctcttatagtttttaaattcatcatccaagagttcctgctctttgatgatgagacatacctggtagactccaaaacagagagcagacgcctagtatctttgttctggggtgtgcattaagagtacattgacctgtctgtctccagtcttgactcttttggaagagagatgctagtactgatgacaacctgcattctggctgcggtgtgygtccacactgcacagtgtgcaccagactctcgtatggacaatgactgtccctcacatcaggcgcagatccattttagagcctcagaagtcaggagagggtggactttcaaccacgactgaaaacactgtctttcttaggacatgctgtgtgtatgacacacttacagatgtctgtgctcactgatgcttgttgatgtgtcatcgcacatcagtgacaaacatttgtcatgtttttgcctttggtggaacttctttattatactcactttcctcccaaaccatttttctcaacttcatcatgaagcaaatgtcatgtggtcattctgtgatggggctcagggctaggttaggtgatgatttctgaaagctcagagacgtgaaggaaaaaggacatcagtgcttggatcttagctcttataagcctcacgtgcaacaataaacccgagttcaagaatcagattcttagatagattggtttggtagcaaatgacaaaaaaccaacgtaaatatgcttcggcaaaaaaaaaaaaaaaaaagggcggcc

SEQ ID NO: 118 - DNA, 1932 bp, Homo sapiens
cccgcagcagctcccaggatgaactggttgcagtggctgctgctgctgcgggggcgctgagaggacacgagctctatgcctttccggctgctcatcccgctcggcctcctgtgcgcgctgctgcctcagcaccatggtgcgccaggtcccgacggctccgcgccagatcccgcccactacagggagcgagtcaaggccatgttctaccacgcctacgacagctacctggagaatgcctttcccttcgatgagctgcgacctctcacctgtgacgggcacgacacctggggcagtttttctctgactctaattgatgcactggacaccttgctgattttggggaatgtctcagaattccaaagagtggttgaagtgctccaggacagcgtggactttgatattgatgtgaacgcctctgtgtttgaaacaaacattcgagtggtaggaggactcctgtctgctcatctgctctccaagaaggctggggtggaagtagaggctggatggccctgttccgggcctctcctgagaatggctgaggaggcggcccgaaaactcctcccagcctttcagacccccactggcatgccatatggaacagtgaacttacttcatggcgtgaacccaggagagacccctgtcacctgtacggcagggattgggaccttcattgttgaatttgccaccctgagcagcctcactggtgacccggtgttcgaagatgtggccagagtggctttgatgcgcctctgggagagccggtcagatatcgggctggtcggcaaccacattgatgtgctcactggcaagtgggtggcccaggacgcaggcatcggggctggcgtggactcctactttgagtacttggtgaaaggagccatcctgcttcaggataagaagctcatggccatgttcctagagtataacaaagccatycggaactacacccgcttcgatgactggtacctgtgggtwcagatgtacaaggggactgtgtccatgccagtcttccagtccytrgaggcctactggcctggtctkcagagcctcrttggrgacattgacaatgccatgaggaccttcctcaactactacactrtatggaagcagtttggggggctcccrgaattctacaacattcctcagggatacacagtggagaagcgagagggctacccwcttcggccagaactyattgaragcgcaatgtacctctaccgtgccacgggggaycccaccctcytagaactcggaagagatgctgtggaatccattgaaaaaatcagcaaggtggagtgyggatttgcaacaatcaaagatctgcgagaccacaagctggacaaccgcatggagtckttcttcctggccgagacygtgaaatacctctacctyctgttygacccrrccaacttcatccacaacaayggstccaccttcgacgcggtgatcaccccctatggggagtgcatcctgggggctggggggtacatcttcaacacagaagctcaccccatcgaccctgccgccctgcactgctgccagaggctgaaggaagagcagtgggaggtggaggacttgatgagggaattctactctctcaaacggagcaggtcgaaatttcagaaaaacactgttagttcggggccatgggaacctccagcaaggccaggaacactcttctcaccagaaaaccatgaccaggcaagggagaggaagcctgccaaacagaaggtcccacttctcagctgccccagtcagcccttcacctccaagttggcattactgggacaggttttcctagactcctcataaccactggataatttttttatttttatttttttgaggctaaactataataaattgcttttggctatcaaaaaaaaaaaaaaaaaaaaaaaaaaaaaaaaaaaaaaaaaaaagggcggccgc

SEQ ID NO: 119 - DNA, 3436 bp, Homo sapiens
aattcccgggtcgacccacgcgtccgctcgctgcggcggcgactgagccaggctgggccgcgtccctgagtcccagagtcggcgcggcgcggcaggggcagccttccaccacggggagcccagctgtcagccgcctcacaggaagatgctgcgtcggcggggcagccctggcatgggtgtgcatgtgggtgcagccctgggagcactgtggttctgcctcacaggagccctggaggtccaggtccctgaagacccagtggtggcactggtgggcaccgatgccaccctgtgctgctccttctcccctgagcctggcttcagcctggcacagctcaacctcatctggcagctgacagataccaaacagctggtgcacagctttgctgagggccaggaccagggcagcgcctatgccaaccgcacggccctcttcctggacctgctggcacagggcaacgcatccctgaggctgcagagcgtgcgtgtggcggacgaagggcagcttcacctgcttcgtgagcatccgggatttcggcagcgctgccgtcagcctgcaggtggccgctccctactcgaagcccagcatgaccctggagcccaacaaggacctgcggcccgggggacatggtgaccatcacgtgctccagctaccagggctaccctgaggctgaggtgttctggcaggatgggcagggtgtgcccctgactggcaacgtgaccacgtcgcagatggccaacgagcagggcttgtttgatgtgcacagcatcctgcgggtggtgctgggtgcaaatggcacctacagctgcctggtgcgcaaccccgtgctgcagcaggatgcgcacagctctgtcaccatcacaccccagagaagccccacaggagccgtggaggtccaggtccctgaggacccggtggtggccctagtgggcaccgatgccaccctgcactgctccttctcccccgagcctggcttcagcctgacacagctcaacctcatctggcagctgacagacaccaaacagctggtgcacagtttcaccgaaggccgggaccagggcagcgcctatgccaaccgcacggccctcttcccggacctgctggcacaaggcaatgcatccctgaggctgcagcgcgtgcgtgtggcggacgagggcagcttcacctgcttcgtgagcatccgggatttcggcagcgctgccgtcagcctgcaggtggccgctccctactcgaagcccagcatgaccctggagcccaacaaggacctgcggccaggggacacggtgaccatcacgtgctccagctaccggggctaccctgaggctgaggtgttctggcaggatgggcagggtgtgcccctgactggcaacgtgaccacgtcgcagatggccaacgagcagggcttgtttgatgtgcacagcgtcctgcgggtggtgctgggtgcgaatggcacctacagctgcctggtgcgcaaccccgtgctgcagcaggatgcgcacggctctgtcaccatcacagggcagcctatgacatttcccccagaggccctgtgggtgaccgtggggctctctgtctgtctcattgcactgctggtggccctgcctttcgtgtgctggagaaagatcaaacagagctgtgaggaggagaatgcaggagccgaggaccaggatggggagggagaaggctccaagacagccctgcagcctctgaaacactctgacagcaaagaagatgatggacaagaaatagcctgaccatgaggaccagggagctgctacccctccctacagctcctaccctctggctgcaatggggctgcactgtgagccctgcccccaacagatgcatcctgctctgacaggtgggctccttctccaaaggatgcgatacacagaccactgtgcagccttatttctccaatggacatgattcccaagtcatcctgctgcctttttttcttatagacacaatgaacagaccacccacaaccttagttctctaagtcatcctgcctgctgccttatttcacagtacatacatttcttagggacacagtacactgaccacatcaccaccctcttcttccagtgctgcgtggaccatctggctgccttttttctccaaaagatgcaatattcagactgactgaccccctgccttatttcaccaaagacacgatgcatagtcaccccggccttgtttctccaatggccgtgatacactagtgatcatgttcagccctgcttccacctgcatagaatcttttcttctcagacagggacagtgcggcctcaacatctcctggagtctagaagctgtttcctttcccctccttcctcctcttgctctagccttaatactggccttttccctccctgccccaagtgaagacagggcactctgcgcccaccacatgcacagctgtgcatggagacctgcaggtgcacgtgctggaacacgtgtggttcccccctggcccagcctcctctgcagtgcccctctcccctgcccatcctccccacggaagcatgtgctggtcacactggttctccaggggtctgtgatggggcccctgggggtcagcttctgtccctctgccttctcacctctttgttcctttcttttcatgtatccattcagttgatgtttattgagcaactacagatgtcagcactgtgttaggtgctgggggccctgcgtgggaagataaagttcctccctcaaggactccccatccagctgggagacagacaactaactacactgcaccctgcggtttgcagggggctcctgcctggctccctgctccacacctcctctgtggctcaaggcttcctggatacctcacccccatcccacccataattcttacccagagcatggggttggggcggaaacctggagagagggacatagcccctcgccacggctagagaatctggtggtgtccaaaatgtctgtccaggtgtgggcaggtgggcaggcaccaaggccctctggacctttcatagcagcagaaaaggcagagcctggggcagggcagggccaggaatgctttggggacaccgaggggactgccccccacccccaccatggtgctattctggggctggggcagtcttttcctggcttgcctctggccagctcccggcctctggtagagtgagacttcagacgttctgatgccttccggatgtcatctctccctgccccaggaatggaagatgtgaggacttctaatttaaatgtgggactcggagggattttgtaaactgggggtatattttggggaaaataaatgtctttgtaaaaaaaaaaaaaaaaaaaaaaaaaaaaaaaaaaaaaaaaaaaaaaaaaaaaaaaaaaaaaaaaaaaaaaaaaaaaaaaaaaaaaaaaaaaaaaaaaaaaaaaaaaaaaaaaaaaaaaaaaaaaaaaaaa

SEQ ID NO: 120 - DNA, 1256 bp, Homo sapiens
  misc_feature (1079)..(1079): n equals a,t,g, or c
gggacaagtccacgtatatcgagtcctcgaaggataggcgggggaagattcctgccaccctgtgctctcggtccagccggacgtccatgaccttgggtggcaggaatcttcccccgcctatccttcaaggacaagtccacgtatatcgagtcctcgaccaaagtgtatgatgatatggcattccggtacctgtcctggatcctcttcccgctcctgggctgctatgccgtctacagtcttctgtacctggagcacaagggctggtactcctgggtgctcagcatgctctacggcttcctgctgaccttcggcttcatcaccatgacgccccagctcttcatcaactacaagctcaagtctgtggcccaccttccctggcgcatgctcacctacaaggccctcaacacattcatcgacgacctgttcgcctttgtcatcaagatgcccgttatgtaccggatcggctgcctgcgggacgatgtggttttcttcatctacctctaccaacggtggatctaccgcgtcgaccccacccgagtcaacgagtttggcatgagtggagaagaccccacagctgccgcccccgtggccgaggttcccacagcagcaggggccctcacgcccacacctgcacccaccacgaccaccgccaccagggaggaggcctccacgtccctgcccaccaagcccacccagggggccagctctgccagcgagccccaggaagcccctccaaagccagcagaggacaagaaaaaggattagtcgagactggtcctcacctgctccggctcctggcgaccactacccctgcgtcccggccccctcgcctcccctccctgtcgccctttccctggacagatcaggccggggcggtgggaggcccgcctcaggtcagggcccagcgtgtgacgtaggggccggggcaggccagggtttgtttgtggaggcgctgtctgtccctctgtccctctgtgtttccagccatctcgccctgccagcccagcaccactgggaatcatggtgaagctgatgcagcgttgccgagggggtgggttgggcgggggtggggccgggcncccctacgggatgcccacggccgttcatcatcttgtccctcgtccccctaccacactccccctcctagaccgccgccctttaacacagtctggatttaataaattcatatgggtgtttaacttaaamwmaaaaaaaaaaaaaaaaaaaaaaaaaaaaaaaaaaaaaagggcggccgc

SEQ ID NO: 121 - DNA, 1057 bp, Homo sapiens
tcgacccacgcgtccgctgagattacaggtgtgagccaccaggctcagccccctaagatttgaaacactttaaatggcccatggtagggttcctgctaggataaaacattaagcggctgttaaaagaaataaaaggaggacacgtctctgtgcactggtgtggacaaatctccaagtcactgcaaaatggaaaaagtataagatgctctttccctgaacctcaagggtcccgcccctctcactttcaggtctctggacctctgactgacactgtgcctgcccaggtccctgtatgcactgccacagtgccctgggccccatgtccacccctgtcctgcccttctctgggatagggctggccttcctctgcctctgcctggctgcatccatggtcgatctcaagtgccttggcatgaactccactctcctgcagccttcaatcaaggaatgatggggatgtgtacataccccaccccaccccttggcagggtgatgctgaggtgtggatttttaacagttcccagactttcccaggaggcttgggtttgggtgcccacagtgggagctggtgtgatatcataccttcgccggccgcctttccttcctgttctctgtgcccctactcccactctagagctgccccgtttctctgttttcgtgaaagagctgaccctgtgctgcctcccactctcccaatgcccctgccactcctgtgagcctgctgctggtgaggtcggtgctgacctctgtgttgctggataatgagtcatctatctctggaggagaagaaaggcaggtcctccacagccctgataaaatctccaagtctcccagtttcgggtccctctcctgggatgcagacccactgcctgcccagctggtacgatccacatgccctcttcttgggaataggggcatgggaaagtgactaaagatactgttctggctgctgtgttcactgtgagtaataaactgtccatttctccgaaaaaaaaaaaaaaaaaaaaaaaaaaaaaaaaaaaaaaaaaaaaaaaaaaaaaaaaaaaagggcggccgc

SEQ ID NO: 122 - DNA, 2683 bp, Homo sapiens
  misc_feature (2640)..(2640): n equals a,t,g, or c
  misc_feature (2676)..(2676): n equals a,t,g, or c
acaasgtmacgcctgacaggtmaccggatccgggaattcccgggtcgacccacggcgtccgcatttgcaataacagaaaaggaattgcatgtatgaagttttcaatcgtgggcttttctttgttgtggggagggggtcgggggatagtttgatttccattttctgaaaacgacagacttggattctgtttgtgtgtgcatattttatccagccttaagttataaagctcatctgtcccgctgcattccctgtgtattttcaggacatggctcgtgggtgtgtgtgttcattgtgtgcgtctgtatgtatttttctgtcatcactgttccctctcctcccgagtgtgcattcagttaatataatcagttgcttgcttctttcaaagtgctttgaaggtcttgaactcatgtgtgagcatctttatcaactatcccaattgcatgttctccatcacatattctcttatttgctctgtaccccctgagaatatgttttagagatattggaataaagctgtctgggtaaggagtaggcttagccgacctatgaataatacactttagtctagttctttattctaaatctggattgccagtattgtgtatttaaaccaagtctgtgaatacctgctttttttggccacagagtaacaagttttcatgtaagatcttcataccaaagtaggaagtaaaaatagcttagaaagctctgtcaggtgttttgtgcagctgacagargtaatgttacatcacctaaaaaagaaagatacacggtcagttatcctaaaaataaattgtttggaaagtacaatgcaccacatttttgtagaagtctactatttgataaacagttgaaattcaagatgtgtttgacccttagtcatttttactctttggttctgagtatacctattttcttagcgtatctgccttgtttatctttttcttcaccttttaacaagtatgacataggaaagtcatttttttttagaattcatggatcagtctgatctactcttattcataatggaacatgtaaatatactgaaaactgtttttcaggagagaaatatgagttggagggaaggaaaagtggttctactaatgttccaaaatcctcatcagagaaggtatgatgttctcaggtgtggaaaatattttttagttgattgagaatgcaggtttaacagaagagataaggggcataatgactgctggttttccagactggattttcctaccgcaactattaatgttctcagagttgatgaggaccacctttgtgtatacacttgtagttttaaaccttgcattggtaacaaaatgatcaactttaatccaggtagaattcaagatggctgtacttcagttgtatgataaaattaatggttctcatgacttgtgtggcatctaaaaataatgtttttatagcatctctctgccactaaattgttgacttgaattttgggaaaaaaaaaagttggtgttgatatgtatatgtgtgtgtgtatatatgtatttataaacaagtgtgtttgagtaacaagtgagtttcatagtcttcccctacgcatgtgtattccacacacaaatggctgagttatagtcataaaacaatttgcaataaaaaaaaaaccaaaacagattgtcagttaaccaggaaacagttaatgttttttaatgaatctggcattatagtgagcaaatgtcgtattaatttaggctaatttctaatactaccataatttgtgtctaaatttctgttggggtagaaattactaaaattgtggggagttttttctgatttttacattgctttaggaaacatttttactaattcagctgtcttaggtaaaatgaatagttttcttcctgtttttttatgtgtcattgttagtggtctcagaattctgatcagtaactttgtgtatgatgctgaattacaaaccgtttgaatgatccagttgaaaacgtatccctctactttcttcagttgtagaaaaggttaatttccctcagtgtcccacattataccaacctaagagaagaacaggtaatagggagaaataaacatacggtggtttcagtggttttggtcatgtgtccacaggagaaactaaccattcagttgtcttaattttagttcgttctaccctgtgaggagtttgtttccatcagttgttgactttccaaaatgttgcattaagtaatagttgtcactctgttggtctcatggtcaatatcaatcagactttcatgatctctactaattattagtagagtcctgtactatgtctgtaactactaagtttaaagaaaagcacatagtcacttcatctctttttttcttagcctacgctcactccccaacccatcccaacattgacatgctatctgtggacaaatagcagttctcagaatctagtcaagttgccatcatcccccttgccttggccgttcatagtaggtatgcatatgtttgtttctgtacagtactgtgtgtgtgtgtgtatatatatatacatctgtatgcacacatctttgataaaatagctatttgactagcagggttaaagtggcttttaattacttcgtgagtgttattggatacatcttaaaaaaaaaaaatctggacccaganccatgccatacttggttggactattttggggcattnaaaattg

SEQ ID NO: 123 - DNA, 3881 bp, Homo sapiens
ccacgcgtccggcacaacgtgcaggtttgttaacatatgtataaatgtgccatgttggtgtgctgcacccattaactcgtcatttagcattaggtatatctcctaatgctatccctcccccctccacccacccaactcctgggctcaagggatcctcccactcagcctcctgagtagctgggactacggtgtgtgtgactctgtgggctctattttctgtttttgttcgtttgtttgtttatagcagccatactaatgggtgtgagatggtatctcattgtgttggtttgcatttccctaataattagtgatgttcagtattttttcacatgcttattggtcatttgtatatcttccttggagaaatatttattcaactcctttgcccattttaaaatcaggttatttgggtttttgttgttgatgttgagttgtaggagttctttgtatattctagatattcacccctcatatatatgatttgcaaataaattctcctgttctataggttgccttttcactctgttaattgtgtcctttgagtcatagaaatttttgatggtaatgtggtctatcttatgtatttttacattggttgactgtgctttagatgttatatccaagatataattgcaatctaatgtcatgaagctttactctcctatgttttcttctaagagttttagagtgtttagagagtttaagagtgttaggtcttatattcaggtctttcatttattttgagttaatttttgtgtatggaacaaggtaagggcccaactttattattttgcatgtgtacttctaggttttccagcatcatttattgaagagcctgttctttccccattgaatggccttggcatcctcatcaaaaatcattttactatatatttgaggggttatttctggactctgtaccatggtctgtatgtctgtttatgccagttccacactttttgattactgtagtcttgcagtatgttttgaaatcaggaagtatgagacctccaacttgagtgtcttttgaagagaagatgttcttaatggtggtgcagtcttactgtcagtttttaaaatggattatagttttgatgttgtatctaagaagtctttgcctcacacaggatcacaaagattttctgctatgttttcttttataaatgtggtagtatgaaggtttatacttatgtctgtgatccatttggaattaatttttacatgtggcatagtgtatgaattggagttcaattgtttgcatatggttctggcattatttgttgaaaagactatcctttcttcactgtcattgcatcttgctgaaataaactgacactgtatgtgtgggtctatttttgtctgtctcttctatactgtgatctgtttgtgcttataccagtacttagattactatagcttataaagagttttgaacgtctggtcagtaaagtttcaactttgtacttttttttcagagttgttggcagttctggtgatttagatttccatttaacttttagaatcagcttgttaatttttaatgacaacataaaaggcgactgggattttaactggggttactttgaatcctcagggcaatttgtgggaaattgtattttaatgatactgattcttcgaatccatgaagattgatatctctccatttatttaggcattttcagtttcttccagcaatgctttgtggtttttcagcctacatgtcttggatagctttatcagatttattcctaagtatttcttatttttttgatgctattgtaaatgatactttaaactttatttctggaataattgtagatcatatgtagattatagttgcaaaaataatacagagaattcccttatattccttacctattttgccctaacatcaacatcttatattactatggcacatttggattttatttggattttatccctcttccacttaatatctttttgttgttgttgttctagagtatcacttttaggcataatgtcttcctggttacctttgatctatttgtttctcagtcttcattttttacaaccttgacagttttgagtaatattctttaagaattttgtagaatgtccttcattttgggcttgcctggtattttttttctcatgttttggtcatcttttgtgagatctctcagtaagtatttcttattttggggtgctgttataaatggcattgattgttaaattttaatttttagtttttttgttgctagtttatagaaataagattgattttttatattgaccctatatactaaaacttattagctccaataagttttataaatacagtccatagattttctacttagacaattaggttttttttgcaaattaaaagctttaattcttgtggtctgtatttccttacagtattctttccaaccaagtgtacctacttgttgctttaggattagtttttgttaggcagaagatctgtaagaagcttcctagcaaggacagaaggtggcctcagaatcaagatatcatcatgcccacgtatgtcttgtttgtatcaatcacctgtctggtattatgttagcctactctgtcctgcccttgagtactttagtctgtctgccttgcttccaactcactgcttcactgagaccttttatccaaagtcacagtattatttcttggaaaagttcctgtaaaaagtttctagtcaaattgcctgggaaaaaaccctactacttattgagtgcttacttgattttagacatgttctttcggatattttagttatctttaccacgacgcattacacctctagttaagtagtattattcatttaacaacaaaaaaatttatgcctaccttatgtaatgctatgtggaaggttctatagctccagcaatgaaccaaacacacccagaaaggcaagagagtacaataccaatcgcaaattgtgatatctattctgacgggaaggtattgaatgctacaaaatgatgagtctgacttagtctgcagggatagggaagacgttttcgaggaaatgattaaaaaaagtgaaggaagagtaggaattttcaagtgaagtagtggaagaagagtgttttagatggaagtagcagtagatgtgaagtttctgaggtaggagagagcactgacctttcagagagttggactgtgttaccattttactgatgaagaggctgaaagatacagagaggctaagttatttcccaaggttgcatagtaaatggagggagccagactggaacccaggacgatacagcttttatcagttaactatgctatttgaaagtcaaaataaagtaatttaaattgaattccccatagaaatggagaattcgcccatttctgaataaaaacaacttaaaatgtcctattacaggttataaaatagtctgtttaaatagtctataatgggtcattatataaataaaaatgcaattgcaattttttggtaagtttgaaattttacaaatttttagaaacttggtattttaaaagtcctgacctgtagtttgtcattgattaaggaaaaagctaggagcgccttacttccttggagtttttgaaaaagtatgtgtaagaagctagaaatctgcagtatacagagtattgtgatattgttaattgtaatttgcttattttcactgtaataaatgaccttcaacacaattattgaatttttaaaaactttctttgaataggcttttgccagcattttgaggaatgcttggagttgagctacttgatggcttctagaaactgacccacagttctctgtgtggttgtcctgagtttttcattttcattcatttaagaatttcgtttaatatgttcatactgttctgtccattaaaaaaaaaaaaaaa

SEQ ID NO: 124 - DNA, 728 bp, Homo sapiens
aaatgatttagtgacctatacaagtagcctgcagtaccggatccgaattcccggtcgacccacgcgtccggtgaaaacagcagagtgctactccataccactgggatcttgtccagtaaacatccagagagtgaggttaggaaataaaaagtatataaatattagatgcctagaaatgcaagtcactttaaagattttatgtgaaatagaaaaaaaagagaggagagggactcattgtcttgtaatgggtccttcccagagagaggtgactgtccagtggcaccgggcccttttcctccttccccttttactcttatcaactaggacagaaactaagaattttggcttcaagtggctaaaagactgatgggggaaaaaagaaaatagaaaaaaataacagagagactgacgctctaggcagttacaagtccaagaaaaaagacagaaacttttaagtattgagccaaaaccaggtctagcaamcataatgctggccctagattatttattaatttatgaagaaacttctagatatgggggtgacaaaaggaaattaaatccattatatatgcatatattttaatgtaaatatataatagataaattatgtatacataatatataaccaaattgaaacagttttacaatttggtttgactggaaattcaaaatccatatattaatttttgtagtaaaagtttatgtaaaaaaaaaaaaaaagggcggcc

SEQ ID NO: 125 - DNA, 986 bp, Homo sapiens
gcactggcctcttcactggtggccgagaaccagggctttgtggcagcactgatggtgcaggaggcaccggccctggtacggctgagcctggggtcccatcgggtcaagggcccactcccagtgttgaagctccagccggagggctggagcccatctactctctggagctgcgcttccgtgtggaaggacagctgtatgcacccctggaggctgtccatgtgccctgcctgtgtcctggccgccctgcccgccctctgctcctgcctctgcagccccgatgcccggcccccgcacggctggatgtccatgccctttacaccacatccactggtctcacgtgccatgcccacttgccacccctgttcgtgaactttgccgacctctttctgcctttcccgcagcctccagagggggccgggctgggcttctttgaggagctctgggattcctgcctgccagagggtgctgagagtcgtgtgtggtgtccacttgggccacagggcctggagggcttggtgtcccgccacctggagccttttgtggtggtggcccagcctcctaccagctactgtgtagcaatccacctgcccccggactcaaagctgctgctgcggctggaggcggccctggcagatggagtgcctgtggcctgcggaccgatgactgggccgtgctgcccctggcgggggactacctccgtgggctggcggctgctgtctgagccccgggagaccaggtgggggcaggactgtggcccttgtgggggccaaggcacactcctgtagctctgtcgccaaaaccctgcattccgcagtgccctcgctggcttgttttcttttgggccccggttgggagcaggctcctgggggtgagggtctgtctgagtctgtttttgctgctctagcaagatccctgagacggggtaagttataataaacagaaatgtattggctcagaaaaaaaaaaaaaaaaaaaagggcggccgc

SEQ ID NO: 126 - DNA, 4893 bp, Homo sapiens
ccacgcgtccgtgagaagataatcctgagaggctgcatcctgagaaataccagctggtgttttggaatggttatttttgcaggtcctgacactaaactaatgcagaatagtggtaagacaaagtttaaaaggacaagcattgatagattgatgaatactctagtactatggatttttgggtttctgatatgcttgggaattattcttgcaataggaaattcaatctgggagagtcaaactggggaccaattcagaactttcctcttttggaatgaaggagagaagagctctgtgttctccggattcttaacattctggtcatatattattattctcaatacagttgtacccatttccttatatgtgagtgtggaagtaattcgtctaggacacagttattttataaactgggaccggaagatgtattattctcgaaaagcaatacctgcagtggctcgaacgaccacgctcaatgaggaactggggcagattgagtacattttctccgacaaaacgggtaccctcactcaaaacatcatgacctttaaaagatgttccattaatgggagaatctatggtgaagtacatgatgacctggatcagaagacagaaataactcaggaaaaagagcctgtggatttctcagtcaaatctcaagcggatagagaatttcagttctttgaccacaatctgatggaatccattaaaatgggtgatcccaaagttcatgaattccttaggttacttgctctctgccacactgtaatgtcagaagagaatagcgcaggagagctgatttaccaagttcagtcacctgatgaaggggctctagtgactgccgctagaaattttgggttcatttttaaatcccggaccccagagaccataacaatagaagaattgggaacactagttacttatcaattacttgcctttttggatttcaacaacaccagaaaaaggatgtctgtcatagttcgaaacccagaaggacagataaagctttattccaaaggagcagatactattctgtttgagaaacttcatccttccaatgaagtccttttgtctttgacgtcagaccacctcagtgaatttgcaggggaaggccttcggaccttggccatcgcatacagagacctggatgacaagtactttaaagagtggcataagatgcttgaagatgcgaatgttgccacagaagagagggatgaacgaatagctgggctatatgaagaaattgaaagagatttgatgctactaggtgccactgctgtagaagataagttacaggagggtgttattgaaacagttacaagtttatcactagccaatattaagatctgggtcctaacaggagacaaacaagaaactgccatcaacatcggttatgcctgcaacatgctgactgacgacatgaatgatgtgtttgtgatagcagggaataatgctgtggaagtgagagaagaactcaggaaagcaaaacaaaatttgtttggacaaaacagaaatttttccaatggccatgtagtttgtgaaaaaaagcagcagctggagttggattctattgtagaagaaaccataacaggagattatgccttaatcataaatggccacagtttggctcatgccctagaaagtgatgtcaagaatgatctcctagaacttgcttgcatgtgtaagactgtaatttgctgcagggtcactccactccagaaagcccaagtggtagagctggtgaagaagtacagaaatgctgttactttggccattggtgatggagccaatgatgtcagcatgattaaaagtgctcacattggtgttggcatcagcggccaggaaggattgcaagcagtcttagccagcgactattcatttgcacagtttagatatctccaaaggcttctccttgttcatggaaggtggtcttatttccgaatgtgcaaattcttatgctatttcttctataagaattttgcatttacacttgtgcatttctggtttggtttcttctgtggtttctcagcccagactgtttatgaccagtggttcatcaccctttttaacattgtttacacatcactgcctgttttagccatggggatttttgaccaggatgtgagtgaccagaacagcgtggactgtccccagctctacaaaccaggacagctgaatctgctttttaacaagcgtaaatttttcatttgcgtgatgcatggaatctacacctcattagtccttttcttcatcccctatggggccttttacaacgtggctggagaagatgggcaacatattgctgactaccagtcctttgcagttaccatggccacatctttggtcattgtggtcagtgtgcagatagccttggataccagttactggactttcattaatcacgtcttcatctgggggagcattgccatttatttctccattttatttacaatgcacagtaatggcatctttggcatcttcccaaaccagtttccatttgttggtaatgcacgacattccctgacccagaagtgcatctggcttgtaattctcttaacaacagtggcttcagttatgccagtggtggcattcagatttttgaaggtggatttatacccaaccctgagtgatcagatccgccggtggcagaaggctcaaaagaaggcaaggcctccaagtagccgaaggcctcggacccgcaggtcaagctcaagaaggtctggatatgcttttgctcaccaagaaggctatggagagcttatcacatctggaaaaaatatgcgagctaaaaatccacccccaacatcagggctggaaaagacacattataatagcactagctggattgaaaatttatgtaagaaaaccacagacaccgtgagcagctttagccaggataaaacagtgaaactgtgagtcaatatgaatttaaaccacgtagttatcttttcacttcaggtggagctgaaattctgctggctccagagtttgagatttgaggcaagaggtggggcaggcagattgcctcacttaacttaaatctgcggcagacaactgccagtgcccatcaaacaggagtgtgcgctatggaaaaccaggccagagggtcactgtctggtttgtgatttggtggacaaaacactcgctgttacaagtacagattttttttttttttaaatcaacctagataccaattgacctgaactttagaatcttatttatggagaaaaacttgtaaagctgcatattcactgaatggatcctcaggcggataaaagggtgcattttaaaggtatatatccaagctgaaaagcatgcctattgacagataaacatgtatctgtaagatcagcctttcccaaggtatacttttaaaatttaaagcgtgtactgtgttgctttcagactgagttgcatgtcactctttagtcttgatatctacctgtctgttcagccaggacaacaaatggcttccaagcctgaagaatacaaaagtgtgcttgtgtttctcatttttataccagtctagggacaaaggagactgaacatctttgcagcaggataggctggtaatttgatcaaatttattcaaaaagctctcagtctgtgtcatgtaaggacatgcttatgaaatgtgagagaggctcgccactaagtattctaaatacttttcaatggcttttctaacaacctcagtagtaatttgctgagcatcatccagaccattaatagaatcagcaaagcactggaatttcacactttaatgataatattccacatagtctatgggcaaatattttcaacatttccaatttttaaagcttcagaattgaagccaaacaaattaataaataattgttttaattactatttaaaaactcaggtttagattgtttaaaattagttgcttttgatactcagctgtcatgtttataattcaaacatgtagtaaacatatgtaggtaaggttgtttttttggagatgttgcagctcaaatttcagtccacatatgaatcatcagtgtattttccataaagtgattcgggcatatttgtgtgaaaacctcagttctgtcacttcttacctctataaacttggacgataatgtgccttctctgagactcagtttcttcctctgtaaaatgaggacatactacctacctcacgtggttggttgatgattgtctgtcaaagcacaaactctgaaattattaaaaacataattatttcataaacagatgagttaagttccagttaactcaacatcagtataacagagcaattggaagagaatatgaaaaaactggaatctaaatagtcagtgaggaaggctttgataaaatgaaattgccagaaagatataaaactggttagggtcctacagggaaataaaattataaccgtggaggtacatttctctaccagaaagcaaaaataaagcatcatgtcttaatggttttctacaaatcaacttctaattctacagagtccttaatctggtccctattaaattcttggtcagacaaagttacatttcccaagagagtcaggtgacacttgagtgagtttgatggataatgagctaatgtgatatctataggtcacaattttttaaaaccaaaattttcaagtctgggataatctttcctaaatgggatcaaatgaaataatatgtgtaaaagagtcaaatgcagtcctttaccatagtaactgcctatggacgttgtctttcccttacatgcctgcctacacttaaccagatgttggttttcaatgtctaatttgtcattagtttcaccacatttgctcactttttgtaacatttttgcaagatttgaaaactttcagtaaatgttttggcactattggtaaaaaaaaaaaaaaaaaaaaaaaaa

SEQ ID NO: 127 - DNA, 1410 bp, Homo sapiens
gcccacgcgtccgagaaaaatgctgctcagtttttattgtctaccaatggtaagtatacatattttctttccatgtgcccactgtgtgtacctgttgcacatatcctgtagcctaggagaggaatcatttaacagagatacttgtaaaaaggacttttgtttttctatacagaatgtaaactctacttttttactgtcacttgcagtttttagattctctgaaagattctctgatagcaattttttgtttactacacctccaatttgtagtgaaaagaatgggctgctataccattggatttaggtcaggtactatttctgtcatttctcagtctcgtaatcttgggcaggttactaacactgaattgaattttcctcagcagcaaactagagatagcaattttttattatagtattattatgaatattaaataacttcacatacatcatgagtgcaagtgctcaataaatgttaatttattcctcctttttaagtgtttgtaaactacacagagtatctcaaactgcagatacaaaatactcaaaggatggtctccattccaggatacgctataggagagcactttcttacttgatcaccattagcatattgccttcttcccagcaatccacatggctggaaggagattcctctcctactgtttacttgccaagggaacattttttgttgttttttgagacaatgtctgtcgcccaggctgaagtgcattggtgtaatcacagctcactgcagcctcgacctccctacctcagtctcctgagtagctgggaccacaggtgagtgccaccacacccggctaattttttaaaaacatttttgtagagcctgggtaacatggggtggaacaagcctgtagtcccagatactcaggaggctgaggtgaaaggattgcttgggccagggaggtcaaggctgcagtgagccgtgaaaggccactgcactccagcctgggtgacagaatgagaccttgtctcaaaaaaaaaaaaaaagtttcttggaacctatacgtttttttttgttttttttttgaaaagccagaccttgtgcccttgttttgaacaccgactgggaagatggggcttaggtaacagccaaacctggctgtcagctgtgtgggagccaccaccctctctgggaagagttcctgcttctgtatggcaagcataaatcaagctcagtctgggttatggagaagttgaaaattgttttgttcctcattagtttataattgtatgaaatacgattttaatgaaaacttttcagaattcacgtttgtgtagatatttcagagaaccatttttactttacatcctaaaactgccttttcctatggttttgtcaataaaacactatgatgttgaaaaaaaaaaaaaaaaaaaaaaaaaaaa

SEQ ID NO: 128 - DNA, 1727 bp, Homo sapiens
  misc_feature (979)..(979): n equals a,t,g, or c
  misc_feature (1047)..(1047): n equals a,t,g, or c
  misc_feature (1135)..(1135): n equals a,t,g, or c
ccacgcgtccggccatggttgccactgtctgtggcctcctggtcttcctgagcctgggcctggtacccccagtccgctgcctgtttgcactcagcgtgcccaccctgggtatggagcagggccgccggctgctcctgtcctacagcactgccaccctggccattgctgtggtgcccaacgtcctggccaacgtgggtgcggccgggcaggtgctgaggtgtgtcaccgagggctccctggagagtctcctcaataccactcaccagctgcatgcagcatccagggctctgggccccacaggccaggcaggcagccggggcctgacatttgaggcccaggacaatggctctgccttctaccttcacatgctcacggtcactcagcaggtcctggaggatttctctggcctggagtccctggcccgggcagcagcgctagggacccagcgagtggtcacagggctgtttatgttgggcctcctggtggagtcggcatggtacctccattgctacctgacagacctgcggtttgacaatatctacgccactcaacagctgacccagcggttggcacaggcccaggctacacacctcctggcccctccacccacctggctgctccaggcggctcagctgaggctgtcacaggaggagctgttgagttgtcttctaaggctggggctgcttgccctgctcctcgtggccacggctgtggcggtggccacagaccatgtagccttcctcctggcacaggctactgtggactgggctcagaagttgccaactgtgcccatcacgctcacggtcaagtatgatgtggcatacactgtcctgggcttcatccctttcctcttcaaccagctggctccggagagccccttcctctccgtccacagctcctaccaatgggagctccgcctcacctccgcccgctgcccactgctacccgcccggcgtccccgcgcagctgccccgctggncgcggggggcctgcagctcctggcgggctccacggtgctcctggagggctacgcccgccgcctgcggnatgccatcgccgcttccttcttcacagcccaggaggcgaggaggatccgccacctacacgcccggctccagcgaagacacgacaggcnccaaggccagcagctgcccctaggggatccttcttgcgtccccacacccagacctgcctgcaagcctccggcatggatagcctacaggctggatgccttaagaaccgagagcagtgagggagaagggaaagagctttggagttgcagagacctgagttgtcaccttggtcctgtgccgcctccctgtgtgaccttgggtaagtcacttcacctctctgagcctcggtttctacatctgcataacgacagcatatttaccattgatgtgacctacttcccacgcagggatgtggtcaggatggaaggaaatactgggcatgataggcctggataaccggtaaagaaccatgcaaaggcgaagacaaggagtgcagagagagctcatggttcctccaggctggttggcgatcaggctcatctcatctgcaccaactgctctacttgttagatggagaccttgcatcatgaatttctcgaaatgctcctggaacttatttatatgcctcaaaatcctctaaactcatttatagtaacccatagttttaattttataaataaacgtatttattaaatcttaaaaaaaaaaaaaaaa

SEQ ID NO: 129 - DNA, 1353 bp, Homo sapiens
ccacgcgtccgcgctgctgccgccgccgcctcgggtcgtggagccaggagcgacgtcaccgccatggcaggcatcaaagctttgattagtttgtcctttggaggagcaatcggactgatgtttttgatgcttggatgtgcccttccaatatacaacaaatactggcccctctttgttctatttttttacatcctttcacctattccatactgcatagcaagaagattagtggatgatacagatgctatgagtaacgcttgtaaggaacttgccatctttcttacaacgggcattgtcgtgtcagcttttggactccctattgtatttgccagagcacatctgatggggcgcctacccttcttcagcaagatgggaacagctgagtctgaaggaagagaaacactgacacagcagctgcctctcccagcagccgccatgagaagattgttacctgcaagcagagtgtccactcaacccgtgctgaggctggcagacagtgctgagtcacttctgggcaggcctgctctgtgggctctaggattcctgctttgccctccctctcaggcacaatgacaactactgctcagtgccagacactgcaccatgtaggcaacacgtggcagtgatgattagtcacaaaatcacatttatattcattctaatgaaactgccattgcaaaattataactgagacagtgaaagaagtctgacctaaccaactccatcttgcttctaacctccaagctgtccttgttcattcctgggactcattttgggaggaacttagttaatagcttacagtttaaaacaaagacaatcacagacctttcccaaaacaaacccccttcttgcctggaaactagactgcctttgtaggattaacaaattagccgaaagattagaaattatggtttaggagtcacgcagctggagatgacaagattctgacactcctccaattgctcctggggataacattactattctaaggcctaacatcagtgcttgagatgttttgtagaccctgcccttgatggatcagctggtactacccagaccgataaactggctcgtcttatcttgtggcccccacccaggagctgactcaatgcaagaagactgttctgactccctatgatttcatctccaacccaaccaagcggcactgtcaactcactggcctccccctacccaccaaattatccttaaaaactcagatccccaaatgctcagggaaactgattatgattaccccaaagcttggagtaataataaaactggcctgtctcccgcacagccaaaaaaaaaaaaaaaaaaaaaaaaaaaaaaaaaaaaaaaaaaaaaaaaaaaaaa

SEQ ID NO: 130 - DNA, 2504 bp, Homo sapiens
tcgacccacgcgtccgcgagtgcctgcaggactgggcctccttcctccgcctggccatccccagcatgctcatgctgtgcatggagtggtgggcctatgaggtcgggagcttcctcagtggcatcctcggcatggtggagctgggcgctcagtccatcgtgtatgaactggccatcattgtgtacatggtccctgcaggcttcagtgtggctgccagtgtccgggtaggaaacgctctgggtgctggagacatggagcaggcacggaagtcctctaccgtttccctgctgattacagtgctctttgctgtagccttcagtgtcctgctgttaagctgtaaggatcacgtggggtacatttttactaccgaccgagacatcattaatctggtggctcaggtggttccaatttatgctgtttcccacctctttgaagctcttgcttgcacgagtggtggtgttctgagggggagtggaaatcagaaagttggagccattgtgaataccattgggtamtatgtggttggcctccccatcgggatcgcgctgatgtttgcaaccacacttggagtgatgggtctgtggtcagggatcatcatctgtacagtctttcaagctgtgtgttttctaggctttattattcagctaaattggaaaaaagcctgtcmgcaggctcaggtacacgccaatttgaaagtaaacaacgtgcctcggagtgggaattctgctctccctcaggatccgcttcacccagggtgccctgaaaaccttgaaggaattttaacgaacgatgttggaaagacaggcgagcctcagtcagatcagcagatgcgccaagaagaacctttgccggaacatccacaggacggcgctaaattgtccaggaaacagctggtgctgcggcgagggcttctgctcctgggggtcttcttaatcttgctggtggggattttagtgagattctatgtcagaattcagtgacgtggtaggaaagaaagtcaggtcaagtgatgcttttgagcttacacacaattcacaggcccaccagtgacaatttactgtgagttaatgtcattcaggtgtgcccatggattttgagggctggaaatgcaaagacacatttttctataaaaagaaaaagcaactaaggttaaaagctatattgtggcccaagacactgtctgaaagatgacatgagtagtaattcaccactatctgaaccaagcaaggatcaatgtgctgactgcattggccaatggctttgatacttctgctatttttttagacacaaacccataaactaactgcttaagaattcatactgcttgaattatgtaaaatatattttacagtatatctttccttgggccttagattactattcactgggcaaatggtatttgtttttgttttaattttttttttaatagacggaagtcttgctctgtcatgcaggctggagtgcggtggtgcgatcatagctcactgcagcctcgaactcttgggcttcaagcaatcctcctgtgtcagccaccagagtagctgagactacaggggtatgccaccatgcccagctggcatttgttaatcttcatttgaggtctagatctaggcactgtggacactgaaaaacagttgggaaatctttcgagctgtggaaatccaaacaaagactgataattcctggtargggtgtgtgcstgacgtactgcarcctyaamctyctgggctyaagtgatcctcccacctcagcctcctgagtagctgagaccacaggcgtgtgccaccacgcctagctaatttttwawaccrgggtcwamcctttgtttcccaggstggtyttgaattcctgggatcaagcaatycttccacctkgsmctcccaaagtgttgggattataggcatgagccaccasgactggccagaggacaaaattttaataaaggtcttagcttaagcagtaatcytacttcattaagccttcctggggtgcggtacacaccgttaattcagcaaccctcagtacatactaagtatgctcagtgctgtgaaagtggattacaccaaattaagtcattcttatcacacccaatcaaaagtcaagaagccagggataaaagcacctcaggcacataacattaatctagtaatgtaattctctgcacatccagctggtgaaactgcgtgctgtaagctgggaccagctttgtccataactgctgagagaacttgctgaagctctaggaataattttgcctgcccggttgctcaccagttgtagcttgccagctcccaacacccttcctggtgccaataaactttctcaaagagcaatactgacatttcttttgataaaacctccagccttctctgtgttgttccgacataccgaggaccaactggtctacatggatgccctgaacatgcaattctttcttccaaaataaaacattaaatagagaaaaaaaaaaaaaaaaaaaaaaaaaaaaaaaaaaaagggcggcc

SEQ ID NO: 131 - DNA, 1905 bp, Homo sapiens
  misc_feature (1)..(1): n equals a,t,g, or c
  misc_feature (1828)..(1828): n equals a,t,g, or c
  misc_feature (1837)..(1837): n equals a,t,g, or c
  misc_feature (1846)..(1846): n equals a,t,g, or c
  misc_feature (1860)..(1860): n equals a,t,g, or c
ngccacagcagagacagtggagggcagtggagaggaccgcgctgtcctgctgtcaccaagagctggagacaccatctcccaccgagagtcatggccccattggccctgcacctcctcgtcctcgtccccatcctcctcagcctggtggcctcccaggactggaaggctgaacgcagccaagaccccttcgagaaatgcatgcaggatcctgactatgagcagctgctcaaggtggtgacctgggggctcaatcggaccctgaagccccagagggtgattgtggttggcgctggtgtggccgggctggtggccgccaaggtgctcagcgatgctggacacaaggtcaccatcctggaggcagataacaggatcgggggccgcatcttcacctaccgggaccagaacacgggctggattggggagctgggagccatgcgcatgcccagctctcacaggatcctccacaagctctgccagggcctggggctcaacctgaccaagttcacccagtacgacaagaacacgtggacggaggtgcacgaagtgaagctgcgcaactatgtggtggagaaggtgcccgagaagctgggctacgccttgcgtccccaggaaaagggccactcgcccgaagacatctaccagatggctctcaaccaggccctcaaagacctcaaggcactgggctgcagaaaggcgatgaagaagtttgaaaggcacacgctcttggaatatcttctcggggaggggaacctgagccggccggccgtgcagcttctgggagacgtgatgtccgaggatggcttcttctatctcagcttcgccgaggccctccgggcccacagctgcctcagcgacagactccagtacagccgcatcgtgggtggctgggacctgctgccgcgcgcgctgctgagctcgctgtccgggcttgtgctgttgaacgcgcccgtggtggcgatgacccagggaccgcacgatgtgcacgtgcagatcgagacctctcccccggcgcggaatctgaaggtgctgaaggccgacgtggtgctgctgacggcgagcggaccggcggtgaagcgcatcaccttctcgccgccgctgccccgccacatgcaggaggcgctgcggaggctgcactacgtgccggccaccaaggtgttcctaagcttccgcaggcccttctggcgcgaggagcacattgaaggcggccactcaaacaccgatcgcccgtcgcgcatgattttctacccgccgccgcgcgagggcgcgctgctgctggcctcgtacacgtggtcggacgcggcggcagcgttcgccggcttgagccgggaagaggcgttgcgcttggcgctcgacgacgtggcggcattgcacgggcctgtcgtgcgccagctctgggacggcaccggcgtcgtcaagcgttgggcggaggaccagcacagccagggtggctttgtggtacagccgccggcgctctggcaaaccgaaaaggatgactggacggtcccttatggccgcatctactttgccggcgagcacaccgcctacccgcacggctgggtggagacggcggtcaagtcggcgctgcgcgccgccatcaagatcaacagccggaaggggcctgcatcggacacggccagccccgaggggcacgcatctgacatggaggggcaggggcatgtgcatggggtggccagcagcccctcgcatgacctggcaaaggaagaaggcagccaccctccagtccaaggccagttatctctccaaaacacgacccacacgaggacctcgcattaaagtattttcggaaaaagccgtgtggtccagcttnccccgtggnttcaattantttcccaattttgnctgcattcggaaccattagccctgcaatttagcaggggcaagccc

SEQ ID NO: 132 - DNA, 3091 bp, Homo sapiens
aaaccggaaagtttgtaggaaaattgctgcacatggcctttgcagaaaagagagccttcaaaacctcttacattccagtagaaaactctctctgcaagtccttaactttgttcactcattccaggaaggtgcttcaatattggatattcacacagagcccagtttttcaagtttgctttcacagtcatcgtatgctgacatgggtgttccacttcctgcaaaaaacttaatatttaaagatggtgtcttatcagaakggagtggacggtcaccttcctcacttcttattgctaatctccatttgcaataatttggttacaccatttgttgctcacactttctgccttttttctttcttaacgttagctttatagtgtcagccactaaaaagcatcctgctgctgcagtgcaattcttgcttaactaatattaaaagttggggaacatattcatgttttctgaagttttgctcattattgcacatcttattgcgacaaagtgctttttagcagccagcactgtattttttaccttgagacaatctgcatttcttttataaaactaagtatatactttataggctttatgatgactgttatgtttataagcagtcactatgaaaattgcaatggtaattttatatgttagtttatcaaacataaatcttgtttaattttatattttgttacctatactttgggggatcaagggaagagatggaactcttcctctgaaaaggcttcttggtacttaaagtagtaaaactataaaacaataaacatccagtattgagagatgatatgatagggcattatgaattcctatgggtgtctgtaaattatgtatgtcagttggacattgtagaaggtatgtaaatcagcatagttgtgtataacttaaccttgatttataaggtcttaagattatgactattcattgacatctcatgagaagctttagaagactttctatttttaaacaccatttatatgtggacttctgttgtcactgactttgggctttatattttcatagagtctttatggaaaaaatagaatttattttccactcttgtagctatagctgctgcacactttcaccctgatttatttttttgtttcttagctttgatgttttcaaaccaaggattgtgattttaggttagaattacatattagaagcattaagactatgtctttggatcagaatgctttagtgataaacctactttgaagacatactcttaagcaatctggatcttaaatttatgtgaatacttttttagaaaatgataaagaaaaatggaattacttcaaagtgtttcttgagtcattgattcttttagcatctcaaatgttaattagaataattggaatcactttttagacttttcaagttaccttccttgggaagtttgtgcagtgttatagtttagtttagctcctcttacagggtaatggtttgctagtttaaaactgtaaccaaacgaactggtcagacaacatatatctaaaacacttaaaatgttaggaagtttgggaatgttataacctaaacgtttttgctggtaactttttgttatttatagatatttgtgtatttaacatacatacttcaggaaatatatgcctttcctaaaacttaaccatgcattcaataccatggcctatctatagaattgaatattttggaccatgttatctgtggcacagtcagtgctgtgtttgaggtaaatgcagtaacggttagttttctactttgtcttatagaaggtagaaaccatgtgtatgttatgtttgtctataaaagaaaaaatactaatattaaataatttcttacgactctgagtcactcacttatttttccaataattgatattgtacattcctagtgccattaggtatgtatgtatgtaacttttacagtttttcagctgaaagttgtaagtattttttttttttgatcggggctctttaatctcattttaatttcctttgtttgaactgtagttatttattcctatattaaccatctaaaccaactgtaatgacatgtacactaatacagaattgaacatttgtagttgttggcagtgaacccagttgttggtgaatttaaagcttaaaatatgggaatgatttgctgctatatttcctttgagagagaaaggaggaagaaatagaacctaatagtgatcatgaattttagggaaagtaccgaagaaccatggggtcccctctggtttcttgtgttgaatgaggcaagggtaatcatctgattccgagctgaagacctctggtcctcttaaggagggagagtgcatttttagagcttttagcaaaatgtgaaaagctgatgtttgcgccttgctttgtgaatttggctttgttttacttatacattaactcatgtaatctcttaaatcttacaagcattgatccatttcaacaaaaaggtaaatttaaaatgcagactttgttatttgccaaagaagattcatgaaaaatttacgtccaattattttgcaaatagttaatttcatttggctttttaccatgttccttcctttctttttcccgcttccttaatgtaatttaaaccctggcaaacattctttagaaaccaagaggaaagaaagaacaaatatcaaaaaagacatagaatttaatattgatacaatttcacctctaaaatggatttgaagaaatgcaactttatatcaaaaaatgtcatctgatttcctttgtttcttttttaaattatgtaatcagatgattttatgtttttttttcaggggagcggaatattggtttcttttacttgttgttttcagttttctctgccattcatgtttcttttttgtgttcagtgtttcaaatacaatttgtatttaaggattttaaaataccaaactgtaactgagtacagtggatcgttttctgttaggatgttaatattatacaatgaaatctataaagtgttgtcaatttgattattgacacatataacatgtttacaaataaactgtggtattgatcaagttactatgaaaaaaaaaaaaaacccggggggggccccggaacccaatccc

SEQ ID NO: 133 - DNA, 1396 bp, Homo sapiens
  misc_feature (668)..(668): n equals a,t,g, or c
  misc_feature (739)..(739): n equals a,t,g, or c
  misc_feature (751)..(751): n equals a,t,g, or c
gctggtaaccaggtggaaccatttcacgtgtccctccccagctgcctcagtccccttccccacctgggccacagcatgggggttccctcacccaccgcctggccctctcttgcctcgttccacactcagaaaaaagcaaggatcagacaagaagaagagtccccacccctcccgtccccgcaggagctggcgttctctgcgctaagggtgttttttagagtgatgttttttctcctctgtctcgttgccctggagatcaaagggttcactttctcagcgaggggtgccagggacagatttctaaacaagtctggaccgcagccaggaaaaaagatgaaaacaacacactgtaaacagcctctattcagcaaacctggtcaggtcagaggggctytgaggaaagcaagagggaggcaggaggagagggaagcggtggggatgtggggggggcgggggcacagttatcctgaatacataaaaacaagtgaggtcactgaggtcagggatagtcccaaacatccccaagtccagcctttcctgacaaccagggttacatgcagagtcccaggccatctgcaggttttggaggccctgtgcggggcctgggggtctatgtttaaacacgcccttgtggtggtccaagtycccagaascaggggaagggcgantctgggctctgaatggcargtggggcagctccamctcatcctcctacatggcacccagcactgggctgcangcytggtccccnacttgccgcaggaatcaatcctgccagctcagagccsccgtgtgacaaacaccccaggaacagaggagacatgagaaagggactcaccagcccactgcccaggatgtagaagtcgtcgcaggagaagatggtgccggggtaggaggagaagaccagcttgttgccgggaaccagcgggtagtcccctgtgcaggcagagcgagccagggatgctggtcagacaggcacaggtggaggcccctgcaccctacctaacaagacacaggcacaggggcacaggcaggcctycgaggaagcccccactgtgtcctttttgtcatttagcaaatgaggtcattgggcatataaaagtgcatatacgtgcaagtaaaaataaaagctagcagcaaaacttatatagttggscctycatgtccgtgggttccacatccttggattcaatsgamtggggaccaaaaatactaggaaaaaaacatgattaaaaagaaacaacacagctgggtgcagtggytsacacctgtaatccctgcactttgggaggccaaggcaggcggatcacgaggtcaggagaccaagaccatcctggctaacacggtgaaacccgtctctactaaaaatacaaaaaaaaaaaaaaagggcggccgc

SEQ ID NO: 134 - DNA, 1564 bp, Homo sapiens
gcggacggtgggctgtgcaaccttcctccctttcttaaatgcttggggcatttgtctggccttcccttttactgctggctgctgcctgcatctgtctcttaaccttcattaactgtgcctatgtcaaatggggaaccctggtacaagatattttcacctatgctaaagtattggcactgatcgcggtcatcgttgcaggcattgttagacttggccagggagcctctactcattttgagaattcctttgagggttcatcatttgcagtgggtgacattgccctggcactgtactcagctctgttctcctactcaggctgggacaccctcaactatgtcactgaagagatcaagaatcctgagaggaacctgcccctctccattggcatctccatgcccattgtcaccatcatctatatcttgaccaatgtggcctattatactgtgctagacatgagagacatcttggccagtgatgctgttgctgtgacttttgcagatcagatatttggaatatttaactggataattccactgtcagttgcattatcctgttttggtggcctcaatgcctccattgtggctgcttctaggcttttctttgtgggctcaagagaaggccatctccctgatgccatctgcatgatccatgttgagcggttcacaccagtgccttctctgctcttcaatggtatcatggcattgatctacttgtgcgtggaagacatcttccagctcattaactactacagcttcagctactggttctttgtggggctttctattgtgggtcagctttatctgcgctggaaggagcctgatcgacctcgtcccctcaagctcagcgttttcttcccgattgtcttctgcctctgcaccatcttcctggtggctgttccactttacagtgatactatcaactccctcatcggcattgccattgccctctcaggcctgcccttttacttcctcatcatcagagtgccagaacataagcgaccgctttacctccgaagatcgtggggtctgccacaaggtacctccaggtcctgtgtatgtcagttgctgcagaaatggatttggaagatggaggagagatgcccaagcaacgggatcccaagtctaactaaacaccatctggaatcctgatgtggaaagcaggggtttctggtctactggctagagctaaggaagttgaaaaggaaagctcacttctttggaggcacctgtccagaagcctggcctaggcagcttcaacctttgaacttactttttgaaatgaaaagtaatttatttgttttgctacatactgttccagacttttaaaggggacaatgaaggtgactgtggggaggagcatgtcaggtttgggcttggttgttttagaagcacctgggtgtgcctacctactcctcttttcttttaaaagggcccacaatgctccaatttcctgtctcctttagagagacatgaaactatcacaggtgctggatgacaataaaagtttatgttcctaaaaaaaaaaaaaaaaaaaaaaaaaaaaaaaaaaaaaaagggcggccccg

SEQ ID NO: 135 - DNA, 1734 bp, Homo sapiens
  misc_feature (1417)..(1417): n equals a,t,g, or c
  misc_feature (1703)..(1703): n equals a,t,g, or c
  misc_feature (1714)..(1715): n equals a,t,g, or c
  misc_feature (1731)..(1732): n equals a,t,g, or c
gaagcgtgcggtgccgcagcaatggcggcgctcacaattgccacgggtactggcaattggttttcggctttggcgctcggggtgactcttctcaaatgccttctcatccccacataccattccacagattttgaagtacaccgaaactggcttgctatcactcacagtttgccaatatcacagtggtattatgaggcaacttcagagtggacgttggattacccccctttctttgcatggtttgagtatatcctgtcacatgttgccaaatattttgatcaagaaatgctgaatgtccataatttgaattactccagctcaaggaccttacttttccagagattttccgtcatctttatggatgtactctttgtgtatgctgtccgtgagtgctgtaaatgcattgatggaaaaaaagtgggtaaagaacttacagaaaagccaaaatttattctgtcggtattacttctgtggaacttcgggttattaattgtggaccatattcattttcagtacaatggctttttatttggattaatgctactctccattgcacgattatttcagaaaaggcatatggaaggagcatttctctttgctgttctcctacatttcaagcatatctacctctatgtagcaccagcttatggtgtatatctgctgcgatcctactgtttcactgcaaataaaccagatgggtctattcgatggaagagtttcagctttgttcgtgttatttccctgggactggttgttttcttagtttctgctctttcattgggtcctttcctggccttgaatcagctgcctcaagtcttttcccgactctttcctttcaagaggggcctctgtcatgcatattgggctccaaacttctgggctttgtacaatgctttggacaaagtgctgtctgtcatcggtttgaaattgaaatttcttgatcccaacaatattcccaaggcctcaatgacaagtggtttggttcagcagttccaacacacagtccttccctcagtgactcccttggcaaccctcatctgcacactgattgccatattgccctctattttctgtctttggtttaaaccccaagggcccagaggctttctccgatgtctaactctttgtgccttgagctcctttatgtttgggtggcatgttcatgaaaaagccatacttctagcaattctcccaatgagccttttgtctgtgggaaaagcaggagacgcttcgatttttctgattctgaccacaacaggacattattccctctttcctctgctcttcactgcaccagaacttcccattaaaatcttactcatgttactattcaccatatatagtatttcgtcactgaagactttattcagaaaagaaaaacctctttttaattggatggaaactttctacctgcttngcctggggcctctggaagtctgctgtgaatttgtattccctttcacctcctggaaggtgaagtaccccttcatccctttgttactaacctcagtgtattgtgcagtaggcatcacatatgcttggttcaaactgtatgtttcagtattgattgactctgctattggcaagacaaagaaacaatgaataaaggaactgcttagaaaaaaaaaaaaaaaaaaaaaaaagggcggccgctctagaggatccctcgagggcccaagcttacgcgtgcatgcgagtcatantctctcctggnntgatcgtatgaagctnngc

SEQ ID NO: 136 - DNA, 2916 bp, Homo sapiens
ccacgcgtccgctagcccgggcggagccacagtcctagaggctgagcgcagtcggagctgtcccatttacccgacccgacgccggcgtgatgtggcttccgctggtgctgctcctggctgtgctgctgctggccgtcctctgcaaagtttacttgggactattctctggcagctccccgaatcctttctccgaagatgtcaaacggcccccagcgcccctggtaactgacaaggaggccaggaagaaggttctcaaacaaggaatccattacattgggcgtatggaagagggcagcattggccgttttatcttggaccagatcactgaagggcagctggactgggctcccctgtcctctccttttgacatcatggtactggaagggcccaatggccgaaaggagtaccccatgtacagtggagagaaagcctacattcagggcctcaaggagaagtttccacaggaggaagctatcattgacaagtatataaagctggttaaggtggtatccagtggagcccctcatgccatcctgttgaaattcctcccattgcccgtggttcagctcctcgacaggtgtgggctgctgactcgtttctctccattccttcaagcatccacccagagcctggctgaggtcctgcagcagctgggggcctcctctgagctccaggcagtactcagctacatcttccccacttacggtgtcacccccaaccacagtgccttttccatgcacgccctgctggtcaaccactacatgaaaggaggcttttatccccgagggggttccagtgaaattgccttccacaccatccctgtgattcagcgggctgggggcgctgtcctcacaaaggccactgtgcagagtgtgttgctggactcagctgggaaagcctgtggtgtcagtgtgaagaaggggcatgagctggtgaacatctattgccccatcgtggtctccaacgcaggactgttcaacacctatgaacacctactgccggggaacgcccgctgcctgccaggtgtgaagcagcaactggggacggtgcggcccggcttaggcatgacctctgttttcatctgcctgcgaggcaccaaggaagacctgcatctgccgtccaccaactactatgtttactatgacacggacatggaccaggcgatggagcgctacgtctccatgcccagggaagaggctgcggaacacatccctcttctcttcttcgctttcccatcagccaaagatccgacctgggaggaccgattcccaggccggtccaccatgatcatgctcatacccactgcctacgagtggtttgaggagtggcaggcggagctgaagggaaagcggggcagtgactatgagaccttcaaaaactcctttgtggaagcctctatgtcagtggtcctgaaactgttcccacagctggaggggaaggtggagagtgtgactgcaggatccccactcaccaaccagttctatctggctgctccccgaggtgcctgctacggggctgaccatgacctgggccgcctgcacccttgtgtgatggcctccttgagggcccagagccccatccccaacctctatctgacaggccaggatatcttcacctgtggactggtcggggccctgcaaggtgccctgctgtgcagcagcgccatcctgaagcggaacttgtactcagaccttaagaatcttgattctaggatccgggcacagaagaaaaagaattagttccatcagggaggagtcagaggaatttgcccaatggctggggcatctcccttgacttacccataatgtctttctgcattagttccttgcacgtataaagcactctaatttggttctgatgcctgaagagaggcctagtttaaatcacaattccgaatctggggcaatggaatcactgcttccagctggggcaggtgagatctttacgccttttataacatgccatccctactaataggatattgacttggatagcttgatgtctcatgacgagcggcgctctgcatccctcacccatgcctcctaactcagtgatcaaagcgaatattccatctgtggatagaacccctggcagtgttgtcagctcaacctggtgggttcagttctgtcctgaggcttctgctctcattcatttagtgctacgctgcacagttctacactgtcaagggaaaagggagactaatgaggcttaactcaaaacctgggcatggttttggttgccattccataggtttggagagctctagatctcttttgtgctgggttcagtggctcttcaggggacaggaaatgcctgtgtctggccagtgtggttctggagctttggggtaacagcaggatccatcagttagtagggtgcatgtcagatgatcatatccaattcatatggaagtcccgggtctgtcttccttatcatcggggtggcagctggttctcaatgtgccagcagggactcagtacctgagcctcaatcaagccttatccaccaaatacacagggaagggtgatgcagggaagggtgacatcaggagtcagggcatggactggtaagatgaatactttgctgggctgaagcaggctgcagggcattccagccaagggcacagcaggggacagtgcagggaggtgtggggtaagggagggaagtcacatcagaaaagggaaagccacggaatgtgtgtgaagcccagaaatggcatttgcagttaattagcacatgtgagggttagacaggtaggtgaatgcaagctcaaggtttggaaaaatgacttttcagttatgtctttggtatcagacatacgaaaggtctctttgtagttcgtgttaatgtaacattaataaatttattgattccattgctttaaaaaaaaaaaaaaaaaaaaaaaaaaaaaaaaaa

SEQ ID NO: 137 - DNA, 1748 bp, Homo sapiens
agacgttccctcgcggccctggcacctccaaccccagatatgctgctgctgctgctgctgcccctgctctgggggagggagagggtggaaggacagaagagtaaccggaaggattactcgctgacgatgcagagttccgtgaccgtgcaagagggcatgtgtgtccatgtgcgctgctccttctcctacccagtggacagccagactgactctgacccagttcatggctactggttccgggcagggaatgatataagctggaaggctccagtggccacaaacaacccagcttgggcagtgcaggaggaaactcgggaccgattccacctccttggggacccacagaccaaaaattgcaccctgagcatcagagatgccagaatgagtgatgcggggagatacttctttcgtatggagaaaggaaatataaaatggaattataaatatgaccagctctctgtgaacgtgacagccttgacccacaggcccaacatccttatccccggtaccctggagtctggctgcttccagaatctgacctgctctgtgccctgggcctgtgagcaggggacgccccctatgatctcctggatggggacctctgtgtcccccctgcacccctccaccacccgctcctcagtgctcaccctcatcccacagccccagcaccacggcaccagcctcacctgtcaggtgaccttgcctggggccggcgtgaccacgaacaggaccatccaactcaatgtgtcctaccctcctcagaacttgactgtgactgtcttccaaggagaaggcacagcatccacagctctggggaacagctcatctctttcagtcctagagggccagtctctgcgcttggtctgtgctgttgacagcaatccccctgccaggctgagctggacctggaggagtctgaccctgtacccctcacagccctcaaaccctctggtactggagctgcaagtgcacctgggggatgaaggggaattcacctgtcgagctcagaactctctgggttcccagcacgtttccctgaacctctccctgcaacaggagtacacaggcaaaatgaggcctgtatcaggagtgttgctgggggcggtcgggggagctggagccacagccctggtcttcctctccttctgtgtcatcttcattgtagtgaggtcctgcaggaagaaatcggcaaggccagcagcggacgtgggagacataggcatgaaggatgcaaacaccatcaggggctcagcctctcagggtaacctgactgagtcctgggcagatgataacccccgacaccatggcctggctgcccactcctcaggggaggaaagagagatccagtatgcacccctcagctttcataagggggagcctcaggacctatcaggtcaagaagccaccaacaatgagtactcagagatcaagatccccaagtaagaaaatgcagaggctcgggcttgtttgagggttcacgacccctccagcaaaggagtctgaggctgattccagtagaattagcagccctcaatgctgtgcaacaagacatcagaacttattcctcttgtctaactgaaaatgcatgcctgatgaccaaactctccctttccccatccaatcggtccacactccccgccctggcctctggtacccaccattctcctctgtacttctctaaggatgactactttagattccgaatatagtgagattgtaacgtgaaaaaaaaaaaaaaaaaaaaaaaa

SEQ ID NO: 138 - DNA, 3116 bp, Homo sapiens
ggtgataatgaaagtggtggtggtgatggtggtaatactggtggtggtgacattggtggtggtggtgatggtggtgatactggtgatggtggtgatggtggtggcgctggtgaccctgacatggggtccagtagcagtgacagtggatgcaggctcctggtgactgaggagcatctcaggctgrggaggcacctctgatccccgccactgctccttaccccctacagtctctcagcaaacctgctgggcgacagcggactcagatgccttctggaatgtctgccgcagtgcccatctccggtttgcttgatctgagtcacaacagcatttctcaggaaagtgccctgtacctgctggagacactgccctcctgcccacgtgtccgggaggcctcagtgaacctgggctctgagcagagcttccggattcacttctccagagaggaccaggctgggaagacactcaggctaagtgagtgcagcttccggccagagcacgtgtccaggctggccaccggcttgagcaagtccctgcagctgacggagctcacgctgacccagtgctgcctgggccagaagcagctggccatcctcctgagcttggtggggcgacccgcagggctgttcagcctcagggtgcaggagccgtgggcggacagagccagggttctctccctgttagaagtctgcgcccaggcctcaggcagtgtcactgaaatcagcatctccgagacccagcagcagctctgtgtccagctggaatttcctcgccaggaagagaatccagaagctgtggcactcaggttggctcactgtgaccttggagcccaccacagccttcttgycgggcagctgatggagacatgtgccaggctgcrgcagctcagcttgtctcaggttaacctctgtgaggacgatgatgccagttccctgctgctgcagagcctcctgctgtccctctctgagctgaagacatttcggctgacctccagctgtgtgagcaccgagggcctcgcccacctggcatctggtctgggccactgccaccacttggaggagctggacttgtctaacaatcaatttgatgaggagggcaccaaggcgctgatgagggcccttgaggggaaatggatgctaaagaggctggacctcagtcaccttctgctgaacagctccaccttggccttgcttactcacagactaagccagatgacctgcctgcagagcctcagactgaacaggaacagtatcggtgatgtcggttgctgccacctttctgaggctctcagggctgccaccagcctagaggagctggacttgagccacaaccagattggagacgctggtgtccagcacttagctaccatcctgcctgggctgccagagctcaggaagatagacctctcagggaatagcatcagctcagccgggggagtgcagttggcagagtctctcgttctttgcaggcgcctggaggagttgatgcttggctgcaatgccctgggggatcccacagccctggggctggctcaggagctgccccagcacctgagggtcctacacctaccattcagccatctgggcccaggtggggccctgagcctggccaggccctggatggatccccccatttggaagagatcagcttggcggaaaacaacctggctggaggggtcctgcgtttctgtatggagctcccgctgctcagacagatagacctggtttcctgtaagattgacaaccagactgccaagctcctcacctccagcttcacgagctgccctgccctggaagtaatcttgctgtcctggaatctcctcggggatgaggcagctgccgagctggcccaggtgctgccgcagatgggccggctgaagagagtggacctggagaagaatcagatcacagctttgggggcctggctcctggctgaaggactggcccaggggtctagcatccaagtcatccgcctctggaataaccccattccctgcgacatggcccagcacctgaagagccaggagcccaggctggactttgccttctttgacaaccagccccaggccccttggggtacttgatggccccctcaagacctttggaatccagccaagtgatgcacccaaatgatccacctttcgcccactgggataattgactcaggaaagaagagcctcggcagggcgctctgcactccacccaggaggaaggatacgtgtgtcctgctgcagtcctcagggagaacttttttgggaaccaggagctgggtctggacaaaggagtaccctgcattacgtgggatatgtgtgatcaattggggacatgcgacacacaatgagggtgtcatgacaatgcatgacacgtacggttatatgtggcagtgtgaccccttgacatgtggcgttacatgaaagtcagtgtggcacgtgttctgtggcatgggtgctggcatcccaagtagcaggatacatgattgttggtctatatatgacacatgacaaatgtccatgtcacaggactcatggctggccagatgacctcaggctggcccaagatctaatttattaatttttaaagcaaatacatatttatagattgtgtgtatggagcagctaagtcaggaaaagtcttccgcccgagctgggaggggagagtgtccatgcactgaccagtccaggggctcaagggccagggctctggaacaagccagggactcagccattaagtcccctcctgcctcaatcctcagcctacccatctataaacttgatgactcctcccttacttacatactagcttccaaggacaggtggaggtagggccagcctggcgggagtggagaagcccagtctgtcctatgtaagggacaaagccaggtctaatggtactgggtagggggcactgccaagacaataagctaggctactgggtccagctactactttggtgggattcaggtgagtctccatgcacttcacatgttacccagtgttcttgttacttccaaggagaaccaagaatggctctgtcacactcgaagccaggcttgatcaataaacacaatggtattccaaaaaaaaaaaaaaaaaaaaaaaaaaaaaaaaaaaaaaactcgag

SEQ ID NO: 139 - DNA, 2339 bp, Homo sapiens
cccacgcgtccggggatgtttgcgagcggctggaaccagacggtgccgatagaggaagcgggctccatggctgccctcctgctgctgcccctgctgctgttgctaccgctgctgctgctgaagctacacctctggccgcagttgcgctggcttccggcggacttggcctttgcggtgcgagctctgtgctgcaaaagggctcttcgagcccgcgccctggccgcggctgccgccgacccggaaggtcccgaggggccctgcatcctggcctggcgcctcgcggaactggcccagcagcgcgcgcgaaactttctattacggtcgcgcgctttagctactcagaggcggagcgcgagagtaacagggctgacgcgccttcctacgtgcgctaggctgggactggggacccgacggcggcgacagcggcgaggggagcgctggagaaggcgagcgggcagcgccggaagccggagatgcagcggccggaagcggcgcggagtttgccggaggggacggtgccgccagaggtggaggagccgcgcccctctgtcacctggagcaactgtggcgctgctcctccccgctggcccagagtttctgtggctctggatcgggctggccaaggccggcctgcgcactgcctttgtgcccaccgccctgcgccggggccccctgctgcactgcctccgcagctgcggcgcgcgcgcgctggtgctggcgccagagtttctggagtccctggagccggacctgcccgccctgagagccatggggctccacctgtgggctgcaggcccaggaacccaccctgctggaattagcgatttgctggctgaagtgtccgctgaagtggatgggccagtgccaggatacctctcttccccccagagcataacagacacgtgcctgtacatcttcacctctggcaccacgggcctccccaaggctgctcggatcagtcatctgaagatcctgcaatgccagggcttctatcagctgtgtggtgtccaccaggaagatgtgatctacctcgccctcccactctaccacatgtccggttccctgctgggcatcgtgggctgcatgggcattggggccacagtggtgctgaaatccaagttctcggctggtcagttctgggaagattgccagcagcacagggtgacggtgttccagtacattggggagctgtgccgataccttgtcaaccagcccccgagcaaggcagaacgtggccataaggtccggctggcagtgggcagcgggctgcgcccagatacctgggagcgttttgtgcggcgcttcgggcccctgcaggtgctggagacatatggactgacagagggcaacgtgccaccatcaactacacaggacagcggggcgctgtggggcgtgcttcctggctttacaagcatatcttccccttctccttgattcgctatgatgtcaccacaggagagccaattcgggacccaggggcactgtatggccacatctccagggagcagggctgctggtggccccggtaagccagcagtccccattcctgggctatgctggcgggccagagctggcccaggggaagttgctaaaggatgtcttccggcctggggatgttttcttcaacactgggacctgctggtctgcatgaccaaggttttctccgcttccatgatcgtactggagacaccttcaggtggaagggggagaatgtggccacaaccgaggtggcagaggtcttcgaggccctagattttcttcaggaggtgaacgtctatggagtcatgtgccagggcatgaaggcagggctggaatggcagccctagttctgcgtcccccccacgctttggaccttatgcagctctacacccacgtgtctgagaacttgccaccttatgcccggccccgattcctcaggctccggagtctttggccccacagagaccttcaaacagcagaaaagttcggatggcaaatgagggcttcgaccccagcaccctgtctgacccactgtacgttctggaccaggctgtaggtgcctacctgcccctcacaactgcccggtacagtgccctcctggcaggaaaccttcgaatctgagaacttccacacctgaggcacctgagagaggaactctgtggggtgggggccgttgcaggtgtactgggctgtcagggatcttttctataccagaactgcggtcactattttgtaataaatgtggctggagctgatccagctgtctctgactacaaaaaaaaaaaaaaaaaaaaaaaaaaaaaaaaaaaaaaaaaaaaaaaaaaaaaaaaaaaaaaaaaaaaaaaaaaaaaaaaaaaaaa

SEQ ID NO: 140 - DNA, 2679 bp, Homo sapiens
ccacgcgtccgcctcagcggccgggcccacggccccgagcagccatgctgggcgcgcgggcctggttgggccgcgtccttctgctgccccgcgccggtgcaggcctcgccgcaagccgcaggtgtcctggagtctggcccaggacctggccccacaggagtcccagcaggggtagctcctcccgggacaaggaccgaagtgcgacggtcagtagttcagtgcccatgcctgctggagggaaaggaagccatccttcatctacaccccagagggtccccaaccgcctgatccacgagaagtcaccatacctcctacaacatgcctacaatcctgtggactggtacccctggggacaggaagccttcgacaaggccaggaaggaaaacaagccgattttcctctcagtcgggtactccacctgccactggtgccacatgatggaagaggagtccttccagaatgaggagattggccgcctgctcagtgaggactttgtgagtgtgaaggtagaccgtgaggagcggcctgacgtggacaaggtgtacatgacgttcgtgcaggccaccagcagcggcgggggctggcccatgaatgtgtggctgactcccaacctccagccctttgtcgggggcacctatttccctcctgaggatggcttgacccgagtcggcttccgcacagtgttgctgagaatacgagaacagtggaaacagaacaagaacaccctgctagaaaatagccagcgtgtcaccactgccctgctggcccgatcagagatcagcgtgggtgaccgccagctgccgccctctgccgccaccgtgaacaatcgctgcttccagcagctggatgagggctatgatgaggaatacggtggcttcgctgaggcccccaagtttcccacgccggtgatcctgagcttcctgttctcctactggctcagccatcgactgactcaggatggctctcgggcccagcagatggccttgcataccctgaaaatgatggctaacgggggcatccgggaccatgtggggcagggctttcaccgctactccacagaccgccagtggcacgtccctcactttgagaagatgctctatgaccaggcacagctcgctgtggcctattcgcaggccttccagctctctggtgatgaattctactctgacgtggccaaaggcatcctgcagtacgtggctcggagcctgagccaccggtccggaggcttctatagcgcagaagatgcagactcgcccccagagcggggccagcggcccaaagagggcgcctactatgtgtggacggtcaaagaggttcagcagctcctcccggagcctgtgttgggtgccaccgagccgctgacctcaggccagctcctcatgaagcactacggcctcacagaggctggtaacatcagccccagtcaggaccccaagggggagctgcagggccagaatgtgctgaccgtccggtactcgctggagctgactgctgcccgctttggcttggatgtggaggccgtgcggaccttgctcaattcagggctggagaagctcttccaggcccggaagcatcggcccaagccgcacctggacagcaagatgctggctgcctggaatggcttgatggtgtcaggctatgctgtgactggggctgtcctgggccaagacaggctgatcaactatgccaccaatggtgccaagttcctgaagcggcacatgtttgatgtggccagtggccgcctgatgcggacctgctacaccggccctggggggactgtggagcacagcaacccaccctgctggggcttcctggaggactacgccttcgtggtgcggggcctgctggacctgtatgaggcctcacaggagagtgcgtggctcgagtgggctctgcggctgcaggacacacaggacaggctcttttgggactcccagggtggcggctacttctgcagtgaggctgagctgggggctggcctgcccctgcgtctgaaggacgaccaggatggagcagagcccagcgccaattccgtgtcagcccacaacctgctccggctgcatggcttcacgggccacaaggactggatggacaagtgtgtgtgcctattgaccgccttttccgagcgcatgcgtcgtgtcccggtggcgttgcccgagatggtccgcgccctctcagcccagcagcagaccctcaagcagatcgtgatctgtggagaccgtcaggccaaggacaccaaggccctggtgcagtgcgtccactctgtctacattcctaacaaggtgctgattctggctgatggggacccctcgagcttcctgtcccgccagctgcctttcctgagtaccctccgacggttggaagaccaggccactgcatatgtgtgtgagaatcaagcctgctcagtgcccatcactgatccctgcgaattacgaaaactactacatccatgactgccccaacccccttggggtggggcagaaggtgaagcatcccaactgactagagactcaggccctgcagggccctatagaacctgtggccatccctgagcaccctgccaccaggtgacctcggccatactcactgccccccttgggcacccactcaccctagaataaacttaacagtgtcccgtggtaaaaaaaaaaaaaaaaaaaaaaaaaaaagggcggccgc

SEQ ID NO: 141 - DNA, 1277 bp, Homo sapiens
  misc_feature (1207)..(1207): n equals a,t,g, or c
  misc_feature (1272)..(1272): n equals a,t,g, or c
cgtttattcagcagaacatcagcttcctgctgggctacagcatccctgtgggctgtgtgggcctggcatttttcatcttcctctttgccacccccgtcttcatcaccaagcccccgatgggcagccaagtgtcctctatgcttaagctcgctctccaaaactgctgcccccagctgtggcaacgacactcggccagagaccgtcaatgtgcccgcgtgctggccgacgagaggtctccccagccaggggcttccccgcaagaggacatcgccaacttccaggtgctggtgaagatcttgcccgtcatggtgaccctggtgccctactggatggtctacttccagatgcagtccacctatgtcctgcarggtcttcacctccacatcccaaacattttcccagccaacccggccaacatctctgtggccctgagagcccagggcagcagctacacgatcccggaagcctggctcctcctggccaatgttgtggtggtgctgattctggtccctctgaaggaccgcttgatcgaccctttactgctgcggtgcaagctgcttccctctgctctgcagaagatggcgctggggatgttctttggttttacctccgtcattgtggcaggagtcctggagatggagcgcttacactacatccaccacaacgagaccgtgtcccagcagattggggaggtcctgtacaacgcggcaccactgtccatctggtggcagatccctcagtacctgctcattgggatcagtgagatctttgccagcatcccaggcctggagtttgcctactcagaggccccgcgctccatgcagggcgccatcatgggcatcttcttctgcctgtcgggggtgggctcactgttgggctccagcctagtggcactgctgtccttgcccgggggctggctgcactgccccaaggactttgggaacatcaacaattgccggatggacctctacttcttcctgctggctggcattcaggccgtcacggctctcctatttgtctggatcgctggacgctatgagagggcgtcccagggcccagcctcccacagccgtttcagcagggacaggggctgaacaggccctattccagcccccttgcttcactctaccggacagacggcagcagtcccagctctggtttccttctcggtttattctgttagaatgaaatggttcccataaataangggcatgagcccttcctcaaaaaaaaaaaaaaaaaaaaaaaaaaaaaaaaaaaaaaaaaaaaaanaaaaa

SEQ ID NO: 142 - DNA, 1266 bp, Homo sapiens
tcgacccacgcgtccgttttcagcaggattttcctttcagtgaaacataatttgacttgaaaggaacccagggaaaagtgtccaggtgtgagcatgagcgggtagaggtgtgcccttgtttgcttcaggctgtctgcttttcgcccctgactgttttttctgtttctggccatggaggaagagaaagatgacagcccacaggctgacttctgcctgggcaccgccctgcactcttggggactgtggttcacggaggaaggttcaccgtccaccatgctgacggggattgcagttggagccctcctggccctggccttggttggtgtcctcatccttttcatgttcagaaggcttagacaatttcgacaagcacagcccactcctcagtaccggttccggaagagagacaaagtgatgttttacggccggaagatcatgaggaaggtgaccacactccccaacacccttgtggagaacactgccctgccccggcagcgggccaggaagaggaccaaggtgctgtctttggccaagaggattctgcgtttcaagaaggaatacccggccctgcagcccaaggagcccccgccctccctgctggaggccgacctcacggagtttgacgtgaagaattctcacctgccatcggaagttctgtacatgctgaaaaacgttcgggtcctgggccactttgagaagccgctgttcctggagctttgcaaacacatcgtctttgtgcagctgcaggaaggggagcacgtcttccagcccagggagccggaccccagcatctgtgtggtgcaggacgggcggctggaggtctgcatccaggacactgacggcaccgaggtggtggtgaaagaggttctggcgggagacagcgtccacagcctgctcagcatcctggacatcatcaccggccatgctgcaccttacaaaacggtctccgtccgcgcggccatcccgtcctccatcctccggcttccagctgcggcttttcatggagtttttgagaaatatccggaaactctggtgagggtggtgcagatcatcatggtgcggctgcagagggtgacctttctggctctgcacaactacctcggcctgaccacagagctcttcaacgctgagagccaggccatccctctcgtgtctgtagccagtgtggctgccgggaaggccaagaagcaggtgttctatggcgaagaagagcggcttaaaaagccaccgcggctccaggagtcctgtgactcagatcacgggggc

SEQ ID NO: 143 - DNA, 2803 bp, Homo sapiens
cccacgcgtccgcgacccacgcgtccggggggaggtaactgcagtaagtcccgcttggccctggagtccacgcggattttcgaagctggggctggcaagaggccgctggacaccacgctccagtcgtcagcccacttcctagctgaacagcgcgaggcggcggcagcgagccgggtcccaccatggccgcgaattattccagtaccagtacccggagagaacatgtcaaagttaaaaccagctcccagccaggcttcctggaacggctgagcgagacctcgggtgggatgtttgtggggctcatggccttcctgctctccttctacctaattttcaccaatgagggccgcgcattgaagacggcaacctcattggctgaggggctctcgcttgtggtgtctcccgacagcatccacagtgtggctccggagaatgaaggaaggctggtgcacatcattggcgccttacggacatccaagcttttgtctgatccaaactatggggtccatcttccggctgtgaaactgcggaggcacgtggagatgtaccaatgggtagaaactgaggagtccagggagtacaccgaggatgggcaggtgaagaaggagacgaggtattcctacaacactgaatggaggtcagaaatcatcaacagcaaaaacttcgaccgagagattggccacaaaaaccccagtgccatggcagtggagtcattcatggcaacagccccctttgtccaaattggcaggtttttcctctcgtcaggcctcatcgacaaagtcgacaacttcaagtccctgagcctatccaagctggaggaccctcatgtggacatcattcgccgtggagactttttctaccacagcgaaaatcccaagtatccagaggtgggagacttgcgtgtctccttttcctatgctggactgagcggcgatgaccctgacctgggcccagctcacgtggtcactgtgattgcccggcagcggggtgaccagctagtcccattctccaccaagtctggggataccttactgctcctgcaccacggggacttctcagcagaggaggtgtttcatagagaactaaggagcaactccatgaagacctggggcctgcgggcagctggctggatggccatgttcatgggcctcaaccttatgacacggatcctctacaccttggtggactggtttcctgttttccgagacctggtcaacattggcctgaaagcctttgccttctgtgtggccacctcgctgaccctgctgaccgtggcggctggctggctcttctaccgacccctgtgggccctcctcattgccggcctggcccttgtgcccatccttgttgctcggacacgggtgccagccaaaaagttggagtgaaaagaccctggcacccgcccgacacctgcgtgagccctaggatccaggtcctctctcacctctgacccagctccatgccagagcaggagccccggtcaattttggactctgcactccctctcctcttcaggggccagacttggcagcatgtgcaccaggttggtgttcaccagctcatgtcttccccacatctcttcttgccagtaagcagctttggtgggcagcagcagctcatgaatggcaagctgacagcttctcctgctgtttccttcctctcttggactgagtgggtacggccagccactcagcccattggcagctgacaacgcagacacgctctacggaggcctgctgataaagggctcagccttgccgtgtgctgcttctcatcactgcacacaagtgccatgctttgccaccaccaccaagcacatctgtgatcctgaagggcggccgttagtcattactgctgagtcctgggtcaccagcagacacactgggcatggacccctcaaagcaggcacacccaaaacacaagtctgtggctagaacctgatgtggtgtttaaaagagaagaaacactgaagatgtcctgaggagaaaagctggacatatactgggcttcacacttatcttatggcttggcagaatctttgtagtgtgtgggatctctgaaggccctatttaagtttttcttcgttactttgctgcttcatgtgtactttcctaccccaagaggaagttttctgaaataagatttaaaaacaaaacaaaaaaaacacttaatatttcagactgttacaggaaacaccctttagtctgtcagttgaattcagagcactgaaaggtgttaaattggggtatgtggtttgattgataaaaagttacctctcagtattttgtgtcactgagaagctttacaatggatgcttttgaaacaagtatcagcaaaaggatttgttttcactctgggaggagagggtggagaaagcacttgctttcatcctctggcatcggaaactcccctatgcacttgaagatggtttaaaagattaaagaaacgattaagagaaaaggttggaagctttatactaaatgggctccttcatggtgacgccccgtcaaccacaatcaagaactgaggcctgaggctggttgtacaatgcccacgcctgcctggctgctttcacctgggagtgctttcgatgtgggcacctgggcttcctagggctgcttatgagtggttctttcacgtgttgtgtccatagctttagtcttcctaaataagatccacccacacctaagtcacagaatttctaagttccccaactactctcacacccttttaaagataaagtatgttgtaaccaaaaaaaaaaaaaaaaaaaaaaaaaaaaaaaaaaaaaaaaaaaaaaaaa

SEQ ID NO: 144 - DNA, 961 bp, Homo sapiens
tcgacccacgcgtccggtattttctaaaacaataaatttatagtgttaatattcatagggtcaatcaaaatgaagcttctcctttgggcctgcattgtatgtgttgcttttgcaaggaagagacggttccccttcattggtgaggatgacaatgacgatggtcacccacttcatccatctctgaatattccttatggcatacggaatttaccacctcctctttattatcgcccagtgaatacagtccccagttaccctgggaatacttacactgacacagggttaccttcgtatccctggattctaacttctcctggattcccctatgtctatcacatccgtggttttcccttagctactcagttgaatgttcctcctctccctcctaggggtttcccgtttgtccctccttcaaggtttttttcagcagctgcagcacccgctgccccacctattgcagctgagcctgctgcagctgcacctcttacagccacacctgtagcagctgagcctgctgcaggggcccctgttgcagctgagcctgctgcagaggcacctgttggagctgagcctgctgcagaggcacctgttgcagctgagcctgctgcagaggcacctgttggagtggagccagctgcagaggaaccttcaccagctgagcctgctacagccaagcctgctgccccagaacctcacccttctccctctcttgaacaggcaaatcagtgaaattctctagaagagtaccatgggttcatttctatactgatgcagaaataagtgaaatctacaaaagttttctttcttttccaaagactatttcattctgttgtattcagagtattcatctcactacattgatttgtttgtggtagtttttccttggacttaatttatattgaaaaaacattgataattaaataaataaaatagataatttagaccaaaaaaaaaaaaaaaa

SEQ ID NO: 145 - DNA, 2207 bp, Homo sapiens
ccacgcgtccggaaaaagggaaaagatgccgtgtaaaatctcgttctgtgtctgaattgccgtagggctcagatcttcatttgaggttctgtgtctgaattgccgtagggctcagatcttcatttgaggttatgttctataagttaacgttgatcttgtgtgagctttcggtagctggagtaacacaggcggcctcacagcgacctctccagcgccttccaaggcacatctgcagccagcgtagctcctcctgggagatgcctcctcaaggccctgctccagaccacgtggggagggcctgacagccaattcccaggctgtccccacccttggagagtgaccctaaacgctagacagatggggaatgggaaagaaaagaaagctgcagacctcaagttaaaattccctcaaaaacgtttttatttatctgctttttctgaaaggataaaggctttttgaaaattattttctaacaaataacatgaacacttctagaaaccctagaaaaacacaaagtattcaaaatagaaagaaaaattacccattactctttaagccagcattatccattgcggtgcttttggagttgggtgaggccgtagcctctgccaagtcaaggagcccggtggtggctgtggcattcctgcagggttgtttttttttctttgagatggagtctcactcttgtcaccccagctggaatgtggtggtgtaaacagctcactgcagccttgaccctgaggctcaagcgatccttctgccttggcctcctgagtagctgggatcccaggcgagagtcaccacaccctgtccatgttcctgcaggtcttgatatgcgaggacgctgtgtcttccctgccacattttcttcttctttcttgagacagacccttgctccatcacccaggccagagtgtggtggtgcgaacacggctcactgcagcctcgaccctcaggctcaagcgatcctcacgcctcggacccccaaagtgctgggatcacaggcgagagtcaccatgctggcctgaatcttcagggtattttacggttgaagtgtcacttacttaaccatccctgtttcaagagtgtaggtggtcaccctgtctctgccgctgacctggcctggaccctcggctgtgagagggaggggtgggctgggctggaggaacctgaagccctcgtgatgtcacaagcccatctggctgggcatcccctgctgtgtcctgagctgcacatgccccaggtggcccccacagcagaggcgagccactggagggtggagggcttccacgggacggtcttcagggggagaaggaagggcccaggcccccaggagactcaggagaccagagcctggggtcaggggctcagccaggggctcagccagggctggatgtccggagccagccccgcagccctgtgttctttgttcttcgcactcccaccgtccgtgtgaacagctccagccccacctgcgcctccctgtgctgggctccatcagggagcccagaagacgtgtgtgcttctgaaattgggtccctacatgcctttgtcccagtgcaccttgctccttccatttactatcgagatttaaatgcctgttttctccccagaggttgacggatatattcagacgttacgacacggatcaggacggctggattcaggtgtcgtacgaacagtacctgtccatggtcttcagtatcgtatgaccctggcctctcgtgaagagcagcacaacatggaaagagccaaaatgtcacagttcctatctgtgagggaatggagcacaggtgcagttagatgctgttcttcctttagattttgtcacgtggggacccagctgtacatatgtggataagctgattaatggttttgcaactgtaatagtagctgtatcgttctaatgcagacattggatttggtgactgtctcattgtgccatgaggtaaatgtaatgtttcaggcattctgcttgcaaaaaaatctatcatgtgcttttctagatgtctctggttctatagtgcaaatgcttttttagccaataggaattttaaaataacatggaacttacacaaaaggcttttcatgtgccttacttttttaaaaaggagtttattgtattcattggaatatgtgacgtaagcaataaagggaatgttagacgtgtaaaaaaaaaaaaaaagggcggccgctctagaggatcc

SEQ ID NO: 146 - DNA, 2070 bp, Homo sapiens
ttttggtttttttttttttttttttttttccatctttgaagtcctttattcccagcagttcacatcagttactcattgagctggggttcgtcatattaaccaagaattcattcatctttcttttgatattgtaatcttgtcctcatctccacaactgagttggggcctgaggggtttaagagttctcactccatcacaggaggcaaggggtacccttgtgaaccagacttcaactcctggaagtcttgttcagttcataggcaaatatctttgcaagtttagtatgagacagcccaacggttaaataaataagacacagtgccatggttctaggcatttggagagggaaaaggcacattacacagattcccctggagaaaatacaggccattctcatcttctcaacatgcattttcccactcttcagtgacttttaatcttatcccctggtctatgagaaaccataacccacgtgctactgaatacatttttattttcccttcatgacatagacttggttccaagtatattttattttcctcccttatgcctacaagacatccaattttgttcaggtcccttttaatggcacttaataaatatacattctgagacctggcagaacaggctgtcccctttcacactgcctttaaagcgcctgtttgaactagctagtgcagagctcaggtggggcacgtcctagcttacagctcwtggccatctctggcaccaggtctatctgtccaatactttgtgtctagggtagaggtccctaaccctggctgcacattggaagcacctgggaagctttctgaattcctgaggcccgagccacaccctaaaccaatttcatcagaatctctgggtgggacggagcctggattctgccagttgaaacctgccatggtaacttcagtgagcagctacactgagaactcctgagctacaattctagcacacagtaggccttcggtaggtatctgtggaacccacgagtgggtttcctatttcattatctgttcccctatgctctctatttttatcagaaatctgagcaggaaagagcagagagaatgagtcaagagcatcctctcaagtgaattcgctgctgagaaaggaaccgtagggcttgcatttctcttgtgtcatgcagtcttcatgctttaacaggcccagaggaggcaagttatagactgacacagacatgtatatatttcttaaaagcccttcaaaaaccagagctcactgcttaggcactatggttataacacagacatgttcttggaagcatatctaaactacctcctgtttgacacacattctaacttgggttggttacaaactttgtcagttgttaagatcacacttggtcacattttcccatttctgtgaatcttgcaacttatctttgcccagagcaacagcctagacatgaccaccccaagcagggactgcactgcacccaacattgccccagcaggtcagtcctccttgaacaggaactgtttttgaggggctccaatttccaggttctagaatggggtggctcacttaccaagttaaagaggctggctacatagaatgcagtattgagaagccccccaaggtagatcctgggttacaggaaagaaagctatactgatgaacaaggtttgctgccacaggcatgggcgtgggggagggcagcatgccgggggccaccccgagatcactgctgtcatttacatttgtatcacacttcacagtttacagggagctctgcatgcttagccccatgtcattctcagcacaaccctgtgagtgaggtctttctggatgggaacactgaagttgtgtcctacatctaaggtcccacagccaattgcatcacatccacggctgcctccaggacctcaggggccacctgaaaccactgggggttccccctggctccccttctaaccagaaacaggaaagcaagccattccctaacctccccacccaccaggccttatcaccgccttcccagagtttcctctatgatttgcatacccctttgttccctagtcctgagaacacagcagagctttc

SEQ ID NO: 147 - DNA, 566 bp, Homo sapiens
  misc_feature (68)..(68): n equals a,t,g, or c
ggctatttaggtgccctatagggaaagctggtacgcctgcaggtmccggtccggaattcccgggtcgncccacgcgtccggtcagagagaaagaactgactgaaacgtttgagatgaagaaagttctcctcctgatcacagccatcttggcagtggctgttggtttcccagtctctcaagaccaggaacgagaaaaaagaagtatcagtgacagcgatgaattagcttcagggttttttgtgttcccttacccatatccatttcgcccacttccaccaattccatttccaagatttccatggtttagacgtaattttcctattccaatacctgaatctgcccctacaactccccttcctagcgaaaagtaaacaagaaggaaaagtcacgataaacctggtcacctgaaattgaaattgagccacttccttgaagaatcaaaattcctgttaataaaagaaaaacaaatgtaattgaaatagcacacagcattctctagtcaatatctttagtgatcttctttaataaacatgaaagcaaaaaaaaaaaaaaaaaagggsggccgc

SEQ ID NO: 148 - DNA, 1242 bp, Homo sapiens
gcgtccgcacctcaggccctccaagcgcaggatgcaggccgtggccaacgtgtccattggggccatgttctgcatgtatgggctcacagcaacctttggatacctcaccttctacagtgagtggggctggggctagggctggggggagggggaaggcctggggcaggagcctctgagctctttccttctgtgaccacggacctgtcaagtttccaaacagaaaggtgtgcctcacttgtgtggattttgtcacttgtgcatgtatgtatgggtttctggggcattggtcctggtgctctctccacatcctgcatcccgtaccctctgtctcatggcccaggcagtgtgaaggcggagatgctgcacatgtacagccagaaggacccgctcatcctctgtgtgcgcctggccgtgctgctcgcggtgaccctcactgtgccagtcgtgctgttccctatccgccgggccctgcagcagctgcttttcccaggcaaggccttcagctggccacgacatgtggccatagctctgatcctgcttgttttggtcaatgtccttgtcatctgtgtgccaaccatccgggatatctttggagttatcgggtccacctcagcccccagcctcatcttcatcctccccagcatcttctacctccgcattgtaccctctgaggtggagcctttcttatcctggcccaagatccaggccctgtgctttggagtcctgggagtcctcttcatggccgtcagtctaggctttatgtttgccaactgggccacaggccagagccgcatgtctggacactgatcaggccctgctggcccaggtccctgtgcgcatgcacatggaggggtcagggccgctccctagggtccctcctgcccaacatgtggaggtggctggttcccatgaacgtggttgtcagaggcgggggacaagcagaggcttgcagactggcccacttccctcctccccaagggatgccaagcttggatcatggccctaatcccaaccccaaccccatgggaggaggaggaggaggaagaagaggaggaggaggaggaggaggaggcggaggaggaggaggccaggtcctggtggagcctttgcccagcccagtcctctctgcctcctcctggctgaagctgtttgtcaggattaccctcgggctaaagaggaaaaataaagatgttgagctaccaaaaaaaaaaaaaaaaaaaaaaaaaaaaaaaaaaaaaaaaa

SEQ ID NO: 149 - DNA, 712 bp, Homo sapiens
  misc_feature (26)..(26): n equals a,t,g, or c
  misc_feature (28)..(28): n equals a,t,g, or c
  misc_feature (77)..(77): n equals a,t,g, or c
  misc_feature (117)..(117): n equals a,t,g, or c
  misc_feature (124)..(124): n equals a,t,g, or c
  misc_feature (696)..(696): n equals a,t,g, or c
taggcccgggacggttacaatttacncnggaaccgctttgcccataggctttgcaaaaagctttttaggtgccactntagaaggtacccctgaaggtaccggtccggaattcccggntggaccnacgcgtccgaggaggtcytttaggaagactctcaaaggcaaatccctgatcccccgccccacccttagccctgccctctcaccagagcaaaattcactggggacttttcccaccacacatggaaatctgtccactcggaatacctctgttttccatttcaaattgtagggggaggggatggaacacttccagtgatggtaagagatctgttatgaaacgaaacaccccccgtgttaataacttggtctgaaatctgtttttatgagccgggccccctgtgcctctagtatacttgtattgactctcatagttacccttttagttttactgtgttctgtgaaaatttgtaattggttgagaatcactgtgggcgtccattcttattcaactaaatctccacaggttttttgagctggtgtggattagtttaactcttgtattcaaccattagtgctaccaccttctcacattacaatacaattactggaagcaagtactgcatttcctatgcaacaaaaaaggaaaaataaaaaattgctaatgctaaaaaaaaaaaaaaaaaaaaaaaaaanaaaaaagggcggccgc

SEQ ID NO: 150 - DNA, 1200 bp, Homo sapiens
ccacgcgtccggaattttgttgttctctgtctctttgatttcctggaagacgacaccatgacaatttcaaagaaaatagaacaaaatgaaggaaaaagaggctctgtcttagcacattcctgtgaccagcctgctgtctgtggtgtgccctcctggcccggccttggcacatgttcgtttttgtggttgttgcctggacaggcaactctgcagggctgcttctctacgcatccctttgcctgcctgcctgtgccaggggttgtcaagggcttttgggtcagagtgggcacccctttctccaaggctccctgcaaagctggcctgtccctggtggggctgacagcttccttctcaccctgccaggctgcccaagcgccagaggtgacctatgaggcagaagagggctccttgtggacgttgctactcactagcttggatgggcacctgctggagccagatgctgagtacctccactggctgctaaccaacatcccgggtaaccgggtggctgaaggacaggtgacgtgtccctacctcccccccttccctgcccgaggctccggcatccaccgtcttgccttcctgctcttcaagcaggaccagccgattgacttctctgaggacgcacgcccctcaccctgctatcagctggcccagcggaccttccgcacttttgatttctacaagaaacaccaagaaaccatgactccagccggcttgtccttcttccagtgccgctgggatgactccgtcacctacatcttccaccagcttctggacatgcgggagccggtgtttgagttcgtgcggccgccccttaccaccccaagcagaagcgcttcccccaccggcagcccctgcgctacctggaccggtacagggacagtcatgagcccacctatggcatctactaaggagccagagtgtgcgcatttcagagcatgggattgatcggcagcaagagtaaagacacagctccagaggcccacactgtggggtctgggccctgccttaggcagcccccctctttggccccctcccgtcaggcccagggcttggagtgaaagtgactctcaggtggtggggtggggaatgtgaataaacatgatttcttgccgggaaaaaaaaaaaaaaaaaaaaaaaaaaaaaaaaaaaaaaaaaaaaaaaaaaaaaaaaaaaaaaaaaaaaaaaaaaaaaaaa

SEQ ID NO: 151 - DNA, 1352 bp, Homo sapiens
ccacgcgtccgacagcagagatctgtggagtaggattgtgggctggcagtgggtttatcccacagacctaagacagctacttaatttgtatagacccttcccagcctgggcctctgggttttccttctgggtggagatcatcttctgtaggaaatggaactgcttcaagccaagaagcttttacttttactaggtctttttgtgtcctgctgttcaaatattaggaagactgaaccctgtttcggtcttgacagtattacgtttcgtgatcccaaaaaaaagtgtttgtgtaacctcaagtcatgctgaaagtgaaatacagcttaaagtgggattctgctggacctgactcaacttttcacctcaccgcttggctccgtgcaggcagtatttgagtatgtggttccccctcaagtctgtaggagttgtattgtcaataaagtccaaggccagagtgcttgctttctagtaagtagagagaatttttgaaattcaacgacaaacatttattaagcccttattgtgtacagggctcaaagctaagtgctttgggtgattcagggtgattagggataggattccatcttcaagaagcctcccatctaggaagaaaggtcgataagcatagttttggacacatgggagagcatggctttctctgggcccagtaattactttggtatccagatcattagagaacggaatgccttctattgaactatgtaacagtcacaggtttagatcttctcaagttattattgcctttaatcttcatatgattcctatcctgcagttaggaaatggaaaccctaggatatagtgactgtgagctcagaaaattaggttgggagataagccagtagattgaggtggtagattcttcaagatcttgaaggggggaaggtggggggggggacgggggagctgtccccagctatatttgcccttggcagatgggatggattctgggagaaagctctaagaaattaggcctgtacgacttattttcatgaatctagctgctaagctggaataagtgaagttaaaagtagtgatgggccaggcacggtggctcacacctgtaatcccagttctttggaaggctgaggcaggcggatcatgaggtcaggagttccagaccagcctggtcagcatggtgaaaccccgtctctactaaaaatataaaaattagccaggcatagtggcacgtgcctgtaatcccagctactcaggaggctgaggcaggagaatcccttgaacctgggtggcaggggttgcagtgagctgagatcgtgccactgcactccagcctgggtgacagaatgagactccgtcttaaaaaaaaaaaaaaa

SEQ ID NO: 152 - DNA, 639 bp, Homo sapiens
ggcacgagcattcacaggttacaaatgctgctgccaactgtcctggccaaatgactctgcatcacaaacctttccttgcatgtggaggggatggatttactcagtccaactttgatggctgcatcacttctgccctatgtgttctggaagctttaaagaattatatttagtgcctatatccttattctctacatgtgtattgggtttttattttcacaattttctgttattgattattttgttttctattttgctaagaaaaattactggaaaattgttcttcacttattatcatttttcatgtggagtataaaatcaattttgtaattttgatagttacaacccatgctagaatggaaattcctcacaccttgcaccttccctacttttctgaattgctatgactactccttgttggaggaaaagtggtacttaaaaaataacaaacgactctctcaaaaaaattacattaaatcacaataacagtttgtatgccaaaaacttgattatccttatgaaaatttcaattctgaataaagaataatcacattatcaaagccccaaaaaaaaaaaaaaaaaaaaaaaaaaaaaaaaaaaaaaaaaaaaaaaaaaaaaaaaaaaaaaaaaaaaaaaaaaaaa

SEQ ID NO: 153 - DNA, 1434 bp, Homo sapiens
cattaaactctttttatcgggaatagtatgatattttcaatgtcactccattcatgttgatttggagctgacagttattttgtgtaagcagagatttaattttatattgaaagtcagtgcaaaattatgaataggatatactaataaatacaaagtaataacaaaagtcaaagcagtgttctaaataaaaattctgggttccttaaaaattattttaaatttatcttgaaatagttttcttagattaatctcaggatatgagaaagtcaattaagtgtgagtaaagttagtatcattaaacaaattgtctattaaatgcamgagtggtaatatacagaatttatcaggcattaccaagtctaggcacatataggaaatgcagcactcagaatggtttcaatgtagtagttgatgcttgtaaggtaggggagcttattcagacatagtagatagtttctctaatgctgtstcaattgctggcctttggctacctgtacttccscattatggcagcccattcagtcttgagttttcttctctggacaccttatgctctgaaatcatgagcgaggctgattcaattggtgatttgggtagaaagcagtatgttttgctgacattaagatgtaggttatagataggtttagcctttaagtgtatgtttttatactttaaaataagaaatataaccttttaagctattccacctcctcccccagcctatctcaaactggtggaatatatggagagatcttgaaagaagtaaaataaaccttcactgctccactccaggtgaatccgcccactcccactgacctagtagaatttgtaatttaatacttaccttctatttctgaaatcagttgtgaactgttgccttatgttcagargtttaagaacctcmgtgaattcattttttaaaatctgctattctgagaagcattgaatgaattcttaacaagaagactcatctgtagctgtttgctgactcctatgagccccataagggttctgtgcttagcattaacaaaataaggtttataggtaaagccaatgtattaatttttttttgcatggagggctttaaaatttgtgctctttttcatattttattcatattcaatttatggtttgtaactgctttttagggagataattatatgttataaattagttttggggggaataattgtgcaaagaggataatttaatttacgtgcttctgttattcagaataaagagagaagactacgctgcatattcaagagttgtaccttaacattggtgaaacattttttctaagattttcaaaaggaatatgtgtaaattgagaaatcataaccactgtcctaacttggtaaacaaactgttcttaaataaagtatttaatgattttaaaaaaaaaaaaaaaaaaaaaaaaaaaaaaaaaaaaaa

SEQ ID NO: 154 - DNA, 370 bp, Homo sapiens
ggcacgagttgcggtgaaccagaattataacagtgagctcatctgactgttttaggatgtacagcctagtgttaacattcttggtatctttttgtgccttatctaaaacatttctcgatcactggtttcagatgttcatttattatattcttttcaaagattcagagattggcttttgtcatccactattgtatgttttgtttcattgacctctagtgataccttgatctttcccactttctgttttcggattggagaagatgtaccttttttgtcaactcttacttttatcagatgatcaactcacgtatttggatctttatttgttttctcaaataaatatttaaggttaaaaaaaaaaaaaaaaaaa

SEQ ID NO: 155 - DNA, 2067 bp, Homo sapiens
aattcggcacgagcttttaataggaagtaatgtctcacccaagagaaatgaagagcagggaagagtgactttctccttctccctccctctcccctggatatggaactcaaccattatgcactgcttctttttgtggttgctgctttttggacttcttggaattagtggtttccttggttatatttcagtggctggtarcagtatatatgtcatgtggaaggtggaraaggaaatgaatacttaggtctcaaagacccactctccatggctgctttagcagatggctgtttctttctctcccttgcaggttggggataggattgtcaccatctgtggcacatccactgagggcatgactcacacccaagcagttaacctactgaaaaatgcatctggctccattgaaatgcaggtggttgctggaggagacgtgagtgtggtcacaggtcatcagcaggagcctgcaagttccagtctttctttcactgggctgacgtcaagcagtatatttcaggatgatttaggacctcctcaatgtaagtctattacactagagcgaggaccagatggcttaggcttcagtatagttgggaggatatgggcagccctcatgggagacttacccatttatgttaaaacagtgttttgcaaaggggagcagcctctggaagacggacgtcttgaaaaggggggcgattccagatcattgctgtcaatgggcagagtctagawggagtcacccatgaagaagctkttgccatccttaaacggacaaaagggcactgtcactttgatggttctctcttgaattggctgccagaattgaaccaacccaacccctagctcacctcctactgtaaagagaatgcactggtcctgacaatttttatgctgtgttcagccgggtcttcaaaactgtaggggggaaataacacttaagtttctttttctcatctagaaatgctttccttactgacaacctaacatcatttttcttttcttcttgcattttgtgaacttaaagagaaggaatatttgtgtaggtgaatctcgtttttatttgtggagatatctaatgttttgtagtcacatgggcaagaattattacatgctaagctggttagtataaagaaagataattctaaagctaaccaaagaaaatggcttcagtaaattaggatgaaaaatgaaaatataaaataaagaagaaaatctcggggagtttaaaaaaaatgcctcaatttggcaatctacctcctctccccaccccaaactaaaaaaaraaaaaaaggttttctaatgaaaatctttaaaaatactgtcagtattttaaaattttcaacagtattataaaaacattgcatctccccacctctaatatgcatatatatttttcctgctaaaattggtttctacaattgagtaaatggcaaatacatgaagcaatgtccctaaattttataaagaaattatatttaatgcacatttcaattttcattcttatttttgaccttttgtaaaatattttcatgttgctataagtaaatgatgatgccaccccakgttgactatggkttttctagaaagcaactatgctgctaaccatagaggaacatagaagggttccagaatctttagtgctggttttaacaaccgatgcaacattaaaaatgtgttagtgtgctgtgcaattggttttcaattcatattaatcttaatgacagagaacaatgtgttactaattattttggttgtatgccattagtaaattgatagaaaaattaaggggattaacataacttcatttcattgccttatattaacatcttataatacaatagtttaagactaagggaaacagatggagctgtttattgagacaactggtgaggaattatcatgtgttcattcccattttagagcgtgaaactcctacattagaatatataaagtcactttaaatatctatatttgtaacagaagtagtgtacagatattttattacagcatttttgtgtaaatgcagaattaaagtgaataaataagaattttcagtggtgcacaaat

SEQ ID NO: 156 - DNA, 867 bp, Homo sapiens
ggcacgagcaggtactgggtgactgcctggctgaggaaaagttaactagacacttggggaaaggagatccaagggagtaagaggcaaaatgcctttgcatgcttttcttcctatctctttttctttctctccttctcactctctcccttccttcctttcttcctttctctttcttttttttttctcttttcccccacctctctgcctgcctccttccttccctcccctcccctcccttccccctccctccctccctcccttccttccttccttccttccttccttccttccttccctccctcctctctccctccttccctgccttctttccttcgttctgccaacttgccagaaggagcccaagaaaaagcacccagatgcttcagtcaacttcttagaattcttcttttttttatgttcagaaaagatggaaattcatttctgctaaagagaaagaaaaaattggaagacagggtgaaggtgaacaggcccattataagaaagaaacaaaaatctatattctgtctacaaggaagcgagagagagaaagagagagaagaaagaagttccaggattctaatgtaccaaagggatctcctttttcttgttttgttctgaaaatttcaccaaaagagcacaggagaacatcttggctaattcattggcgatgatgtaagaaaactgagagaaatgaaagaaatgaagaattactgctgcagataatatacagccttgaggaaagaaaggcttttaagattatagatataaaggctattgctgtattctgggataaaagaaagtctgatgtcagggaaaggggaagttggaaaaactggaaaaagaaaaaagaaaaaaaaaaaaaaaaaa

SEQ ID NO: 157 - DNA, 1422 bp, Homo sapiens
gtctccgctcctgtgcccgggaagatggtgctaggtggttgcccgaatcacgccattttttaacatctctttttgatcaaacaagaaaaagcatttgggaaatgcaaagaggactgagaatactttggcttaaattttgcccccagaatcttgttgtttgcctactgaagagatgaaaccatggcagaagtagaatccttatagaaacaggaccagaaacacctcccttctccaacaaaaggttcattttggtggctgtccgtttgacctgctgtgcttcagtttaattggcttggaaaggggtcagcagggtgaaaccgaaccccagaaaacttgatgaagaaatgtcttttgcccgttttgattacgtgcatgcaaacagcgatttgcaaagaccgtatgatgatgatcatgatcttactggtgaattacagacctgatgaatttatagaatgtgaagacccagtggatcatgttggaaatgcaactgcatcccaggaacttggttatggttgtctcaagttcggcggtcaggcctacagcgacgtggaacacacttcagtccagtgccatgccttagatggaattgagtgtgccagtcctaggacctttctacgagaaaataaaccttgtataaagtataccggacactacttcataaccactttactctactccttcttcctgggatgttttggtgtggatcgattctgtttgggacacactggcactgcagtagggaagctgttgacgcttggaggacttgggatttggtggtttgttgaccttattttgctaattactggagggctgatgccaagtgatggcagcaactggtgcactgtttactaaaaagagctgccatcatggcccagggaggcgggtgaaagctccgtcttctgaattcatctctacaggctcaaaactcctctttgatatcagacctgatgttattttccttcttttggagggcatttgtttggttaagaaggcttctttggactttggaatttcaacccagattttaccttgcagacggaatgacaagcaaaaagtgttgtggggaatcaaatttgttcctttcctcatgcacaaaacataaaggatagtggcgagtttacaagctgtggatgggtttccatagtcttcctttctgtacattgctatatcttcagtcctttggagcaagtggacctaacaagttgagcaaaatgaatatttggatccatgttcctcttgtgaccctgagtcttcatgcaaggagatctgaagctgaacaatgaaaatcttcagcagaaatagaaatggccgtggattgtaatacacactgaaattctgactttctgaatttaaatgtagaataaattttaccaacttggaaaaaaaaaaaaaaaaaaaaaaaaaaaaaaaaaaaaactcgag

SEQ ID NO: 158 - DNA, 1288 bp, Homo sapiens
cccccgggctgcaggaattcggcacgagcctgacctccccagcctcatctctccctcctctgctctcgccctctgtgctccagccaacgtggcctgtcactcgtccacctgccatactgtcctgactccaggcctttgcctgtgctatggcctctgttgggaccactcttgtctctcccctgctgtgtctgctaattcccactcgtgtcagtgatccatggctgcagaacacaccactccatccatggaaaacaatcacaatcattgattactatctctccctgggcttcctggggtggactgggctcagctgggtggttcactttggggcctcagcagtcatgggcagacagtggctggggtcactgcaaagacttccctgcatctctggcagttgatgctggctgtcatctgagacacctacccagggcctctccctggggcctgggctcctgcttagcttggttgggaggctccaagaccaacatcccaagaaagatgagacagaagccagatcacctttttgggcctggcttcagaagtcacccagcatcacttctgctgcatttatttcttaaaacacaaatatcaaaccccatctcttgatgggagggggcctcatggtttgtaaacatgttctaaactccactctgcccggccttggctcaacgtgtctggtaatgtgtgggctgtgaggctccccgaacgtagacctcagactgcaacgctggccgttacagggtctggcacacgggcccacgtcaggcccatcgccacagtgatggttgttctgtgactgtttctggtggcctctgctccacactccaggctgacgctgtgccccttccactgggaccctcgggtggcttccatgcacttgtgccctaaatcctgctcctagactaaacttcatctcctgtgttctcattctgcagcatggctgttagggaacctgaccatctgcagcgcgtctcgttgccaaggtataatgtcagtgcctcccttcagtggctcccatgtcacagaattgtcctgcagccctggcacatgtgtgccatgtgggagctggggcaggtcctctttcatcctgtggctccgagggagggggccgctccttccccagtctctaccctgacttggccctcgtcctgcagccactcagagagcacgatggagctggagcttcagttttgaccaaatgcgtgtcgccggcttttgtgtgtgtgtgtgtgtgacagagccagaccctgtctttaaaaaaaaaaaaaaaaaactcgagggggggccc

SEQ ID NO: 159 - DNA, 1152 bp, Homo sapiens
  misc_feature (668)..(668): n equals a,t,g, or c
  misc_feature (745)..(745): n equals a,t,g, or c
  misc_feature (1015)..(1015): n equals a,t,g, or c
  misc_feature (1088)..(1088): n equals a,t,g, or c
  misc_feature (1110)..(1110): n equals a,t,g, or c
  misc_feature (1113)..(1113): n equals a,t,g, or c
ctcaaggatgtaaaggctctgcagatttcgggaggcctgtctcccagcacctgatgggacactttttgccccactgtaaattctgggtgtatcctccactgtatgctgtcaccccaagggcaagcactgcatctgcttagtgaaggatttattgttcggaagatacattttccccttkagcagagagtggcgtatcctggcagtcttcggtgagccagttgtaccaggattatgaaatgcagatgtttactgtgtcattgttgctgtcattgctactgaggagtactgaccagaatcatctgcaactyttagttggcagagaggaccactatggcgggtagctcttttctttcctgccattgtggggatgattccaggccaaagatgatggaraagtatggaaatcatctgaaaggttgaagcttggcacgtgaagccattcatgactttgtaaggcagttttgctgaaggccagttctgccctgggagggacggaggtgaatcctcctgagtacctgtggttttcttacttcctgctgaatttacctaagtgcctgttgtttgcttgctgtggaggctttctggtatttcatttcaggtgcagatgccttcactttcccaccraaaaaaccccmaccaaacctaagaccttactgcaactaagtytnccaagtactttttaacccaatgggatgaacagcctgtggtctgctcagatcaccctgagtgcgtgtgagaaggcmtnggctttgccaggaaatccaggaaggcagggccgggctgtgttggaagctggcttagctggtggggcagccttatttcaattaaaagggcattgactgggagcagcagtcctggagtttgttgcatttcctattgccctcaaaatgagaaaccaggaaaatagcagattggagccttcgagaaggcagtaaatggctgtttttattgacaaaaggaaaacattttactgccatctcactgatggcatctcactgacttaaaatgaaggcangttgtagtaaaaaaaaaagtctacatttttccaccgccacgttcttatatcctgtttgtcagccactgctcanaagggcatgttgtcttgcggantanaggcgctctccttccctcgttttccctataggttgggtg

SEQ ID NO: 160 - DNA, 2199 bp, Homo sapiens
ggcacgagcttttccatcttgagcttggcagcctgtctagttgtggaagctgtggtgtggaaatcggtgaccaagaatcggacttcttatatgcgccacacctgcatagtgaatatcgctgcctcccttctggtcgccaacacctggttcattgtggtcgctgccatccaggacaatcgctacatactctgcaagacagcctgtgtggctgccaccttcttcatccacttcttctacctcagcgtcttcttctggatgctgacactggggcctcatgctgttctatcgcctggttttcattctgcatgaaacaagcaggtccactcagaaagccattgccttctgtcttggctatggctgcccacttgccatctcggtcatcacgctgggagccacccagccccgggaagtctatacgaggaagaatgtctgttggctcaactgggaggacaccaaggccctgctggctttcgccatcccagcactgatcattgtggtggtgaacataaccatcactattgtggtcatcaccaagatcctgaggccttccattggagacaagccatgcaagcaggagaagagcagcctgtttcagatcagcaagagcattggggtcctcacaccactcttgggcctcacttggggttttggtctcaccactgtgttcccagggaccaaccttgtgttccatatcatatttgccatcctcaatgtcttccagggattattcattttactctttggatgcctctgggatctgaaggtacaggaagctttgctgaataagttttcattgtcgagatggtcttcacagcactcaaagtcaacatccctgggttcatccacacctgtgttttctatgagttctccaatatcaaggagatttaacaatttgtttggtaaaacaggaacgtataatgtttccaccccagaagcaaccagctcatccctggaaaactcatccagtgcttcttcgttgctcaactaagaacaggataatccaacctacgtgacctcccggggacagtggctgtgcttttaaaaagagatgcttgcaaagcaatggggaacgtgttctcggggcaggtttccgggagcagatgccaaaaagactttttcatagagaagaggctttcttttgtaaagacagaataaaaataattgttatgtttctgtttgttccctccccctcccccttgtgtgataccacatgtgtatagtatttaagtgaaactcaagccctcaaggcccaacttctctgtctatattgtaatatagaatttcgaagagacattttcactttttacacattgggcacaaagataagctttgattaaagtagtaagtaaaaggctacctaggaaatacttcagtgaattctaagaaggaaggaaggaagaaaggaaggaaagaagggagggaaacagggagaaagggaaaaagaagaaaaagagaaagatgaaaataggaacaaataaagacaaacaacattaagggccatattgtaagatttccatgttaatgatctaatataatcactcagtgcaacattgagaatttttttttaatggctcaaaaatggaaactgaaagcaagtcatggggaatgaatactttgggcagtatcttcctcatgtcttcttagctaagaggaggaaaaaaaggctgaaaaaatagggaggaaattccttcatcagaacgacttcaagtggataacaatatttataagaaatgaatggaaggaaatatgatcctcctgagactaactttgtatgttaaggtttgaactaagtgaatgtatctgcagaggaagtattacaaagatatgtcattagatcccaagtgctgattaaatttttatagtttatcagaaaagccttatattttagtttgttccacattttgaaagcaaaaaatatatatttgatatacccttcaattgccaaatttgatatgttgcactgaagacagaccctgtcatatatttaatggcttcaagcaggtacttctctgtgcattatagaatagattttaataatcttatagcattgtatattattattgctgttgtcactgttattattattgtggatactggcccttggtgtgttgcatagctccctatgtattctctgtttccatctttaagttcccagaccaatatacattaagagttttgaaaaaaaaaaaaaaaaaaaaa

SEQ ID NO: 161 - DNA, 1761 bp, Homo sapiens
  misc_feature (1207)..(1207): n equals a,t,g, or c
gctcgtgcattcatacaggagatgttatgattttscctgtactttcttgcttcacaagatttatggctggtttgatctttgtactccacagttgttttagattcatcacttttgtttgtcccacatcctctgatcccctgaggacctgcgcagtcctgctatgtgttggttatcaggaccttccaaatccagttttccgatatttgcagagtgtgaatgaattgttgagcactttgctcaactctgactcaccccagcaggttttacagtttgtgccaatggaggtactccttaagggggccctgcttgattttttgtgggatttgaatgctgccattgctaaaaggcatttgcatttcattattcaaagagagagagaagaaattatcaacagccttcagttacaaaactgaacatatgctttctgagattcaactttatgatttcttataatttgcccagtatttgcatcctgttgctctattaatttaaaaaccttttattttggggaaaggccaacatttgcatcattcaaagtctcattaattctggaaaaccatccattctgatctctagggtatatacacccacaggcatagagctcttccacgtggtggaatctatgcaatgatagatattcacactctaaatatgaggtgtgtgtatgtgtatgggtggccacagccatgcttacctatgccatttagttggtcttacttaatctgcttaagatttgcatctgtgtacctttgttcagattagttttttttttccagccgatttcctcttagtggctaatgctgttagtgaattttccaactaatttcctctcattggttaatgttgttaatgaattgagagaggtaattgaggaaaggaaatgagtaaatcactgttcagcaacactgatttccgttaacacatcagttatgaatttcagggaattcatctcgccagattcttgataacatgccattcattgcccttaggtgattgaccctattttcttacatggctcaaataaaactagtatgctgttgtatgaatcttttactgaccacaccatccaactataaaaatataacgggacagctttaaaccaaagatcatgcttagaacaatgaaaaattatttgttgtatctaatacacgcctgtattgtgaaaagcttcatttagcaatgatgtaataatttttaacttccaggnaaataatctgtgaatggaaagattttttaagattttgagatagtgtttagtctcatgttgggaacacatgaatgtgatgaacatagtgaatactaaagaaaacgcttcagactttcagatgatggttcagaatttaaaatttttaatcttttctaatttctttttttcagtgtgaaaatagcactttaccaaaagattagccatgaaatggttattttgccagttacatttgatttcttttgtatctgcaatgtaatgagttattttatttcttctgtatttgcagtgtaatgagtttttgtggcaaagtgtattaagcaatttttcattatcttgaagttccacaaagtggagaatatttatattctcacatgcattttaggcacttttgatatgtgaaaatagatgtattttctgatgcatttggttaataaatattaatctgaacattttcatgttctttgctattttgaattccattatagattcatgaataaagtcattactagagaaaaaaaaaaaaaaaaaaaaaaaaaaaaaaaaaaaactcgtag

SEQ ID NO: 162 - DNA, 1999 bp, Homo sapiens
  misc_feature (532)..(532): n equals a,t,g, or c
  misc_feature (1490)..(1490): n equals a,t,g, or c
gcacctgtgaaaaggaggaacgtcatcccccatgatattggggacccagatgatgaaccatggctccgcgtcaatgcatatttaatccatgatactgctgattggaaggacctgaacctgaagtttgtgctgcaggtttatcgggactattacctcacgggtgatcaaaacttcctgaaggacatgtggcctgtgtgtctagtaagggatgcacatgcagtggccagtgtgccaggggtatggttggtgtctgggaagagcctagctggttgttgcctttcctcggtacctaggtcttcaacatcttggtccctctctaggctgtgatggaatctgaaatgaagtttgacaaggaccatgatggactcattgaaaatggaggctatgcagaccagacctatgatggatgggtgaccacaggccccaggttagcgggtaggggtttccaggaggcctgaggtgagaaactgggcaacaagggattgtagggctcaagaaagaatgactcattgtctattacacggcatgggancagctggagctgccagtctgacccccaaacccatgtccctgatcagtgcttactgtggagggctgtggctggcagctgtggctgtgatggtccagatggctgctctgtgtggggcacaggacatccaggataagttttcttctatcctcagccggggccaagaagcctatgagagactgctgtggaatggtgagttcggggagcctaagtagtcttaaggcagctgagaggacaccaggagccttatttttctcttcctcgactccaggccgctattacaactatgacagcagctctcggcctcagtctcgtagtgttatgtctgaccagtgtgctggacagtggttcctgaaggcctgtggtaggcgagaaggagacactgaggtgtttcctacccaacatgtggtccgtgctctccaaactatctttgagctgaacgtccaggcctttgcaggaggggccatgggggctgtgaatgggatgcagccccatggtgtccctgataaatccagtgtgcagtctgatgaagtctgggtgggtgtggtctacgggctggcagctaccatgatccaagaggtaatgcactccttttcccatctctccaccatctgtatcctggcccagaaaacttcctcaaccaccaaatttcttcaaggcataacccaatgccatcttgtccgtctataaagcctcccatttttccctggtatgcattccagctcctgccttcaggcttctgtctgtgggtcatagttatctcctccacttgctgggagctccttgaaggcaaagactctactgcctccatctatccagtggaagtggctcttcagagggtgccaagttagtatgtatgactgtcatctctcccaacagggcctgacttgggagggcttccagacagctgaaggctgctaccgtaccgtgtgggagcgcctgggtctggccttccagaccncagaggcatactgccagcagcgagtgttccgctcactggcctacatgcggccactgagcatatgggccatgcagctagccctgcaacagcagcagcacaaaaaggcctcctggycaaaagtcaaacagggcacaggactaaggacagggcctatgtttggaccaaaggaagccatggcaaacctgagcccagagtgagccgtctgaactgtggragggaagtgctaacagcccagcctccagcctggcctttcctccttccctctgaacctcctgcaaccctgagccatcaggacaatcataccccttcccttctctccacccaattgtgccagtaaatgggggttgagggtgacctaggcagcattagaatcacttatttatttctttcctcacctgttccctgactgcgtgaaatgttcagggaggtcagttgatttccccaggtacattcatggtgtgacagacacatgggtacaaataaaagacccagaaagccaaaaaaaaaaa

SEQ ID NO: 163 - DNA, 1636 bp, Homo sapiens
  misc_feature (424)..(424): n equals a,t,g, or c
  misc_feature (823)..(823): n equals a,t,g, or c
  misc_feature (960)..(960): n equals a,t,g, or c
gaattcggcacgagttgaaattgaaaatcaagataaaaatgttcacaattaagctccttctttttattgttcctctagttatttcctccagaattgatcaagacaattcatcatttgattctctatctccagagccaaaatcaagatttgctatgttagacgatgtaaaaattttagccaatggcctccttcagttgggacatggtcttaaagactttgtccataagacgaagggccaaattaatgacatatttcaaaaactcaacatatttgatcagtctttttatgatctatcgctgcaaaccagtgaaatcaaagargaagaaaaggaactgagaagaactacmtataaactacaagtcaaaaatgaagaggtaaagaatatgtcacttgaactcaactcaaaacttgaaagcctcctagnagaaaaaattctacttcaacaaaaagtgaaatatttagaagagcaactaactaacttaattcaaaatcaacctgaaactccagaacacccagaagtaacttcacttaaaacttttgtagaaaaacaagataatagcatcaaagacyttctccagaccgtggaagaccaatatwaacaattaaaccaacagcatagtcaaataaaagaratagaaaatcagctcagaaggactagtattcaagaacccacagaaatttctctatcttccaagccaagagcaccaagaactactccctttcttcagttgaatgaaataagaaatgtaaaacatgatggcattcctgctgaatgtaccaccatttataacagaggtgaacatacaagtggcatgtatgcatncagacccagcaactctcaagtttttcatgtctactgtgatgttatatcaggtagtccatggacattaattcaacatcgaatagatggatcacaaaacttcaatgaaacgtgggagaactacaaatatggttttgggnaggcttgatggagaattttggttgggcctagagaagatatactccatagtgaagcaatctaattatgttttacgaattgagttggaagactggaaagacaacaaacattatattgaatattctttttacttgggaaatcacgaaaccaactatacgctacatctagttgcgattactggcaatgtccccaatgcaatcccggaaaacaaagatttggtgttttctacttgggatcacaaagcaaaaggacacttcaactgtccagagggttattcaggaggctggtggtggcatgatgagtgtggagaaaacaacctaaatggtaaatataacaaaccaagagcaaaatctaagccagagaggagaagaggattatcttggaagtctcaaaatggaaggttatactctataaaatcaaccaaaatgttgatccatccaacagattcagaaagctttgaatgaactgaggcaaatttaaaaggcaataatttaaacattaacctcattccaagttaatgtggtctaataatctggtattaaatccttaagagaaagcttgagaaatagattttttttatcttaaagtcactgtctatttaagattaaacatacaatcacataaccttaaaaaaaaaaaaaaaaaaactcgaggggggcccggtacccaattcgccgg

SEQ ID NO: 164 - DNA, 1392 bp, Homo sapiens
attcggcagagcagaaaaccagactgcacttgctttataaaacagagctttatttttccttcataataagcagagttgcagtgttgctggtattgattcactggcgtggtggtatcaggacagatgtctctatgattaatttttggcctgtcactcatgtttgcatatggctgttgtggctccaagcattggaagcaagaggacagggaagcaacattgactgtaccaggaactccaaaacagtcttcacatcttaatggttggacaatgccaaatggtcactcttttctggaagttgactggggacaagatagtggtaaggattagatttggccagaaagtttctgccacagtgagctttcctgtctaaatccttattttaactgttgtcacttaatattcacactttggaaggacatctactgttggttacaattatgaaaccaacttgaatactttttagttgaacatttcagtagtcttaattatgtttaaataggtttcacaatttactgtttttagtttagtttccggctccccccaacccccaacttttgytagagagttactctcttaacttttgctagaaagtagcaaagttctctactctacatgttcagggctggctgtagaatttcgttttttaaggaaacaggaagacagaactaattatgcaagtcttcatttagctttttaaaaaaacagctttattgagttagaattgacatgcagtaaatggtacatatttaaagcgtacaatttgttaagttttgacataagtatacattgtgaaaacatcagtcaccacaatcaggatacttattttaaaaaacaactttatttaggattagtatactgataatgtgtccattgtaagtgtacattttcagttttgacaaatgtatagatttttgtaactaccaccaccagtcaagatgaaaacgtttctagcactccagaaagttcccttgtgtcccttcttggtcagttattcccaccatgctctcaggcaaccacagttctgcttctatcactatataagtgacagaatttttctacagaatttcacatagatggaatcatacaatatgtactgttctgtctggcttcttgaggtaagccaaatgtcttttaagagtcatgcatgtttttgcatttattagtagtttattctttttttgttggtgagtagcattcattgtatggatatattccagtctgttttattcattcactttttggacatttgggttgttatcaattttgggctcttttgaattaatccctccctccttccctccttcccyccctccctccttccctccctccctccctctctccctccctccttccttccctccctccctccctcccttttttttttcggcacga

SEQ ID NO: 165 - DNA, 717 bp, Homo sapiens
ggcacgagctagctgccgccacccgaacagcctgtcctggtgccccggctccctgccccgcgcccagtcatgaccctgcgcccctcactcctcccgctccatctgctgctgctgctgctgctcagtgcggcggtgtgccgggctgaggctgggctcgaaaccgaaagtcccgtccggaccctccaagtggagaccctggtggagcccccagaaccatgtgccgagcccgctgcttttggagacacgcttcacatacactacacgggaagcttggtagatggacgtattattgacacctccctgaccagagaccctctggttatagaacttggccaaaagcaggtgattccaggtctggagcagagtcttctcgacatgtgtgtgggagagaagcgaagggcaatcattccttctcacttggcctatggaaaacggggatttccaccatctgtcccagcggatgcagtggtgcagtatgacgtggagctgattgcactaatccgagccaactactggctaaagctggtgaagggcattttgcctctggtagggatggccatggtgccagccctcctgggcctcattgggtatcacctatacagaaaggccaatagacccaaagtctccaaaaagaagctcaaggaagagaaacgaaacaagagcaaaaagaaataataaataataaattttaaaaaacttaaaaaaaaaaaaaaaaaa

SEQ ID NO: 166 - DNA, 832 bp, Homo sapiens
  misc_feature (827)..(829): n equals a,t,g, or c
  misc_feature (831)..(831): n equals a,t,g, or c
gaattcggcacgagtatgaaactaacaacatagaatgccccccaaacaaattcctctaacctcactgagtttacttgccctattactattttttttttttaagatcttctgtctcttgtttttgttttatcccttacctgatgaaagtgaacatttctagtggagaaagaagatcacagttctctaatatgggcattaagagaggggtacagctagaggggaggtgaaaacctgcctccactggggtgaaaaacagtgtgctgaggtttcagccagtgattacactgggtaatcaaccagtcccatgtttcacaaaggagttgtaatgattaacagttcaggtatgcttytgaggaaatctaattgagacctttggaaaatagcattgttatgaatggtgtggtgttacgccctggaggggaaaaggctaggaaaaacattttaacttttcaagtgtatttaaattaacatccaaatgtttcagtgtgctttactggagactgcctgagtttggaattcaaatattgtaaccaaattactccaggtttctgaactaaaatgatctattgatgtttctcaaagtatagatcacagagtaagaaaagaggaaatcaagtctggtttatgacaaacttttttccatgttaacattggacccaaagatgttamtaagagctttttactactgtgagagraccagcgtgatgtgaagacaacgaacattttaagaagtttgactagtagacatttcgtttaagtcttttggagggtcttggttgacaacccacaattttattgtggctccccaggctgggagaacgtggaannncna

SEQ ID NO: 167 - DNA, 734 bp, Homo sapiens
ggcacgagttaaaaacgaattgtagttgtttttcttcatttaaaatggatctgttggaggttatgtgtgtatgttgtagttttattgcagccacaataattttaccaaagttttcacataggcagttagcctttacttaatatcaagacaagtgaaaaaatattggcatcgatgaaaccgataacattggcctcattggatttctttacccattcacagtgtaaagaagttaccttcatgctttcattgtacctgcaggcctgtgggcttgtacagtagataattaatttctaaaaagaacagctgcccattttcttcctaggttaggttatatcttcataatcacaagaattagtgatggcaaaataaaattttgcttatgaatcttttacattgtttatatatgattaatatcatcatatatattttctgtattaagctcatttggcttcatttaagctgtatacttagtcatatatctttcattagttctatggatatgagcagatccctttactggagcccagtatgtgctgtgtgagttagaagtcattcttgctgagaaggtgaataggtagggatttgccttgttttgtaagtctacaatttgccaagagtaaataacactggaccagctgtaaaagtaaacagtgtgtttatgcattgagatactaaagcatttaagaaaaaattaaaagatctcttttgtttaaaaaaaaaaaaaaaaaaaaaaa

SEQ ID NO: 168 - DNA, 1209 bp, Homo sapiens
  misc_feature (1)..(1): n equals a,t,g, or c
  misc_feature (1097)..(1097): n equals a,t,g, or c
  misc_feature (1120)..(1120): n equals a,t,g, or c
  misc_feature (1127)..(1127): n equals a,t,g, or c
  misc_feature (1141)..(1141): n equals a,t,g, or c
  misc_feature (1161)..(1161): n equals a,t,g, or c
  misc_feature (1197)..(1197): n equals a,t,g, or c
nccggtatgtggccccgtctggctagtcccgcctagcgcgcccatttcgagcccaagtttccagctcgggtttccaggctcagaattttccaggagtaggttcttgggcagtggctgtgggagctggaatggcgcagctggaaggttactatttctcggccgccttgagctgtacctttttagtatcctgcctcctcttctccgccttcagccgggcgttgcgagagccctacatggacgagatcttccacctgcctcaggcgcagcgctactgtgagggccatttctccctttcccagtgggatcccatgattactacattacctggcttgtacctggtgtcaattggagtgatcaaacctgccatttggatctttggatggtctgaacatgttgtctgctccattgggatgctcagatttgttaatcttctcttcagtgttggcaacttctatttactatatttgcttttctgcaaggtacaacccagaaacaaggctgcctcaagtatccagagagtcttgtcaacattaacactagcagtatttccaacactttatttttttaacttcctttattatacagaagcaggatctatgttttttactctttttgcgtatttgatgtgtctttatggaaatcataaaacttcagccttccttggattttgtggcttcatgtttcggcaaacaaatatcatctgggctgtcttctgtgcaggaaatgtcattgcacaaaagttaacggaggcttggaaaactgagctacaaaagaaggaagacagacttccacctattaaaggaccatttgcagaattcagaaaaattcttcagtttcttttggcttattccatgtcctttaaaaacttgagtatgcttttgcttctgacttggccctacatccttctgggatttctgttttgtgcttttgtagtagttaatggtggaattgttattggcgatcggagtagtcatgaagcctgtcttcattttcctcaactattctactttttttcatttactctctttttttcctttcctcatctcctgtctcctagcaaaattaagacttttcctttccttagtttgggaaacgtngaattctgttttttggtggttancttagtnctctgtggtttttnagtttgggaaattccaattnatggctcaagaaatacttgcttagcagaccaatagnccattataattt

SEQ ID NO: 169 - DNA, 2149 bp, Homo sapiens
acgaggaagagccggccgaagcgtggcggccacagactgtgggtaccgggtccgagggactcgcgcttttctctccgtgccatggcgccagcgaaagccacgaacgtggtgcggctgctactaggctccacagcgctgtggctttcgcagctcggctccgggacggtcgccgcgtccaagtcggtgactgcccacttggccgcgaagtggcccgagaccccgctgctgctggaggcaagtgaatttatggcagaagaaagtaatgaaaaattttggcagtttttggaaactgtgcaagaattagcaatttataagcaaacagaatcagattattcttattacaacttaatcctgaagaaagctggacagtttctagacaatttacacatcaaccttttaaagtttgctttctctataagggcatactccccagctattcagatgtttcagcagattgcagctgatgagccaccaccagatggttgtaatgcatttgtggttattcataagaagcacacctgtaaaattaatgagattaaaaagctgctgaagaaagctgcttcaaggactagaccttatctatttaaaggagatcacaaatttcctacaaacaaagagaacttaccagtggtgattctctatgccgaaatgggtactagaacatttagtgcatttcacaaagtattgtctgaaaaagctcaaaatgaggaaattctgtatgttcttcgccattatattcagaaaccaagctcacggaaaatgtacttatctgggtatggtgtggagctagcaattaagagtacagaatacaaagcactggatgatacccaagttaaaactgtgactaatactactgtagaggatgagactgaaacaaatgaagttcaaggatttctctttgggaaactaaaagaaatatattcagatcttagagataatctgacagcattccaaaaatacctgattgagagtaacaaacaaatgatgcctttgaaagtctgggaactacaagatcttagttttcaagcagcttctcaaataatgtccgctccagtttatgatgccattaaattaatgaaagacatttcacagaacttccccataaaagccagagtccaaatgattggtaatgtcttaattggatgaatattgtgtggagtacttttttgccaagaggatgtctcgttgaactgcttccatgaatactgatgttacattaaacatatattccatttcaataggaaatacatttgcatagcttaaagagaccggtgcatgcaatgcaagttaccacgtattatgagaatttgctatataacacaactttgatgcaattgtattctggttagggatgacagagtataaaattagcaacaagtaaaatatgagttagcttatactaaagagataaaatatgtgacaagtcgcagtgcatgggcaacaatggtgttttactgagaggaattggagagcagtctactagcttagcataccttcctaagcatagaatgattgctatgcctcttattgtcccaaacactattttgtacatttattcatcatacagattacagaatcttcaatatatgtattctttaattttgaaagtaaataaatagtacatggttggctacaagataccaaggattttttggtggtaccttgaaataaaggagtttgttccttatttacagattaagaatgaatatattgatatgcctctttcagtcaactttaaatgtcaagaatttgagaagtcgtcatttatataataaaacatgaaatatatatgggtgtgtataaatgtcatatctgtttagccataatattttaattaatggccgttataaaaattattagatcaaatacaaataaagtaaaataactttagtcttgatcagacagttgattagctctattgatgctaagtcagtataactgttcagaggttctgatgcaaaactctgctgttaatctgtaattaagaaaaaattataaaatatgctaacattgcttaatggctaaattgtaggcttgagcatatctctaaaaccacttggtagacaatctgtaaatgtttgttgaaatgaaatatttgctaaataaatgaaaaatttgccttaaaaaaaaaaaaaaaaaaaaaaaaaaa

SEQ ID NO: 170 - DNA, 1084 bp, Homo sapiens
ggtttgggggcatcacagactacacccgtatgagaggatgaacttaaatgataaattgtgtgtgtgtgcatgcatgtgtgcgtgcatgtggactgttacactcattggtccttctgctgtctctctccctctcctcagccctctttattccctgggacacagaaatttttaaataaggccaattaataatcctacattggtctcttacgtgttagagtgaaaagaagattcacatatctctcattttaaattgaaagctagaaatgattaagcttagtgaggaagccatgttgaaagctgagatagtccaaaaactaggcctcttgcaccagttagccaagttgtgaatgcaaaagaaaagtgcctggaggatatttaaaatgctgctccagtgaacacacaaacgataggaaagcaaaatagccttattgctgatatggagaaagttttaatggtctggatagaagatcaaaccaactgcaacatttccttaagcaaaatcctaattcagaacacagccatagctgtctccaattctatgaagacagagcagagaggaagctgtggaagtaaagtttgaaaataagaggttgttcatgaggtataaggaaagaagacatctccataacataaaagtgtaagtgaaacatcaagtgcgaatacagaagctgcagcaagttatccagaaaatctaagatcattgaagaaggtggctacactaaacaatagattttcaatatagacaaaagagccttctgttgattttaggcatctagcctaaaatggaagaagatgccatctaggactttaatgggtagagaggagaagttgatacctgtcttcaaagtaaagactgactcttttgttaggggctgttgcagctggtgacattaagttgaagccaatgctcattcaccattccagaaatccttgtgcccttaagaattatgctaaatctactctgactgtgttctacaagtagaacaacaaagcctggatgacagcatatctgtttatagtcatggtttactaaatattttaagcccactgttgagacctactgctcagaaaaaaaaactcgtag

SEQ ID NO: 171 - DNA, 582 bp, Homo sapiens
  misc_feature (20)..(20): n equals a,t,g, or c
  misc_feature (27)..(27): n equals a,t,g, or c
  misc_feature (49)..(49): n equals a,t,g, or c
ccgtttgccggcccgcctcntgggacntggtggtccccccccgggcctncagggattcggcmcgrgtgcatacatgcctacctatgtatatataaacaaacatttttgtaaacagctcagtgaggactttggactggcataaatcataggaatatgattatgaggatacatccaattttcagattgggcaatgtatacagtttattatcatttctgattttgggtagagttagtactaagaacagcattgaagaaaagcagtataacattaaaattaagaagatttaaaatacaagaggattcataacagtcacttttaaaatattgttttggctttctactttggagctgtaattttaaaaaaagaatgaacaggtttttgtatgaatatgttagaatgactaattatagagcatctttcaactggaatacatgtagatactaacacctggttgtatttgatgtaatttcagtgcatacagtgtgtgtaatctgtattaagtgaaatacttatgaataaagttgtttctgcattgcaaaaaaaaaaaaaaaaaaaaaaaaaaaaaaaaaaaaaaaactcga

SEQ ID NO: 172 - DNA, 1046 bp, Homo sapiens
  misc_feature (483)..(483): n equals a,t,g, or c
agcaagttcacagtagaaggaggttgagatctttcttttatgtgagaaatctttgaatctcattcatgcgatcagagttgtagccaatttttgaaaaccttattttcaaaggaaataaatgattcactgtaggattcctttaaatatcaagcatcaccagtatatgctttgatggtatatgtatataacttaaagttctttcaaaagcctgatacagaaacgtgtccccagtttggtagcaatgtggaaaacctggctagagatgatatggagctgtccctcagaaagcaaagccatgcctggaatccctaataggctgcttagttgtgaacctgtttgatttgccttaagcctctatccagaaacctgcccgcttccgtctggttaagaagccagtggtggatattttctttgttaacattagaaatgcaaacattcccttgtcaaccaagaatactcaaagctacttgtattggaaatggncagaaggcctaaatccaaatttcttattttttataatttaccatagaagttttgtgattaaattcttacttctgccagtggaggtttatgcctgaaagtcatggggtcctgtctgtaaatagacctaaagagaagtgcagtatttattctttgtaggcataatgtgtttgtcactgacaagcattcatattcatcccactagtcttttattgcagtcttttattgtcattttcagccttatgttggagagctttgctttctcatcatgttcacattgtcttaagttttgtgagcttctgagaaagagcttggtaaaggtttaaaggggactttgttccaccagggagcattttatttgggcgtctcacccttttctaatgaaagctgttgtaagccacctctgacttggaaattctgaaagtatgaatattttttatatcttaattgtaaaatgccagttctccattatttagatgaatagtagaacactgcaccctttgtgcagtgtttttgtttctctactgcattcctacccccaccaaaaaaaaaaaaaaaaaactcga

SEQ ID NO: 173 - DNA, 558 bp, Homo sapiens
ctgcaggaattcagcacgagytggcatgtgacaacccagggctgcctgaaaatggataccaaatcctgtacaagcgactctacctgccaggagagtccctcaccttcatgtgctacgaaggctttgagctcatgggtgaagtgaccatccgctgcatcctgggacagccatcccactggaacgggcccctgcccgtgtgtaaagtagcagaagcggcagcagagacgtcgctggaaggggggaacatggccctggctatcttcatcccggtcctcatcatctccttactgctgggaggagcctacatttacatcacaagatgtcgctactattccaacctccgcctgcctctgatgtactcccacccctacagccagatcaccgtggaaaccgagtttgacaaccccatttacgagacaggggaaaccagagagtatgaggtttctatctaaagagagctacacttgagaaggggacttgtgaactcaaccacaatctcctcgagggggggccggtacccaattcgscctatagtgagtcgtattacaattaatgggc

SEQ ID NO: 174 - DNA, 685 bp, Homo sapiens
  misc_feature (678)..(679): n equals a,t,g, or c
actacggctgcgagaagacgacagaaggggggcggcgacggaggaggaggatggaggcggtggtgttcgtcttctctctcctcgattgttgcgcgctcatcttcctctcggtctacttcataattacattgtctgatttagaatgtgattacattaatgctagatcatgttgctcaaaattaaacaagtgggtaattccagaattgattggccataccattgtcactgtattactgctcatgtcattgcactggttcatcttccttctcaacttacctgttgccacttggaatatatatcgatacattatggtgccgagtggtaacatgggagtgtttgatccaacagaaatacacaatcgagggcagctgaagtcacacatgaaagaagccatgatcaagcttggtttccacttgctctgcttcttcatgtatctttatagtatgatcttagctttgataaatgactgaagctggagaagccgtggttgaagtcagcctacactacagtgcacagttgaggagccagagacttcttaaatcatccttagaaccgtgaccatagcagtatatattttcctcttggaacaaaaaactatttttgctgtatttttaccatataaagtatttaaaaaacatgaaaaaaaaaaaaaaaaaaaaaaaaaaaaaaaaaaaaaannaaaaaa

SEQ ID NO: 175 - DNA, 1669 bp, Homo sapiens
  misc_feature (587)..(587): n equals a,t,g, or c
  misc_feature (1634)..(1634): n equals a,t,g, or c
  misc_feature (1648)..(1648): n equals a,t,g, or c
  misc_feature (1659)..(1659): n equals a,t,g, or c
  misc_feature (1668)..(1668): n equals a,t,g, or c
aggcgcttaggggctgaggcgcgatggcaggtgtcggggctgggcctctgcgggcgatggggcggcaggccctgctgcttctcgcgctgtgcgccacaggcgcccaggggctctacttccacatcggcgagaccgagaagcgctgtttcatcgaggaaatccccgacgagaccatggtcatcggtcaggcgggctgagggtggggaggccctttgtacccagctcagccctcggcggcgctccctcctcccgagcccagccgggtcgctggctcccccagtacctagcctgagggtgccccgaggacgccaggccccctgcctagagctccgggccgcacgtcggagggggccgggcggagaggcggcccactagggccggtcgtgactatgtgtctgccccgcaggcaactatcgtacccagatgtgggataagcagaaggaggtcttcctgccctcgacccctggcctgggcatgcacgtggaagtgaaggaccccgacggcaaggtggtgctgtcccggcagtacggctcggagggccgcttcacgttcacctcccacacgcccggtgaccatcaaatctgtcngcactccaattctaccaggatggctctcttcgctggtggcaaactgcgkgtgcatctcgacatccaggttggggagcatgccaacaactaccctgagattgctgcaaaagataagctgacggagctacagctccgcgcccgccagttgcttgatcaggtggaacagattcagaaggagcaggattaccaaagggcaagtgcatatctccttgtaatttgagagggcagttgacctttatacccactatacctactcaagtttctgcttgggagatcagctctgcagagaatggaatgagaagtattggtttagataggttgtttgtttgttgtttttgagacggagtttcactcttgttgcccatgctggagtgcaatgccatgatcttggctcactgcaacctccgcctccccaggctgaggcaggagaatggcgtgagctcgggaggtggagcttgcagtgagctgagatcgtgccactgcactccagcctgggcgacagagtgagactccttctaaaaaacaaaaacaaaaccaaaacagtagttagggtacacacacacaaattctagtgattttccccccagtactacccttgacttttgaaattcctgctttctcagagtttacaacatccttaccaaacagccttctccctccttaccacaaaaaaaraaaaaaaagttctggggttgaggggacactccattcttaacatcctctattatcccagcccaattccccagctctcactgggactagttgtacctatcttcattcatttggtcccagcatgactacctgttggtgcatgagctgatctctcctaacctaacagccagatgctagtctctggtactyagatgctgggctgcatcagataggatgcacaggatcatcctgggaagcttgttgacatagattcctgtgcaacacttcagatatagtcttaatgtagatttgtgttggggtggtatggtaggtagaataatgggcctaccactgtgtaaacatatggatatgtttacctaacatgacagaagaganttaagttgctaatnagatgactgtnaaataaatna

SEQ ID NO: 176 - DNA, 1038 bp, Homo sapiens
  misc_feature (806)..(806): n equals a,t,g, or c
ggcacgagtggctgcagcggggcccgcgtggtgcctcctgaggcggcccccggatgaagagatctgggaacccgggagccgaggtaacgaacagctcggtggcagggcctgactgctgcggaggcctcggcaatattgattttagacaggcagacttctgcgttatgacccggctgctgggctacgtggaccccctggatcccagctttgtggctgccgtcatcaccatcaccttcaatccgctctactggaatgtggttgcacgatgggaacacaagacccgcaagctgagcagggccttcggatccccctacctggcctgctactctctaagcrtcaccatcctgctcctgaacttcctgcgctcgcactgcttcacgcaggccatgctgagccagcccaggatggagagcctggacacccccgcggcctacagcctgggcctcgcgctcctgggactgggcgtcgtgctcgtgctctccagcttctttgcactggggttcgctggaactttcctaggtgattacttcgggatcctcaaggaggcgagagtgaccgtgttccccttcaacatcctggacaaccccatgtactggggaagcacagccaactacctgggctgggccatcatgcacgccagccccacgggcctgctcctgacggtgctggtggccctcacctacatartggctctcctatacgaagagcccttcaccgctgagatctaccggcagaaagcctccgggtcccacaagaggagctgattgagctgcaacagctttgctgaaggcctggccagcctcctngctgccccaagtggcaggccctgcgcagggcgagaatggtgcctgctgctcagggctgcccccggcgtgggctgccccagtgccttggaacctgctgccttggggaccctggacgtgccgacatatggccattgagctccaacccacacattcccattcaccaataaaggcaccctgaccccaaaaaaaaaaaaaaaaaaaaaaaaaaaaaaaaaatttgggggggggcccc

SEQ ID NO: 177 - DNA, 921 bp, Homo sapiens
  misc_feature (4)..(4): n equals a,t,g, or c
  misc_feature (9)..(9): n equals a,t,g, or c
  misc_feature (11)..(11): n equals a,t,g, or c
  misc_feature (15)..(15): n equals a,t,g, or c
  misc_feature (20)..(20): n equals a,t,g, or c
  misc_feature (901)..(901): n equals a,t,g, or c
gcgnggggnanaggnaagcnccccactattgggttcaaaagctggagctccaccgcggtggcggccgctctagaactagtggatcccccgggctgcaggaattcggcacgaggtctgagcagataagattaagggctgggtctgtgctcaattaactcctgtgggcacgggggctgggaagagcaaagtcagcggtgcctacagtcagcaccatgctgggcctgccgtggaagggaggtctgtcctgggcgctgctgctgcttctcttaggctcccagatcctgctgatctatgcctggcatttccacgagcaaagggactgtgatgaacacaatgtcatggctcgttacctccctgccacagtggagtttgctgtccacacattcaaccaacagagcaaggactactatgcctacagactggggcacatcttgaattcctggaaggagcaggtggagtccaagactgtattctcaatggagctactgctggggagaactaggtgtgggaaatttgaagacgacattgacaactgccatttccaagaaagcacagagctgaacaatactttcacctgcttcttcaccatcagcaccaggccctggatgactcagttcagcctcctgaacaagacctgcttggagggattccactgagtgaaacccactcacaggcttgtccatgtgctgctcccacattccgtggacatcagcactactctyctgaggactcttcagtggctgagcagctttggacttgtttgttatcctattttgcatgtgtttgagatctcagatcagtgttttagaaaatccacacatcttgagcctaatcatgtagtgtagatcattaaacatcagcattttaagaaaaaaaaaaaaaaaaaarctcgagggggggnccggtacccagggcggaaga

SEQ ID NO: 178 - DNA, 894 bp, Homo sapiens
ggcacgaggtactgccgggctgccgggtccctgctctgggtacttctctgctttcgggcgtctcgtctagaagctgcagcttggcctgtctcacctctacacagaggggctgctggcgcctgacggaaaaaggtccacacacccgatggccggcccggggtggacgctgctgctactgctgctgctgctgctgctgctggggtccatggcagggtatgggccacagaagaagttgaacctgtcccataagggcatcggggagccatgcgggagacacgaggagtgccagagcaactgctgtaccatcaacagcctggccccacacacgctctgcacccctaagaccatcttcctgcagtgcctgccctggaggaagcccaatgggtacagatgctcgcacgactcagagtgccagagcagctgctgcgtccgcaacaacagcccgcaggagttgtgcacgccccaaagcgtcttcctgcagtgtgtgccctggcgcaagcccaacggcgacttctgcagcagccatcaggagtgtcacagccagtgctgcatccagctgagggagtacagccccttccgctgcattccccggaccgggatcctggcccagtgcctgcccctgtgatgtgagctcgaacctgggcgcgagggaccggcctgggccctgggatgttcacgcaggaccgcgttgcgcgggggctggttccagcggaagcttcccttacggtttgtgctgctgtttctggggctctgaaaatctgtgggaactgaaaggctgtgaccagcctggtggcgcgaagtgtctgtgagaacaaatcccaggcactggggtgtagcctgattgttaaacatcaataaaggctcctggccgactgaaaaaaaaaaaaaaaaaaa

SEQ ID NO: 179 - DNA, 442 bp, Homo sapiens
ggcacgagatagaacccactgcctcctgatgaagtccctactgttcacccttgcagtttttatgctcctggcccaattggtctcaggtaattggtatgtgaaaaagtgtctaaacgacgttggaatttgcaagaagaagtgcaaacctgaagagatgcatgtaaagaatggttgggcaatgtgcggcaaacaaagggactgctgtgttccagctgacagacgtgctaattatcctgttttctgtgtccagacaaagactacaagaatttcaacagtaacagcaacaacagcaacaacaactttgatgatgactactgcttcgatgtcttcgatggctcctacccccgtttctcccactggttgaacattccagcctctgtctcctgctctaggatccccgactcattaaagcaaagaggcttaaaaaaaaaaaaaaaaaaaa

SEQ ID NO: 180 - DNA, 582 bp, Homo sapiens
ggcacgagatatttcgctggaccctagaaaagccaccacgacctgtgggccatgatgctaccccaatggctgctgctgctgttccttctcttcttctttctcttcctcctcaccaggggctcactttctccaacaaaatacaaccttttggagctcaaggagtcttgcatccggaaccaggactgcgagactggctgctgccaacgtgctccagacaattgcgagtcgcactgcgcggagaaggggtccgagggcagtctgtgtcaaacgcaggtgttctttggccagtatagagcgtgtccctgcctgcggaacctgacttgtatatattcaaagaatgagaaatggcttagcatcgcctatggccgttgtcagaaaattggaaggcagaagttggctaagaaaatgttcttctagtgctccctccttcttgctgcctcctcctcctccacctgctctcctccctacccagagctctgtgttcaccctgttccccagagcctccaccatgagtggagggaagtggggagtgattgaaataaagagctttttcaatgaaaaaaaaaaaaaaaaaaaaaaaaa

SEQ ID NO: 181 - DNA, 809 bp, Homo sapiens
ggcacgagctcgaactctccactgtccccatttcctgcaacagcatctcagagggcttgaggtggctatcaggccttccatcacagcataaagctccttcagggagagaagagcgaaggcacccaggctggggaacagcagctcctactatacctaccctgcccactctggtccaaccgtgggcttggcctgactttagactggaaccccttagtgctcctgttcctggtgtggagcagatccacctaccccaggggaaatgccaactactttgccttcagacctgatgctcctgtggttgggcctgccaagcctgccctccccagtggaagaagagggccgtcttgtgaaaggcctcaggctgacccttgcagcaccagcctctgaggtactgccagactgggaagaccctcccagccacccaacagcgtgggcccagcccaggacacatcagcccgacactccaaattctatcaagagtggcatttattctccttgtggaggtgcggtgctccggggagctggtgctattgtgcttaggaaggaggtctgtccgtccgtccgtctgtccggccggcctggccccaaatgggggcggaagaggggcacggcccgagtaaaaatcccggcctattccgggtgggaatatgtacaaggcggcggggcacaggcgggggtgggggcgggcgggccggcggccgcagcccccacccgagggcccccgcacctcgggccctacttgtagaatcagtacaaaataggtgctacctaaacgttccttctacctgaaaaaaaaaaaaaaaaaaaaa

SEQ ID NO: 182 - DNA, 1396 bp, Homo sapiens
aagtctcgtatcgcgcccgggaggcgccggagcccagcggctggcgccagatccaggctcctggaagaaccatgtccggcagctactggtcatgccaggcacacactgctgcccaagaggagctgctgtttgaattatctgtgaatgttgggaagaggaatgccagagctgccggctgaaaattacccaaccaagagaaatctgcaggatggactttctggtcctcttcttgttctacctggcttcggtgctgatgggtcttgttcttatctgcgtctgctcgaaaacccatagcttgaaaggcctggccaggggaggagcacagatattttcctgtataattccagaatgtcttcagagagccrtgcatggattgcttcattaccttttccatacgagaaaccacaccttcattgtcctgcacctggtcttgcaagggatggtttatactgagtacacctgggaagtatttggctactgtcaggagctggagttgtccttgcattaccttcttctgccctatctgctgctaggtgtaaacctgttttttttcaccctgacttgtggaaccaatcctggcattataacaaaagcaaatgaattattatttcttcatgtttatgaatttgatgaagtgatgtttccaaagaacgtgaggtgctctacttgtgatttaaggaaaccagctcgatccaagcactgcagtgtgtgtaactggtgtgtgcaccgtttcgaccatcactgtgtttgggtgaacaactgcatcggggcctggaacatcaggtacttcctcatctacgtcttgaccttgacggcctcggctgccaccgtcgccattgtgagcaccacttttctggtccacttggtggtgatgtcagatttataccaggagacttacatcgatgaccttggacacctccatgttatggacacggtctttcttattcagtacctgttcctgacttttccacggattgtcttcatgctgggctttgtcgtggttctgagcttcctcctgggtggctacctgttgtttgtcctgtatctggcggccaccaaccagactactaacgagtggtacagaggtgactgggcctggtgccagcgttgtccccttgtggcctggcctccgtcagcagagccccaagtccaccggaacattcactcccatgggcttcggagcaaccttcaagagatctttctacctgcctttccatgtcatgagaggaagaaacaagaatgacaagtgtatgactgcctttgagctgtagttcccgtttatttacacatgtggatcctcgttttccaaaaaaaaaaaaaaaaaaaaaaaaaaaaaaaaaaaaactcgagggggggcccggtacccaattcgccctggagttcaagtagacatcaa

SEQ ID NO: 183 - DNA, 1886 bp, Homo sapiens
ggcacgagcggcacgagggaaaatagagagcaacttaattatgttaaggttgactcaaactttttttttcatttcacagacacttctagattggttcttagcagcagctcttgctcttcctaatttgtgttccccattagcatctaatttcaagagcaggcaaatctcatctgttcccatccagcccagccagggaacctccagagttgctttgcagatatggtgtggatcctgcagaatgaggatgagctcttccacgatccacattcttgccctttaaaaaataaagcgggtaggcagcggggtggcggtgtggggtgtgtggggcaagagctagagcgttcctcctcagtgagtttgatgaagggagaatgtaaaacttggctgaacttagccctccaggaaagggtagccagaatgttgtattaatttagtgatgtcttcaaaagggtgtggtggaggaggagtctcattcagaatgagaagctgatcccagctcccaggaaatcgacacagttgctggtgtgtagtggtcagcactagccgagtccctatttgtagcttcatgctgttttttatactgttgtgatgtaatgtacatctgtgttcacccaagctgcctatgcaatgacttctataaagctcagtttttaaacacagtctcttacagataaaacaacagaaccagtgccagaaagcagccttcccttacatgggcacttctgccaagcatatgagttcattgccttgaagatcaaagtcaaagagaaatggagagggtgttgaaatgatcagcgaaaattaaatgaaaatatattcttattggaagctgatgctctattatcaataaaggacccatagcaaagatacatagaggagtgatttttcaagcagtcaagagcagaactacgaaggttttgagatggtgtagctgccaaagaagtcacccctggctgtcccccatctcagtgagcctgagttgaatgtttcccaatgtcatatcccacagggggatacttagtgcccacagcatgtgatcggtagctgataaggaagcattggaccagaatgtcatggaagaaacaaaagcccacttatcttccgcggcaatatgtttatgaacatgtgaatcattgttcatataactgtctcaaatacttggctgaaaagtagactgtttggtgttaagtttcgacttattttcgagggaggatgggatatggttatacaccatatgaaggattttgtgaataaagagtttcaaaatattttgggaatagtagttcggcatttattttttttcccagtcacatttcatgagcaacaattttatgtttaaggtagtatctgactaacctactgatgctgtctattcattccattagcatacttatgccatgggtaaaagcaatccatctagaactctttcaaccattttttagtttgtctttgcacactctagatagcatttctgaaatcatctgcaggaacagagttcctgaaaagagcaatggtctagagcaggctttctcagacttcagtgtgcaccagagtcacccaggatcttgttaaaatgctgattctgaggccaggcgcggtggctcacgcctgtaatcccagcactttaggaggctgaggcgggcggatcacggggtcaggagagcgagaccatcctggctaacagcatgagaccctgtctctactaaaaatacgaaaaattagccaggcatggtggcaggcacctgtagtcccagctactcaggaggctgaggcaggagaatggtgtgaacctgggaggtggagcttgcagtgagccgagatcgcgccactgcactccagcctgggggacagagcgagactccacctccaaaaaaaaaaaaaaaaaa

SEQ ID NO: 184 - DNA, 2971 bp, Homo sapiens
gacgtgaggagcgttccatttggccagtggtgggcggttgccacagctggtttagggccccgaccactggggccccttgtcaggaggagacagcctcccggcccggggaggacaagtcgctgccacctttggctgccgacgtgattccctgggacggtccgtttcctgccgtcagctgccggccgagttgggtctccgtggttcaggccggctcccccttcctggtctcccttctcccgctgggccggtttatcgggaggagattgtcttccagggctagcaattggacttttgatgatgtttgacccagcggcaggaatagcaggcaacgtgatttcaaagctgggctcagcctctgtttcttctctcgtgtaatcgcaaaacccattttggagcaggaattccaatcatgtctgtgatggtggtgagaaagaaggtgacacggaaatgggagaaactcccaggcaggaacaccttttgctgtgatggccgcgtcatgatggcccggcaaaagggcattttctacctgacccttttcctcatcctggggacatgtacactcttcttcgcctttgagtgccgctacctggctgttcagctgtctcctgccatccctgtatttgctgccatgctcttccttttctccatggctacactgttgaggaccagcttcagtgaccctggagtgattcctcgggcgctaccagatgaagcagctttcatagaaatggagatagaagctaccaatggtgcggtgccccagggccagcgaccaccgcctcgtatcaagaatttccagataaacaaccagattgtgaaactgaaatactgttacacatgcaagatcttccggcctccccgggcctcccattgcagcatctgtgacaactgtgtggagcgcttcgaccatcactgcccctgggtggggaattgtgttggaaagaggaactaccgctacttctacctcttcatcctttctctctccctcctcacaatctatgtcttcgccttcaacatcgtctatgtggccctcaaatctttgaaaattggcttcttggagacattgaaagaaactcctggaactgttctagaagtcctcatttgcttctttacactctggtccgtcgtgggactgactggatttcatactttcctcgtggctctcaaccagacaaccaatgaagacatcaaaggatcatggacagggaagaatcgcgtccagaatccctacagccatggcaatattgtgaagaactgctgtgaagtgctgtgtggccccttgccccccagtgtgctggatcgaaggggtattttgccactggaggaaagtggaagtcgacctcccagtactcaagagaccagtagcagcctcttgccacagagcccagcccccacagaacacctgaactcaaatgagatgccggaggacagcagcactcccgaagagatgccacctccagagcccccagagccaccacaggaggcagctgaagctgagaagtagcctatctatggaagagacttttgtttgtgtttaattagggctatgagagatttcaggtgagaagttaaacctgagacagagagcaagtaagctgtcccttttaactgtttttctttggtctttagtcacccagttgcacactggcattttcttgctgcaagcttttttaaatttctgaactcaaggcagtggcagaagatgtcagtcacctctgataactggaaaaatgggtctcttgggccctggcactggttctccatggcctcagccacagggtccccttggaccccctctcttccctccagatcccagccctcctgcttggggtcactggtctcattctggggctaaaagtttttgagactggctcaaatcctcccaagctgctgcacgtgctgagtccagaggcagtcacagagacctctggccaggggatcctaactgggttcttggggtcttcaggactgaagaggagggagagtggggtcagaagattctcctggccaccaagtgccagcattgcccacaaatccttttaggaatgggacaggtaccttccacttgttgtatttattagtgtagcttctcctttgtctcccatccactctgacacctaagccccactcttttcccattagatatatgtaagtagttgtagtagagataataattgacatttctcgtagactacccagaaacttttttaatacctgtgccattctcaataagaatttatgagatgccagcggcatagcccttcacactctctgtctcatctctcctcctttctcattagccccttttaatttgtttttccttttgactcctgctcccattaggagcaggaatggcagtaataaaagtctgcactttggtcatttcttttcctcagaggaagcctgagtgctcacttaaacactatcccctcagactccctgtgtgaggcctgcagaggccctgaatgcacaaatgggaaaccaaggcacagagaggctctcctctcctctcctctcccccgatgtaccctcaaaaaaaaaaaaaatgctaaccagttcttccattaagcctcggctgagtgagggaaagcccagcactgctgccctctcgggtaactcaccctaaggcctcggcccacctctggctatggtaaccacactgggggcttcctccaagccccgctcttccagcacttccaccggcagagtcccagagccacttcaccctgggggtgggctgtggcccccagtcagctctgctcaggacctgctctatttcagggaagaagatttatgtattatatgtggctatatttcctagagcacctgtgttttcctctttctaagccagggtcctgtctggatgacttatgcggtgggggagtgtaaaccggaacttttcatctatttgaaggcgattaaactgtgtctaatgcaaaaaaaaaaaaaaaaaaaaaaaaaaaaaaaaaaa

SEQ ID NO: 185 - DNA, 1337 bp, Homo sapiens
  misc_feature (1337)..(1337): n equals a,t,g, or c
cttccggttctccgggcagctgccactgctgtagcttctgccacctgccacgaccgggcctctccctggcgtttggtcacctctgcttcattctccaccgcgcctatggtccctcttggagccagcgtggcgggcctggcggctcccgggtggtgagagagcggtccgggaacgatgaaggcctcgcagtgctgctgctgtctcagccacctcttggcttccgtcctcctcctgctgttgctgcctgaactaagcgggyccctggmagtcctgctgcaggcagccgaggccgcgccaggtcttgggcctcctgaccctagaccacggacattaccgccgctgccaccgggccctacccctgcccagcagccgggccgtggtctggctgaagctgcggggccgcggggctccgagggaggcaatggcagcaaccctgtggccgggcttgagacggacgatcacggagggaaggccggggaaggctcggtgggtggcggccttgctgtgagccccaaccctggcgacaagcccatgacccagcgggccctgaccgtgttgatggtggtgagcggcgcggtgctggtgtacttcgtggtcaggacggtcaggatgagaagaagaaaccgaaagactaggagatatggagttttggacactaacatagaaaatatggaattgacacctttagaacaggatgatgaggatgatgacaacacgttgtttgatgccaatcatcctcgaagataagaatgtgccttttgatgaaagaactttatctttctacaatgaagagtggaatttctatgtttaaggaataagaagccactatatcaatgttgggggggtatttaagttacatatattttaacaacctttaatttgctgttgcaataaataccgtatccttttattatatctttatatgtatagaagtactctrttaatgggctcagagatgttggggataaagtatactgtaataatttatctgtttgaaaattactataaaacggtgttttctgatcggtttttgtttcctgcttaccatatgattgtaaattgttttatgtattaatcagttaatgctaattatttttgctgatgtcatatgttaaagagctataaattccaacaaccaactggtgtgtaaaaataatttaaaatttcctttactgaaaggtatttcccatttttgtggggaaaagaagccaaatttattactttgtgttggggtttttaaaatattaagaaatgtctaagttattgtttgcaaaacaataaatatgattttaaattctcttaaaaaaaaaaaaaaaaaccccgggggggggcccggn

SEQ ID NO: 186 - DNA, 1129 bp, Homo sapiens
gctgcttcccaaggaccatgaaactcctgctgctggctcttcctatgcttgtgctcctaccccaagtgatcccagcctatagtggtgaaaaaaaatgctggaacagatcagggcactgcaggaaacaatgcaaagatggagaagcagtgaaagatacatgcaaaaatcttcgagcttgctgcattccatccaatgaagaccacaggcgagttcctgcgacatctcccacacccttgagtgactcaacaccaggaattattgatgatattttaacagtaaggttcacgacagactactttgaagtaagcagcaagaaagatatggttgaagagtctgaggcgggaaggggaactgagacctctcttccaaatgttcaccatagctcatgacttcctctcggctatcactcacccctgtcctcagagtgataaactaagtcacatacagataaagcactgaaaacaccacagtgaccctcccaccccccaccaatatgtaattctattaatagaaacagctgtgtaaagaagtctaaaattttcactatttccaatgataaactcttcagtgctcttcttgaaatgtcacattatttcccaacaagttatacctatttttagtattcttgttgctagtgccatgcacaacttcaatagctagttgctattccaacaacaatttcttcatgtatcgttctgtcttctcaacagctgtctttcatggcagcataagtggtcatgatcaaaattctaaatcttgcatctgtgagagtagctactatgacactaaaagctttttttctagaacaggagacacttcaggtgaagcattcattctcctactaactatggccttggagccaggttttatctctcactgtaggaaattggccgccccaggtgtgagctatgaagactcctttttgccccagtggctttggggttgaaatgctgtcgaaaagcttttatggctctgtagacccatctttttgaccaagccttgatcacacatggacatccaagggtaatcatggacccccaattgtgggtgaaaggatggatcatttatctacctgattactgagagctttatttgtctccctctgatagcaaaaaaaaaaaaaaaaaaa

SEQ ID NO: 187 - DNA, 799 bp, Homo sapiens
ggagacggtgggtgaccagagagtcctgtctatcctaggaggagaacattcagcccaaatcccagccccatcatgcacagatcagagccatttctgaaaatgtcgctgctgattctgcttttcctgggattggcagaagcctgtactcctcgtgaagtcaacttgctgaaagggatcataggtctcatgagcagactgtcaccggatgagatcctaggcttgctgagcctccaagtactgcatgaagaaacaagtggctgcaaggaggaagttaaacccttctcaggcaccaccccatccaggaaaccactccccaagaggaagaacacgtggaacttcctgaaatgcgcctacatggtgatgacctacctcttcgtatcctacaacaaaggggactggttcactttttcctcccaagtgttactgccactactgtaacttggaactggacatcagggatgatccctgctgttctttctagtgagcctgctccatctcagcttagccttcacaaggcctccatctcccaggcattctaacctctgaagaaagctctctgtcccctggactgcctgtgtggagggtaatgaactgggtcctttaaggaatggcacctgggtgcccagaggcatggccagaaggtgtctgtgggggccatgccttagggggatgcacccagggcggctgagagagcaactgcaggagtttcccctaaaatctctcctccagatcgttctcgaactttccccactacttccataataaaatgtatacttgttgaaaaaaaaaaaaaaaaaaa

SEQ ID NO: 188 - DNA, 1689 bp, Homo sapiens
actatagaagtcgcctgcagtaccggctccggaattaagggtcgacccacgcgtccgggctaattgtttggtcagaaattcctaaggccacagctttggggggttcgtgtagatgtacatggtgggtgggttataaatattgggacttaaggcagcttgttctatgtatttatctttgctcttgggtgacttagggaatgattttatttgatttaaccttctttctgtttgccccgagaatactcgccagtggcgcttgcagttgtagcatttaccccaagataactttgcctacgaaatatttcgcttttattatttycacatcattctagtatatggactttggaaacaaaagacattgttctatttatagcattctttttttttttttagtagcggtatttccatttacaaaatatagtaactcttgattactgaaaatgtcaaatcctagaaaacgtagcatgcctatacatgatgttaacatcattctcgaacagttgttggccgaagattcatttgatgaatccaatttttttgaaatagacaattctgatgttctctttagaaataactcagtttttatcttttttcacattgaaaatcagttagatttgcttaagcctcaaagagaatgtttatgtaaattagcgctggcaatttttttttttctaaacaggaaaagggttaaatgaaggttgataaaatggatgttcaattgtctttctgaaagtgagtggcttgaagggatgaataaatattttcttaatatattcaaaaaagtgcattgctttctgtgatggaagttaagacctaaatgtctggaagttgtaaccctcaacacagcttttcctgatttgctgcaaaggcacatagctgattatagaagtgaagacggcaaggacggggactccaacaaaggaaaccctgttgcaggatttgggaactttcatgcttcagatgaaattcaggcatgtgagcatcactgcagaatgtggtgcatcattgccatcatgagtaatcacttgctgctcctacttctgagaccaagactcttttgtcatattctttagcaataggacgggtaaagactggatttaattgctgttcagagtataaaaactcaattgattccaacatatctgaatgtgcagtaaagtcttaaaagtcaaccgttaatcattaagtcttttgcctctaaagtcttttgcctctgaagaagtttattacatgagttgattttcatattttcattttggtggggttttcctgttgttgggcaaggtggggtcacaggacatgggactagtaagcattttactgtttactatatttgtctttttataaacagtatctcccaaaatgtgattagaaggctaccaagcctgtatttggacatttaattgtgtgctttatataatgtaactactaacagtatttggactgcctgttcattcctggagacaaaaatgaaaatctgtcagttcaagttcttgggtaacatcaagtcattagaatttatctaaagcttatcatgatttgataagacatccattgcatgcagctgttttagctcagtgcaaaacactgaaattgtgattcttagactgtttctgagacatttggatggaaataaatgtataaatgttaaaaaaaaaaaaaaaaaaaaaaaaaaaaaaaagggcggcc

SEQ ID NO: 189 - DNA, 420 bp, Homo sapiens
ggcacgagagagagcagagctatacatagctatccaggtctaacttcacgaagaatagaatggtttcttttcattttcaatgtacatcatactttgtcagacttttttttcagttgcagctcttcgttggactggtgatagtattggctttattaatctctcattctctcacttattcattccacaaacatttgtagaaggccaccaagctctagggagaggaaaatggttttataaattagtgctttctgggataaaggaaatttataatctgtactacttaatagtagccactagccacatgtggttttcgaacaagatttccatcacctctccaaccactttctcctcattggtcagatctagaccccgagaaactgttcctttcattgttttctccgccttctacaaactgagata

SEQ ID NO: 190 - DNA, 1090 bp, Homo sapiens
  misc_feature (8)..(8): n equals a,t,g, or c
  misc_feature (28)..(28): n equals a,t,g, or c
  misc_feature (43)..(43): n equals a,t,g, or c
  misc_feature (54)..(54): n equals a,t,g, or c
  misc_feature (95)..(95): n equals a,t,g, or c
  misc_feature (545)..(545): n equals a,t,g, or c
  misc_feature (863)..(863): n equals a,t,g, or c
cattgacntcaatgggagtttgttttgncacccaaaatccaangggactttccnaaattgtcgtaaccaactcccccccattgaccccaaatggncggtaggcgttgtacgggtgggaggtctatataagcagagctcgtttagtgaaccgtcaagatccgcctggagacgccatccacgctgttttgaccctccatagaagacaccgggaccgatccagcctccggactctagcctaggcttttgcaaaaagctatttaggtgacactatagaaggtacgmctgcaggtaccggtccggaattcccgggtcgacccacgcgtccgccagcctggaggcccagacgtggcgcagcgactcggaggttcgcctccagcttgcgcatcatctgcggccgggtcccgatgagcctcctgttgcctccgctggcgctgctgctgcttctcgcggcgcttgtggscccagccamrgccgccactgcctaccggccggactggaaccgtctgagcggcctaacccgcgcccgggtagagacctgcgggggnatgacagctgaaccgcctaaaggagagkgaaggctttcgtcacgcaggacattccattctatcacaamctggtgatgaaacacctccctggggccgaccctgagctcgtgctgctgggccgccgctacgaggaactagagcgcatcccactcagtgaaatgacccgcgaagagatcaatgcgctagtgcaggagctcggcttctaccgcaaggcggcgcccgacgcgcaggtgccccccgagtacgtgtgggcgcccgcgaagcccccagaggaaacttcggaccacgctgacctgtaggtccgggggcgcggcgganctgggacctacctgcctgagtcctggagacagaatgaagcgctcagcatcccgggaatacttctcttgctgagagccgatgcccgtccccgggccagcagggatggggttggggaggttctcccaaccccactttcttccttccccagctccactaaattccctcctgccttaaaaaaaaaaaaaaaaaaaaaaaaaaaaaaaaaaaaaaaaaaaaaaaaaaaaaaa

SEQ ID NO: 191 - DNA, 1676 bp, Homo sapiens
  misc_feature (798)..(798): n equals a,t,g, or c
  misc_feature (927)..(927): n equals a,t,g, or c
  misc_feature (944)..(944): n equals a,t,g, or c
  misc_feature (974)..(974): n equals a,t,g, or c
  misc_feature (1035)..(1035): n equals a,t,g, or c
  misc_feature (1058)..(1058): n equals a,t,g, or c
acgagcagattcccaagaaggtacagaagtctttgcaagaaaccattcagtccctcaagcttaccaaccaggagctgctgaggaagggtagcagtaacaaccaggatgtcgtctcctgtgacatggcctgcaagggcctgttgcagcaggttcagggtcctcggctgccctggacgcggctcctcctgttgctgctggtcttcgctgtaggcttcctgtgccatgacctccggtcacacagctccttccaggcctcccttactggccggttgcttcgatcatctggcttcttacctgctagccaacaagcgtgtgccaagctctactcctacagtctgcaaggctacagctggctgggggagacactgccgctctggggctcccacctgctcaccgtggtgcggcccagcttgcagctggcctgggctcacaccaatgccacagtcagcttcctttctgcccactgtgcctctcaccttgcgtggtttggtgacagtctcaccagtctctctcagaggctacagatccagctccccgattccgtgaatcagctactccgctatctgagagagctgcccctgcttttccaccagaatgtgctgctgccactgtggcacctcttgcttgaggccctggcctgggcccagggagcactgccatgaggcatgcagaggtgaggtgacctgggactgcatgaagacacagctcagtgaggctgtccactggacctggctttgcctacaggacattacagtggctttcttggactgggcacttgccctgatatcccagcagtangccctgccttcctggccactgatttctgcatgggtagaccatccaagactgcagcgggtagaaggtggcagttcttcatgggagtctttttaacttggtgcctgagttctctcctaagcaagtggccanttgcctccacctcagtncttccatctttgggtgggggacaggggccnagcaagcatctcagcctcctacccacaattccactgaacacttttctggccctactgcacntggcccccagcctccatccttgngctggtagcctctcacaactccgtccttgccctttgccttccacttccttccatctcatttctaaaccccaaacagctcatctctaaaaagatagaactcccagcaggtggcttctgtgttcttctgacaaatgattcctgcttctccagactttagcagctcctgatcccattcttggtcacagctctagccacagcagaaggaaaggggcttgcagaagaatatagcaccgaattgggaaacagcagcctcacctccacctgaagcctgggtgtggctgtcagtggacatggggagctggatggaaatgcctctcacttcaaaatgcccagcctgccccaaatgcctctaagcccctccctgtcccctcccttgtagtcctacttcttccaactttccattccccatcatgctgggggtcttggtcacaaggctcagcttctctccactgtccatccctcctatcatctgtagagcagagcacaggcagttgtgtgccttgggcccagggaaccctccatcaacctgagacaggactcagtatatggttcttgggtatgccctaccaggtggaataaaggacacagatttgatttctaaaaaaaaaaaaaaaaaaa

SEQ ID NO: 192 - DNA, 1569 bp, Homo sapiens
  misc_feature (341)..(341): n equals a,t,g, or c
gtattggccaggctggtctcaaactcctgacctcgtgatccacccaccttggcctcccaaagtgcagagattacaggcatgagccactgcacctggcctcaagaaaaattatatatcacgtggaataggatagtagtctctgcactgattttcgttgataatggctgttcttcttatcaccattttgctatttctttgtctgggctattacagggttattacagaaatttccagaaagacccctgcctgtcgaatgtttacttcaagcttgagctcctggtatattatgaggaaattatatgataccccaggagaggtcttcctttcccatgccattgtanaattcctaaagtaaaattaatttgccttcttgtcaaagaaggagccaatgttgttttaaaattttagcttgagagataggtggggaagaaattaaatagacaagtaatcmctattcagaagagaagggagagtcattgtacgaggcccaagatacttgcccaaaaatatcgcagagaaaaactagtctttggggtcctattttttgagtggaacatttgagttatttaaaattagaattttattttggtcagattagaatttctagggtatgtcatatgtgtttttaaattgaaagctcttaaaactcctattgtagtttaatgtcattatccattaatttacataaatctgatttggatctctattttcatcgtagactgtgtaggggcaatttttcctaaaggttctgtgacatagtgctaccttttttttaaaacctgtcttgcccaggcattattgagtgccccctggtgccagcatgtgtatttcacgactgtatcaacaaatcatgatcatcttctctggccattgtgccctttcagattccaaacttgttacctctcagtccttcctacaaacttagaaagtctaatatcttaatgtttacttatgtagcaacctccctttctcccatccctaaatcctcttgtaattaattattttcctttggaactttttaaatctacaatttccttataatatggtaaccaatattaattttcttgttctgcgccaagtttgattttatacaaattgtttccagtttgggtcatgagcacaaaaccaggtatttttaaaaatctatataacccttcaatgaggcagtattaattttattaactcattaattcaaccaataattcttgattgtttactgtgttagatattggggtatccccaatacctgacagctgtgagcaaaacaaatgccctacacacatgaggtgtacagtccagtagaaaagataaacaataagcaaattaatagataatatgatgtccaataaggacttcaaaggaaaataaagcagagtaaagagccagagaatgacagtgagctgtttttcacatgagtcatcagaaaaggcctctttaaagaattgacatttgaacagaaaaacgaatcaagggcgtcaactgtttattgcttttattgcttaccatttgaccaagcaattctacacataggattcaccctaaaaaaaaaaaaaaaaaaaaaaactcgag

SEQ ID NO: 193 - DNA, 1251 bp, Homo sapiens
gcaccgtggagctgcaggagatgccccttgtccaggagttgccactgctgaagcttggggtgaattaccttccgtccatcttcatcgctggggtcaattttgtgctgccgcccgtgttcaagctcattgctccactggagggctacactcggagtcgccagatcgtttttatcctgctcaggaccgtgtttcttcgcctcgcctccctggtggtcctgctcttctctctctggaatcagatcacttgtgggggcgactccgaggctgaggactgcaaaacctgtggctacaattacaaacaacttccgtgctgggagactgtcctgggccaggaaatgtacaaacttctgctctttgatctgctgactgtcttggcagtcgcgctgctcatccagtttcctagaaagctcctctgtggcctctgtcctggggcgctgggtcgtctggcggggacccaggagttccaggtgcccgacgaggtgctggggctcatctacgcgcagacggtggtctgggtggggagttttttctgccctttactgcccctgcttaacacggtcaagttcctgctgcttttctacctgaagaagcttaccctcttctccacctgctccccggctgcccgcaccttccgggcctccgcggcgaatttctttttccccttggtccttctcctgggtctggccatctccagcgttcccctgctttacagcatcttcctgatcccgccttctaagctttgtggtccattccgggggcagtcgtccatctgggcccagatccctgagtctatttccagcctccctgagaccacccagaatttcctcttcttcctggggacccaggcttttgctgtgccccttctgctgatctccagcatcctgatggcgtacactgtggctctggctaactcctacggacgcctcatctctgagctcaaacgtcagagasagacggaggcgcagaataaagtcttcctggcacggcgcgctgtggcgctgacctccaccaaaccggctctttgacccccgcagcccacgtcccgctttcagaccccaggcccattgtaagcctaggtcacaacatctgtaaactaggagaactggagaagactccacgcccttccagctttggtatctggagatttccagggcccctcgccgccacgtccctgactctcgggtgatcttccttgtatcaataaatacagccgaggttgctgaraaaaaaaaaaaaaaaaaaaagtcgagc

SEQ ID NO: 194 - DNA, 1345 bp, Homo sapiens
tctacctcttgtcctccccccaacaccaccaccaccctggctcccctccctcatgaccgcctggatcctcctgcctgtcagcctgtcagcgttctccatcactggcatatggactgtgtatgccatggctgtgatgaaccaccatgtatgccctgtggagaactggtcctacaacgagtcctgccctcctgaccctgctgagcaagggggtcccaagacctgctgcaccctggacgatgtccccctcatcagtggccctgatctgcctcctgcgctacgggcagctcctggagcagagtcggcactcttgggttaacaccacggcactcatcacaggctgcaccaacgctgcgggcctcttggtggttggcaactttcaggtggatcatgccaggtctctgcactacgttggagctggcgtggccttccctgcggggctgctctttgtttgcctgcactgtgctctctcctaccaaggggccaccgccccgctggacctggctgtggcctatctgcgaagtgtgctggctgtcatcgcctttatcaccctggtcctcagtggagtcttctttgtccatgagagttctcagctgcaacatggggcagccctgtgtgagtgggtgtgtgtcatcgatatcctcattttctatggcaccttcagctacgagtttggggcagtctcctcagacacactggtggctgcactgcagcctacccctggccgggcctgcaagtcctccgggagcagcagcacctccacccacctcaactgtgcccccgagagcatcgctatgatctaaggtctggggagggtggctggcccggcctccacagcaccccaccccatatcttctttccatttattttgtaccaaaaacaattttgagaaagtattctgttgggatctgggcttcctcacttctggagaagtggccatcccatgcccacctgtgccatggaggagtgggccctgccagctgccacagctgcatgacctgcttccccaccccacggtgtcgttttgtttttaaaggtcacctgtcctcactcacccagccagcccttcaggtgccttctactcccagtgccaaagccagaccactggggtttcctgctgcaggaattgggggctgggaacagcagaggggatagaagtctggtggaggtggagtgggcacgccttagctacggaaaggcccatttctgggcccactgagctgcactgggattcttcactctgcccctcacttcctttagggcaaataacacagcagaaccacgtgggtattttagtacttttttttatattaaaagaattctaatttgcaaaaaaaaaaaaaaaaaa

SEQ ID NO: 195 - DNA, 1323 bp, Homo sapiens
  misc_feature (1086)..(1087): n equals a,t,g, or c
gctgaagatggggtccctcgcacggcacggtccatgtccctcacgctgggaaagaatatgcctcgccggaggtcagcgttgctgtggttcctaagtttaatgccctgaatctgcctggccaaactcccagctcatcatccattccctccttaccagccttgtcggaatcacccaatgggaaaggcagcctacctgtcacttcagcactgcctgcacttttggaaaatggaaagacaaatggggacccagattgtgaagcctctgctcctgcgctgaccctgagctgcctgggaggagcttagtcaggagaccaaggccaggatggaggaagaagcctacagcaagggattccaagaaggtytaaagaagaccaaagaacttcaagacctgaaggaggaggaggaagaacagaagagtgagagtcctgaggaacctgaagaggtagaagaaactgaggaagaggaaaagggcccaagaagcagcaaacttgaagaattggtccatttcttacaagtcatgtatcccaaactgtgtcagcactggcaagtgatctggatgatggctgcagtgatgctggtcttgactgttgtgctggggctctacaattcctataactcttgtgcagagcaggctgatgggccccttggaagatccacttgctcggcagccccagggactcctggtggagctcaggactccagcatgagcagcctacagagcagtaggaaacctcacacctagccagtgccctgctctgagacactcagactaccaccctttccccaagtataacgtcaggcccaagtgtggacacactgccgcccatcccatcaggtcatgaggaagggttcttttaacactcggcacttctgtgggagctattcatacacagtgacttgatgttcttggaggatcaacaaaactgccctgggaaagcatccagtggatgaagaagtcaccttcaccaaggaactctattggaagggaaggtctcctgcccctagctcaggtggctggggagaactaaaacaccttcactggtggttgggggtaaggagcggggcacgggggaggaggaggtagggnncagtaaaaaacttactctcttttttcctctctgtaattggttatcaggaagaatttgcttaatgactaacaccctaagcatcagacctggaatttggagttgcaaagtgactatcttcccatttcccatctcattttcaataacttcagcctcccattctttcctttggaatgagagtttctttttacagaagtaggaaaggcttctcagaaaaaaaaaaaaaaaaaaaaactcga

SEQ ID NO: 196 - DNA, 669 bp, Homo sapiens
cagcctcattttctcagtgccccagaggtctaggataggatttctaaactggaatcatccttaatcaccttgaagatcccttaagaggcatttgactggtgctgccgtctgtgtcctcaaagcaatgctggtggcatcgtcctgtgtacacatgcagagctaatacccaaactaaaaactgggtaactggccctgaagtgcttcccaatcagtaagccacagggaaatgtttgatttttatgttctgttggattttggtttgcttggcatatctaaaggtgcctttacttttctttttttttttttttctttctgctttgttttgtaggacttgttctaacatggaaaacaagtccagaagactctcctctgactgttacctttgccccaagccaccccaaacttttatgctcatgttttattaaagcaggtgctccctggaatctctgggacatttttgaggcatttgaagcagaatatagagtggtctcatctccttccttaatcttcctggtggttgggatgttccacttgtatcatagatttttttattacagatatgctccactgtttttaaatgtgaacttgtgcgcaaatgtgcagattcaatgttcttgttacagattgaataaatttttattttgaarawraaaaaaaaaaaaactcgag

SEQ ID NO: 197 - DNA, 1271 bp, Homo sapiens
ggggctgggccctgctcaggtggctctctccttgcagggaccggcgatgctctgcaggctgtgctggctggtctcgtacagcttggctgtgctgttgctcggctgcctgctcttcctgaggaaggcggccaagcccgcagagaccccacggcccaccagcctttctggggctcccccaacaccccgtcacagccggtgtccacccaaccacacagtgtctagcgcctctctgtccctgcctagccgtcaccgtctcttcttgacctatcgtcactgccgaaatttctctatcttgctggagccttcaggctgttccaaggataccttcttgctcctggccatcaagtcacagcctggtcacgtggagcgacgtgcggctatccgcagcacgtggggcaggtggggggatgggctagggccggcactgaagctggtgttcctcctaggggtggcaggatccgctcccccagcccagctgctggcctatgagagtagggagtttgatgacatcctccagtgggacttcactgaggacttcttcaacctgacgctcaaggagctgcacctgcagcgctgggtggtggctgcctgcccccaggcccatttcatgctaaagggagatgacgatgtctttgtccacgtccccaacgtgttagagttcctggatggctgggacccagcccaggacctcctggtgggagatgtcatccgccaagccctgcccaacaggaacactaaggtcaaatacttcatcccaccctcaatgtacagggccacccactacccaccctatgctggtgggggaggatatgtcatgtccagagccacagtgcggcgcctccaggctatcatggaagatgctgaactcttccccattgatgatgtctttgtgggtatgtgcctgaggaggctggggctgagccctatgcaccatgctggcttcaagacatttggaatccggcggcccctggaccccttagacccctgcctgtatagggggctcctgctggttcaccgcctcagccccctcgagatgtggaccatgtgggcactggtgacagatgaggggctcaagtgtgcagctggccccataccccagcgctgaagggtgggttgggcaacagcctgagagtggactcagtgttgattctctatcgtgatgcgaaattgatgcctgctgctctacagaaaatgccaacttggttttttaactcctctcaccctgttagctctgattaaaaacactgcaacccaaaaaaaaaaaaaaaaaa

SEQ ID NO: 198 - DNA, 933 bp, Homo sapiens
ggcacgaggtgcttccctcccagatggctgtgtatgtattttcttttcttttttgctttcttcttctttccgttgttttgttattgttttaactataataagagggccagaggcagtcaagccctggccaggtcctggcggcccatgggggttctggggagggggaggggggaagtcagtgggggtcagaggtggagggtgaagaatgagaaagttggggagttaggcttagctcaggaaccatgtgtccctgcccactcccctccttccttgcccctccctacctccctgcctctacatggcttctctccacccctcccagagtcctacgggacaggaccctgctccagtggtatccaactcctccctgcccactcttcctcatgggccacctcacctcccactttcgatgtctcgcctcccgtggccaccctgcaattagctttccaagccccctcccgtggccgtcccctcccaagacctctcacccatgtagcaatccctacatggctgcctgtcatgtccctactctctaagccctcctgcccactgttcctccctccccgacatgctgasaccaagtggtggaaaccacccctcagccccagcctgccctgtgcagarttcagctktgtgttgaatgagggggagarggacaagtgagggcggagagagagttcaggaggaggcaggatgcgcagggagcagagagtgagggagggagataccgaacagatagacagaaaacgttgtacggaaaagttgttttttcttattttttttccgggagaacccgcttacacagctctgtttgtaatttttttcttcatgctaaaatcacacggcctatttgttgatgtaagttgcctgaattccgtggtatgctatcttcttttttaaaaacaaaagcaaaaaaaaaaaaaaaaaactcga

SEQ ID NO: 199 - DNA, 470 bp, Homo sapiens
ggcacgagggaaatcttgcacataggcaggtaaataattataaatggtgaagtggattattctgagctgcttaattttaaagggaaagagaactttaaactcttcaaccttttatgctgctaataagagttccacaatcaatagaaatctatcttggcaggcacttccttttacccactagaattttttcccttgggagttcacgatccccagaaactgtgatatgagccattcaatattgatgtactaaaacagtgctctgcttaaatacagtttttcaacatacagtcttggaagaaacaaaatccaaaataaattccaatagtccagtaacaggaataaagacaactattgcaaattaaatcttacagacttatatgaaagctgttgttaacagctgggtactagttatttgaaaagtttctcgtgccgaattcgatatcaagcttatcgataccgtcgacctcgta

SEQ ID NO: 200 - DNA, 1020 bp, Homo sapiens
  misc_feature (3)..(3): n equals a,t,g, or c
cgncacgaggtgaagttcaacccaatgcaactttccttcagtctttccgtgaaagcgcctgtgaaaaatgaggtcatatttccctttctcagtctgccccttcccgttttgctctccggttttcttctttgtcttcacagatgtttacctatgttttttctttgtttttgctgttggaagacatctaagtgatccttttcccattctctttttcactcataaatgtcctgatgtttagcaaaaggcagttctctttgctacttgagcttgtaaactgttgttaaatgagtaaccaaaaggaaagtccttgcgaagttggttaccatttcagatacaagaaccgtttatcttcccacgctgacgaattttgcgagtgagatgattatttttccttgtgtttgtaatttatttaagtaaattccttgtttgtttttcttttcagtacaccaggggtatatattttcaatatgacatgtacctttggttcagggctaagttagagtctgaaaaatgaagcctgtaggattcatggcagtgatctaattgtgattcatcttactgattgtagggcaagaagagtggactaactcaagacacaaggcaccttcagcgaggacagcaaagggcgtctacagagaccagccatatggcagatactgattgtactgtctgatgttgtgaaatagccaatctccaccagtcctgtatactgttcaaagtaatttttttctatgaacaatccctttttaaataaatcaaaatgcttaaaatctgaatggatggaacttaaaactactttgttgaaacatcaacctgggcagaaaaaaaaaaaaaaaagacatgtaaaattttgttatttccagtctgtatatgaaaaaataggtcatcaaaaggaaaaaaaataactttgattaactagtgttaaacaaaaaataggtttactaaatctcgtgccgaattcgatatcaagcttatcgataccgtcgacctcgtagggggggcccgtacccaatcgcctgt

SEQ ID NO: 201 - DNA, 1881 bp, Homo sapiens
  misc_feature (70)..(70): n equals a,t,g, or c
  misc_feature (126)..(126): n equals a,t,g, or c
  misc_feature (1860)..(1860): n equals a,t,g, or c
atttttccttttccttaacaatacctttggccatttttttccagttcactatgtttgtatactaactttncttcagccttttaatgcgaagcaactagtagagcatgctttcaggatctgacagcnctgctagtagagcgaagtatttattaatacagaattaaccttmgcccctttaaagtcaagtctgtctaatctaactagcgcctcgctttgccttctcacaatgctcactagccatcatgctcacccttctcttccagatccacttcctcatgatactgtcttctaactgggcttacttaaaggatgcgagcaaaatgcaggcttaccaggatatcaaagcaaaggaagaacaggaactgcaagatatccagtctcggtcaaaagaacaactcaattcttacacataaatgtttgccagagtgtttcggccgacgtatttacagctctgacaaatcatcagacagctgctctgcagtacagatgtgtatcccaccaaactaatgtagatgtacaaacacttcactgtctgtctcaagctgctgggatgtatctctaggaaaaccttccagtgggtaaatctttttctttagaacaaatattggaggtttcatgttagccattttaaaaggcaacactttgacaaaatgatcgttcatactttgggaatttgtggcatgttcacatttattgctagggcaattctaccaagacactcaatggaatatgtcacactccttaatagggacctgtgactccttaataaggacctgtgacatgcccagcatcaagggataagaccgtaaattcacatatatgccatctgtcctcaagtgttatctacataggaaataaaatggaattgatgtaaagttccatttctgacagctgacatttattaaactttggatcaaagataatgtgattcttatgattgatttctcaaactagcttttccctcccaagtccaggacccattaatttcctgagccaatcagaaatatatttttcaataatgctaaaattagctacaattctgctgaccctactattaaagaatctggatgctggactcactgacaagctttccagaagcaattttataacagatttcattttaacaaaatactgatccaattttcattattcttgagaaatgtcagctttgccttaatgagtatttgctttaaatttctaagaatttatatcataactagagacccaaatatctttcacagaattttgttccataaatgtttttcttaattattaagaagtgttaccttattaaaatgaccaccattctaaaccatttttcagtggtctggatacgaagtttacagtttcataccaactatctaaaacctaattgcaaattgaccacagacctctaacctcctacttttatagacttgaatacttaagtaatttaaattagggttggtatttcatttttttcttatctaaatcttagtttcctggaataataaagtttgatgttcagcaagagaactgcttgagtttaagccattttcaaaagaaacttgccttttacattattgtgttccagaacattaagtgactgtaggtactgggtattagtgatggtaaactttgtgttgctctttatgaaatgatccatataactgttgggtgcatcagtgcttttcaaaggggctgcttactatagggttaactatgtatattcattgttaagagttaacttgtggtttggctgttycctggattttataacatacatgtgcagaaatgtattcaaatgaaaggaagcatacctttatcaagatgctattaaaattgaacatcaagtataaaaaaaaaaaaaaaaaaaaattnctgcggccgacaagggaattc

SEQ ID NO: 202 - DNA, 1408 bp, Homo sapiens
acgcgtccggcggccgggtcccgatgagcctcctgttgcctccgctggcgctgctgctgcttctcgcggcgcttgtggccccagccacagccgccactgcctaccggccggactggaaccgtctgagcggcctaacccgcgcccgggtagagacctgcgggggatgacagctgaaccgcctaaaggaggtgagtttgaaggaagaggtccctagctctgttccccctgagcctcttggggagtgggcaacatggtcccaatgactggggcggggaggggggaaggatccctaggctgagagtctagcctaggctgggagtctagcctgcacctgacttgctttatgacctcactgggcttcagtgtctcgtctgtacctcgagtagactgaggtcatggtctctgatgctctggttcctccccaggtgaaggctttcgtcacgcaggacattccattctagtatccttctgttctgggggaggggaaatgggatgggcacctgggagaatctccacgtaacttcagaaaggggtggcagatggttttcaactgacaagttgaattgattgctagtggctcccagaggattctgaggtggtctccatgttgggtgggcaagagagattgactagtgatgactgccacagaatggagaggagggccctttacttctttgaaccctaattttctcacgtataagcggagaccctggcccctcccgggcacagagtaagctctgagcaaaggaggcaatgctgttcccatcagtaaggctgcggaaaccaccacctccctctgcccaccaccccgctccttaacaccacctccagtcacaacctggtgatgaaacacctccctggggccgaccctgagctcgtgctgctgggccgccgctacgaggaactagaggtgaggccgtgggaggtgggctgggggcgaggccagaggcgaggcccagcctgctgaccccgcccctcctccgcctcagcgcatcccactcagtgaaatgacccgcgaagagatcaatgcgctagtgcaggagctcggcttctaccgcaaggcggcgcccgacgcgcaggtgccccccgagtacgtgtgggcgcccgcgaagcccccagaggaaacttcggaccacgctgacctgtaggtccgggggcgcggcggagctgggacctacctgcctgagtcctggagacagaatgaagcgctcagcatcccgggaatacttctcttgctgagagccgatgcccgtccccgggccagcagggatggggttggggaggttctcccaaccccactttcttccttccccagctccactaaattccctcctgccttaaaaaaaaaaaaaaaaaaaaaaaaaaaaaaaaaaaaaaaaaaaaaaaaaaaaaaaaaaaaaaaaaaaaa

SEQ ID NO: 203 - DNA, 2407 bp, Homo sapiens
ggcacgagtccagaggtcttcaacaggaagatgccagctggcaccactgcactgtgatgggggccctctcctctgctgactctgccgtttctccaggcctccgctcagtgatgagaccaagagatcggagacaagcatggtgctgctgcttctgctgcttctccagaaaatccctgggacacctttgttccagcctggtttcctgggctgggctcaggaaagctgccaaattcagtcctatgttgggtccaagctgcccctgtgctgtttctgtcaagccaggtgtggacattccaagttcatatgcgtgaacaaaagaaaagaggaacccagtggatgtaacagaaccgactccagttgaatgtttagatttttgctaaactgttttctttttcccttttttgctgtggtttgcattcacggcagtagttagcccaggtgtggggaacgagagtgcactgcatgatagcgttctggtgagctgggaaggacccaccactgccactgaggattgttttggaagaaaggaatatttttatcttggggaccagctaagtctctgcagtagtgtgaaattccaaatggttgttttatcattggtttggtttaccaaaaaaaaggcagggaaaaaaaaaaaaaacaaccgtatgagcgcattggcttgtctgccgcaggcacagaagggtagaaagccacagcagggggcagtccagcagactctgactcaactttctaggcacctagcagagaaagataagatcaaaaggtgtttggtttttcttttaatttttattgtagtttttttgggtgggtgggggaagtaaactagactgaagcgatggatttttttttttcttttttttctttagtgtttttccctttgttcttgaacacttttgccctgcagcctcagttttgaattcttttagcaacttggattagaggggcccatatgtcagaagctcccagcacctcctacttgggagaaaagtgagccatctgctggtcaggaagtcctccagagaggcagcttttcccacaatggtggcaggaaactttggggaaagcaggaatggtgtccactgctgcggaggaactgccttcagagaaggtggggctggaaaagggttagaagcctcctagctgggattgtctttgtttcacctttctttaaattagaattacagaagcccctgcccagtgaacagataacaattggtcttatgctcctccctttcccccattttttcttttgctgttttgttttttgttttttgtttgtttgtttgtttttttgagacagagtcatgctctgtcacccgggctggagtgcagtggtgcgatctcagctcactgtaacctccgcctcccgggttcaagcaattatttgcctcagcctcccgagtagctgggattataggcacccgccaccatgtctggcttttagtagagacggggtttcaccatcttggccaggctggtcttggaactcctgacctcgtgagccaccacgcccagcctcttttgctgtttcattgctgacagtgttcaacaatatgccccatctttatatatcctaagaaacactaatcctaggttattgctagccaaaatatttttgtcctgagtagtgtcactgggccaaaagatagatcaggacgacagcctttagttttcctgaaatcaccaggtcaggcacaaggagaaaaggttcctggatactgactaacttgggtgggtctagccaggagaaagacagtaacatgtgttctgtactttctgggaagatccctgaagccatcacagaggctccccaacttctgagtcgcccatctgttgctgtgggagtgtgaacggatcgctgaaggagagggagctttgctctctctaggtgggcaagtttcctgggctctctgtgttgcctccctctggcttcttcctcccgtgccctctccccgtgtgccccagggggatcagggatcctcaccctcctgaggcccagtggggaagaatgaacatggcttcatccaggttaactgatgctgccatttgcccagcctcttccatcccagccctgtcagtgagcccaggtctggtgcaactgctgcaggatgcctgtagtagggaactctggaagtgtattgggctgaggtgggattttccctccccacagtgcactgagcaatggagggtggtgagggagccatgctgctgaattctggttggcatttccccattatgtaaaatggggtgttgggtagggcagactctgcttgggtttggttgtaagataaacctggaggagaagcacagttgtcccattgaattatttgagcaaaaactactgtaaataacttttttgtcttttgtcaaataaaatttttttttgtttttttaaaaaaaaaaa

SEQ ID NO: 204 - DNA, 795 bp, Homo sapiens
  misc_feature (791)..(791): n equals a,t,g, or c
ggcacagtgcagcatctacctaatccaggtgatctttggtgctgtggacctgcctgccaagcttgtgggcttccttgtcatcaactccctgggtcgccggcctgcccagatggctgcactgctgctggcaggcatctgcatcctgctcaatggggtgataccccaggaccagtccattgtccgaacctctcttgctgtgctggggaagggttgtctggctgcctccttcaactgcatcttcctgtatactgggaactgtatcccacaatgatccggcagacaggcatgggaatgggcagcaccatggcccgagtgggcagcatcgtgagcccactggtgagcatgactgccgagctctacccctccatgcctctcttcatctacggtgctgttcctgtggccgccagcgctgtcactgtcctcctgccagagaccctgggccagccactgccagacacggtgcaggacctggagagcaggaaagggaaacagacgcgacagcaacaagagcaccagaagtatatggtcccactgcaggcctcagcacaagagaagaatggactctgaggactgagaaggggccttacagaaccctaaagggagggaaggtcctacaggtctccggccacccacacaaggaggaggaagaggaaatggtgacccaagtgtgggggttgtggttcaggaaagcatcttcccaggggtccacctccctttataaaccccaccagaaccacatcattaaaaggtttgactgcgmaaaaaaaaaaaaaaaaaaaaaactcgagggngggc

SEQ ID NO: 205 - DNA, 1169 bp, Homo sapiens
ggaatgtgagtgcaaatttgaatttccatgtacacatgtccccgtgtgcacatatctgtctgtatgtgctagtgtttctatgtaatgtgactagatgtaaatgtgttagggcattcacaacctgggacacagagaaagtgaaatattttatggcacactggagtaaactgaagagggttaggggtactagagttgagtgaaaaggaatttcttacattttcctcatattatacaattatgggaagaaaattaaaatgcagaattttaggggagttattaaatattgaatttgtgtacaactttcaaatgaaatcttttcagttttttatgacacacttgagctcacttctagaaacatgtcttagtctgttttgtgctgctctaacagaatacttgagactgggtaatttttaacaagcagagatttctttcttacagttctggaggctaggaagtccaaggttgaggggcatgcatctagcaagggcctccttcctgcgtcatcccatagtgaagggcagaaaggcaagagaacacgcttttgcatgagagagagaaagagagagaagagaagggaagggaagagaaagaagagaagagaagagaagagaagagaagaaaagggagccaaactcatctatttatcaggaacccttcttatgatagaaacccactcccatgaaaacaggattaatctgtttatgaggacagagtcctcattacctcatcasttcttaaaggtctcacttctcagtactgctgcattggggattaggtttccaacacatgaacttcggaggacacattcaagccgtagcattctyccttgactcccmaaatccatgtccttctcatgtctaaaatagattaatyccatcccaatwgccccaaagtcttgactcgttccagcaccaactcaaaattccaaagtccagagtcccatttgaatcagacaggagagactccaggtgcaattcatcctgaggcaaatttctctccagatgttagcctatgaaaatagcaaattactttcttccaaaatacaatggtgggacaggcataggatagacattcccattccaaaagggagaaataagcaagaagaaaggggtaactggtcccaagtaagtccaaaatccaacagaaaaaaaaaaaaaaagggcggccgc

SEQ ID NO: 206 - DNA, 1088 bp, Homo sapiens
ggcacgagctaagccaaccgcactgaaggagtggggagaagagcatacgccaggagcctcctgcctcaaagtgctcccctaagtcttcttcctcctgtgctgacctcagggtggtctgacccttccctcggtgtgggggatgtggccctctcaggtgcccctacttgctttctgcttccttctggtgaagtccacctccaacattaacctgcccaccccacccccgtcatccctggagaattccagctttgtcgtatctcagagagggaatctaattgtttttggggggcaaaagaaagcaacgtttaggtatcacttctacttggaccgcatgcctttttatagccaaatttctgtgtatttcgtaaatggatttcgcgttaatggatatttatgtaataactagacttctcagattattgtgagaagggtcaggttggaaggggtgtaggaagaggggtgaggggtagtttttttctgttctagttttttttttttttttgtcatctctgaggtggaccttgtcacctgtggttattggggccaaggcggactcagctcccggggagaagggcctctctgccatttcggtcccaaggtgagctgacacaggcgttccttttgggactgtggaagcatcagatgccagcactgactcaggaacagcaagtcagggcagagaggaggagggaggctgtcaggatggaaatacctggacttttctttgcttccctcgcaaactggggtcttctctaccgaacttcccaggatttcatctcaccatatctgtgtgccgcccccagcaccccccacccacctctggggggcccgtgagcgtgtgtcttcattgcctctctccccttggcgtctgatgaccacagcaaagcactgggaatttctactcttcatgcctcatcctgcagcctcgggttcgcattctctctttcttttcctctttccctctttccctgggattgactctgagtggaataccttggcacatccactaggatctactgtctgcactgttttctttgcatgactttatacgcagtaagtatgttgaaaacaaaaaaaaaaaaaaaaaa

SEQ ID NO: 207 - DNA, 2067 bp, Homo sapiens
aattcggcacgaggaaaaacaaaagttttttaaaacaataaaagttaacagtcaataatgtgtttgtcggcaagaagccctctgttaataatggtctaaacaaataagacattgtttttctccaataaagaaatccagaggcaggcagtagctggctttgattcagcctctgactgtcactgtcagggccccaggccccatgagcctttcgtctttcctgcatgttggcttatcttctcatgcttgtgacttcctggttgcaacacggctgctgcaacaccagacatcttgcctgtcttcaaggcaggaaggagggggaaactatcgcctaccagctatttttcttaccttagctcctccatgtcttggatcaaaagcatctctttgaacctctccctcaggcataccctgaaatgctgtggactttaaccttttttctgttgcaaaggtcgctcacatctccctggttgtttggtcttctcttccttggctctagtaacacagcagtctgttgcttcctaggacaacttataatgggacccaaaggggaaagaggatttcccgggcctccaggaagatgtctttgtggacccactatgaatgtgaataacccttcctacggggaatctgtgtatgggcccagttccccgcgagttcctgtggtaaggctttctgggagaagtctggggtggttatccgtgaggacctctcacctgatccttatggggctttgtaaaatcctttcagtaaaactaactttttttcacgactctgagtacaccctcattataggaaattggaaaatatgagaaaatcaagaggaaaaccaaattgtccatttgattgtgagtccattttggggtattttctttgtcttattaaaatctaacttttatatggttgagattatattgtataaaaatgtacttttggccgggcatggtggcttatgcctgtaatcccagcactttgggaggccaaggtgggtggattataaggtcaggagttcgagatcagcctggccgatacagtgaaaccccatctctactaaaaaatatatttaaaaaattagccgggcgcggtggtgcacgcctgttgtctcagctacttgggaggctgaggtgggagaatcgcttgaacccaggaggcggagattgcagtgagctgagatagcaccactgcactccagcctgggcaacagagcgagactccgtctcaaaaaaagttatactttgktatcttagttgaaatcctgccatgtttccacactctataaataacattttaaactttttattagggaaaatttcaaatacatataaaagcagaacaaatagtgtaatgaacccctgtgtacccttcacccaactttaataatgatcaactcatggcgagcctgtgtccttgttttctctttatgcctactcactcctgcccattctctgttgtattattttgaagtaaaccttggacatctgttcatcataatcatccatctagtgtggctgtgctacaatttacttaaccagtgttggtgtttaaccaacctattgcttattggccacccccaagctttttactaatgtaaataatgctgtaaagaatatctttgagtaggataattttaagaatcacttccagatgtcaaattacttgactatatgacattgccttttaacttaagtcttgggaacgttttaaatatttaaaaatgttaaatccgaggccgggcgcggtggctcatgcctgtaatcccagaactttgggaggccgaggtgggtggatcaccttgaggtcaggagctcgcaaccagcctggccaacatggcgaaaccctatctctactaaaaatacaaaagttagccaggcattgtggtgcacacctgtaatcccacctactcgagaggctgaggcaggagaattgcttgaacccgggaggcagaggttgcaatgagccgagatcacgctacttcactccagcctgggcaaccgcgtgagactccatctcaaaaacaaaagaaaaaaaaaaawaaaaaaaccggcacgagggggggcccgtacccaatcg

SEQ ID NO: 208 - DNA, 2213 bp, Homo sapiens
ggcacgagcacgaatcagctgcaggtctctgttttgaaaaagcagagatacagaggcagaggaaaagggtggactcctatgtgacctgttcttagagcaagacaatcaccatctgaattccagaagccctgttcatggttggggatattttctcgactgcatggaatcagaaagaagcaaaaggatgggaaatgcctgcattcccctgaaaagaattgcttatttcctatgtctcttatctgcgcttttgctgactgaggggaagaaaccagcgaagccaaaatgccctgccgtgtgtacttgtaccaaagataatgctttatgtgagaatgccagatccattccacgcaccgttcctcctgatgttatctcattatcctttgtgagatctggttttactgaaatctcagaagggagttttttattcacgccatcgctgcagctcttgttattcacatcgaactcctttgatgtgatcagtgatgatgcttttattggtcttccacatctagagtatttattcatagaaaacaacaacatcaagtcaatttcaagacatactttccggggactaaagtcattaattcacttgagccttgcaaacaacaatctccagacactcccaaaagatattttcaaaggcctggattctttaacaaatgtggacctgaggggtaattcatttaattgtgactgtaaactgaaatggctagtggaatggcttggccacaccaatgcaactgttgaagacatctactgcgaaggccccccagaatacaagaagcgcaaaatcaatagtctctcctcgaaggatttcgattgcatcattacagaatttgcaaagtctcaagacctgccttatcaatcattgtccatagacactttttcttatttgaatgatgagtatgtagtcatcgctcagccttttactggaaaatgcattttccttgaatgggaccatgtggaaaagaccttccggaattatgacaacattacaggcacatccactgtagtatgcaagcctatagtcattgaaactcagctctatgttattgtggcccagctgtttggtggctctcacatctataagcgagacagttttgcaaataaattcataaaaatccaggatattgaaattctcaaaatccgaaaacccaatgacattgaaacattcaagattgaaaacaactggtactttgttgttgctgacagttcaaaagctggttttactaccatttacaaatggaacggaaacggattctactcccatcaatccttacacgcgtggtacagggacactgatgtggaatatctagaaatagtcagaacacctcagacactcagaacgcctcatttaattctgtctagtagttcccagcgtcctgtaatttatcagtggaacaaagcaacacaattattcactaaccaaactgacattcctaacatggaggatgtgtacgcagtgaagcacttctcagtgaaaggggacgtgtacatttgcttgacaagattcattggtgattccaaagtcatgaaatggggaggctcctcgttccaggatattcagaggatgccatcgcgaggatccatggtgttccagcctcttcaaataaataattaccaatatgcaattcttggaagtgattactcctttactcaagtgtataactgggatgcagagaaagccaaatttgtgaaatttcaggaattaaatgttcaggcaccaagatcattcacacatgtgtccattaataagcgtaattttctttttgcttccagttttaagggaaatacacagatttacaaacatgtcatagttgacttaagcgcatgagacaccaaattctgtggctgccatcagaaattttctacagtacatgacccggatgaactcaatgcatgatgactcttcttatcacacttgcaaatgaatgcctttcaaacattgagactgctagaaccaagcactaccagtatctccatccttaactgtccagtccagtgatgtgggaagttaccttttataagacaaaatttaattgtgtaactgttctttgcagtgaagatgtgtaaataagcgtttaatggtatctgttactccaaaaagaaatattaatatgtacttttccatttatttattcatgtgtacagaaacaactgccaaataaaatgtttacattttctttcataaaaaaaaaaaaaaaaaaactcga

SEQ ID NO: 209 - DNA, 796 bp, Homo sapiens
gaaaaaaaagaaaaagccaaaaaaaaaagaagaagaagtaccactgctaggatttgaacccagatctagctgactcaagaaccatgccctatctctgtgtccatgttgtcaccacttaatcacttgtattttcccttcaggtttctctgtatgctgtgttctctcccaagagtggtcttccaactcacccctattaaggaagctttcccaagccaggagcttacctttccgtgcacacattgaatgatgatcatttgtcattctgtcttgccttacaaaagaggaccagctccttgaggataggaaccttgtccttatctccctgttcccctgtatgggggccagctcctggcaggtgcatagtaaataatgagtgataaacttgttggaaagaccatgcaggaaccaagcaactcttttcctctgcctcaatgcagttagttcaagaacttactaagaaaagagttgttggccaggcacagtggcacaggcctgtaatcccagcactgtgggagaccaaggcaggcaaattgcttgagctcaggagtttgagaccagcctggacaatatggcgaaaccccatctctatgaaaaattggaaaagtagccaggcatggtggcatgcacctgtggtcccagctactttggaggctgaggtgggcgaatcactttagyccggggaggtcgaggatgcagtgagctgagattgcgccactgaactccagcttgggcgacaaaatgagaccctgtctcaaaaaaaaaaaaaaaagaaaaaaaaaaaaaaaaaaaactcgta

SEQ ID NO: 210 - DNA, 532 bp, Homo sapiens
  misc_feature (434)..(434): n equals a,t,g, or c
  misc_feature (528)..(528): n equals a,t,g, or c
ggcacgagtaaaaggtgccatctatgaatcagaaagtacgcccttaccagacaccgaatctaccagctcctggacagaacagactaagatacattccaagaagcagtttctttggagacagaggcgtaactgtgcatatggacaaggtttatatttctgttcaaagtggccatccatatgcttctaggcttcctttgtctctggtatcaagtgtatgtatgtatgtatgtatgtacttatttatttatttatttattattttctcttttttctctgccccatatgatctgcaagaaaagtgtcaagtttataatgagctccccaaagccaccatctgggtagcctcacatctttttcatcccctgtgcctcttccctgcttttgtcctactctagccagactcgtgccgaagggggggccggtamccaattcgncctatagtgagtcgtattacaattcactggccgtcgtttamaaagtcgtgactggggaaaacctggsggtacccaacttwaatcgccttgaagnaaat

SEQ ID NO: 211 - DNA, 1575 bp, Homo sapiens
gtccattcttccggtggagatggctgcggccgtggcggggatgctgcgagggggtctcctgccccaggcgggccggctgcctaccctccagactgtccgctatggctccaaggctgttacccgccaccgtcgtgtgatgcactttcagcggcagaagctgatggctgtgactgaatatatccccccgaaaccagccatccacccatcatgcctgccatctcctcccagccccccacaggaggagataggcctcatcaggcttctccgccgggagatagcagcagttttccaggacaaccgaatgatagccgtctgccagaatgtggctctgagtgcagaggacaagcttcttatgcgacaccagctgcggaaacacaagatcctgatgaagrtcttccccaaccaggtcctgaagcccttcctggaggattccaagtaccaaaatctgctgcccctttttgtggggcacaacatgctgctggtcagtgaagagcccaaggtcaaggagatggtacggatcttaaggactgtgccattcctgccgctgctaggtggctgcattgatgacaccatcctcagcaggcagggctttatcaactactccaagctccccagcctgcccctggtgcagggggagcttgtaggaggcctcacctgcctcacagcccagacccactccctgctccagcaccagcccctccagctgaccaccctgttggaccagtacatcagagagcaacgcgagaaggattctgtcatgtcggccaatgggaagccagatcctgacactgttccggactcgtagccagcctgtttagccagccctgcgcataaatacactctgcgttattggctgtgctctcctcaatgggacatgtggaagaacttggggtcggggagtgtgtttgtcacttggttttcactagtaatgatattgtcaggtatagggccacttggagatgcagaggattccatttcagatgtcagtcaccggcttcgtccttagttttcccaacttgggacgtgataggagcaaagtctctccattctccaggtccaaggcagagatcctgaaaagatagggctattgtcccctgcctccttggtcactgcctcttgctgcacgggctcctgagcccacccccttggggcacaacctgccactgccacagtagctcaaccaagcagttgtgctgagaatggcacctggtgagagcctgctgtgtgccaggctttgtgctgagtgctgtacatgtattagttcctttactgctgaccacattgtacccatttcacagagaaggagcagagaaattaagtggcttgctcaaggtcatgcagttagtaagtggcagaacagggacttgaaccaagccctctgctctgaagaccgcgtcctgaatttcttcactagagcttcctcatcaggttacccagaagtgggtcccatccaccatccaggtgtgcttggatgttagttctccaccctcgaggtgtacgctgtgaaaagtttgggagcactgctttataataaaatgaaatatattctamaaaaaaaaaaaaaaaaaaaykcga

SEQ ID NO: 212 - DNA, 1839 bp, Homo sapiens
aattcggcacgagtgcaggtcgactctagaggatccccgctaagaagctagggctattggtcttcccatacacacatcagaactgaggcaccatgcaagggggccagagacctcatctcctcttgctgctgttggctgtctgcctgggggcccagagccgcaaccaagaggagcgtctgcttgcggacctgatgcgaaactacgacccccacctgcggccggctgagcgcgactcagatgtggtcaatgtcagcctgaagcttaccttgaccaacctcatctccctgaatgaacgagaggaggccctcacaactaacgtctggatagagatgcaatggtgcgactatcgcctgcgctgggacccaaaagactacgaaggcctgtggatattgagggtgccatctactatggtctggcggccagatatcgtcctggagaacaatgtggacggtgtcttcgaggtggctctctactgcaatgtcctcgtgtcccccgacggttgtatctactggctgccgcctgccatcttccgctcctcctgctccatctctgtcacctacttccccttcgattggcagaactgttccctcatcttccaatcccagacttacagcaccagtgagatcaacttgcagctgagccaggargatgggcaagccattgagtggatcttcattgacccggaggctttcacagagaatgggragtggsccatccggcaccgaccggytaaaatgctcctggactccgtggctcctgcagagraggcgggccaccagaaggtggtgttctacctgcttatccagcgcaagcccctcttctacgtcatcaacatcatcgccccctgtgtgctcatctcctcagtcgccatcctcatctacttccttcctgctaaggcgggcggccagaaatgcacagtggccaccaacgtgctcctggcccagactgtcttccttttccttgtggctaagaaggtgcctgagacctcccaggcagtgccactcatcagcaagtacctgaccttcctcatggtggtgaccatcctcatcgtcgtgaactctgtggtcgtgctcaatgtgtccttgcggtccccccacacacactccatggcccgtggggtccgcaaggtgttcctgaggctcctgccccagctgttacggatgcatgtgcgcccactagctccagctgctgtccaggatgcccggttccgactccagaatggctcttcctcagggtggcccatcatggctcgagaggaaggggacctctgtctgcctcgaagcgaactcctctttaggcaaaggcagcgcaatggattagtgcaggcagtattggagaagctagagaatggtccagaagtgaggcagagccaggagttctgtggcagcctgaagcaagcctccccagccatccaggcctgtgtggatgcctgtaacctcatggctcgtgcccgacgccagcagagtcactttgacagtgggaacgaggagtggttgctggtgggccgagtgctggaccgagtctgcttcctagccatgctctccctcttcatctgtggcactgctggcatcttcctcatggcccactacaaccaagtgcctgacctgccgttccccggagacccccgcccctacctgcctttgccagactgagccaaccaatccctcctgggccctggagtcagctatgagggccatgctgtttgtagagctgtatcccgtgttgatgctgagtgtgctcttggggaaatacccaaggcttcctgggagaagatagagaaataaagagacagaggggaaaaaaaaaaaaaaaaaaaaaaaaaaaaaaaaaaactcgtag

SEQ ID NO: 213 - DNA, 1103 bp, Homo sapiens
gtcttaatgagcaacagcaacagcagtctccagttaagaaagagagaattaaatacagcagagatttcctgttgaagctctcaagtgtttccatctgcagaaaaaaaccagactttctgcctgatcatcccattgtactgcaaaaaccagaaaacaaccaaagttttaagtagcattttaagaacagatgaatttaagtttggacatctgcaaatgaggtggatctagcaacaataactgtaatggactgtgacaattcaatttattcttaattttgatggttggctatttgacttctctaaaaatgagaaagagctattttaaaatataaagaattttctaatcagtttcagctttgcaggaggtttcctgcataaattgggaagtaacactggaaagtaggaatttggttagtgaagtgggaagactgtatatttataatttgcatactacttgcaattttttgtttttcatcacttgtaataatggaatggaaatgtaagctgtaaagactctcaaatataaaatatttgctacagtgtatatatggtacataattgcttgttgcttttaaagttccttctgttgttctgcttcccactgatttcataccagctcatgaatggatcattacagtctctccagaggcttagaatgattcagaatgttcaatgcatagttctcaataaacaggaggcagaatttttaatgggtatttcttttcagatatatgattggtctctaggtttttgataataatatggtcttaaattcataattactagcagagattgataatttggaaacaatggtagtgaatgaaactgaagttgaaaaacggctgctacttatgtcactaatcagaccatatgaatagcagaagttgagcaatttcaaagtaaaactgatatttttatttccaaaggaatttagacatttgaaaataattgacatacattaagttttaattcgataatttcttatatatggatgaacaatttttgggtttaagcttttaattcctagaaattttatacattaaatctcctgcaatttgtcactctggatgttactgtttaaaaaaaaaaaaaaaaaactcgtag

SEQ ID NO: 214 - DNA, 1175 bp, Homo sapiens
ggcacgagattgaatgttccagataatccctttcccagtcctgcctgacatctgggtagggggtttgtccctggaattctgggacactggctggggtttgaggagagaagccagtacctacctggctgcaggatgaagctggccagtggcttcttggttttgtggctcagccttgggggtggcctggctcagagcgacacgagccctgacacggaggagtcctattcagactggggccttcggcacctccggggaagctttgaatccgtcaatagctacttcgattcttttctggagctgctgggagggaagaatggagtctgtcagtacaggtgccgatatggaaaggcaccaatgcccagacctggctacaagccccaagagcccaatggctgcggctcctatttcctgggtctcaaggtaccagaaagtatggacttgggcattccagcaatgacaaagtgctgcaaccagctggatgtctgttatgacacttgcggtgccaacaaatatcgctgtgatgcaaaattccgatggtgtctccactcgatctgctctgaccttaagcggagtctgggctttgtctccaaagtggaagcctgtgattccctggttgacactgtgttcaacaccgtgtggaccttgggctgccgcccctttatgaatagtcagcgggcagcttgcatctgtgcagaggaggagaaggaagagttatgaggaagaagtgattccttcctggttttgagtgacaccacagctgtcagccttcaagatgtcaagtcttcgagtcagcgtgactcattcgttcttccaacagtttggacaccacaaagcaggagaaagggaacatttttctacagctggaaagtgagtcctatcctttgaggaaatttgaaaaaagacatggagtggtttgaaagctactcttcatttaagactgctctccccaaccaagacacatttgcctggaaattcagttcttagcttaaagactaaaatgcaagcaaaccctgcaattcctggacctgatagttatattcatgagtgaaattgtggggagtccagccatttgggaggcaatgactttctgctggcccatgtttcagttgccagtaagcttctcacatttaataaagtgtactttttagaacatttggaaaaaaaaaaaaaaaaaa

SEQ ID NO: 215 - DNA, 572 bp, Homo sapiens
  misc_feature (106)..(106): n equals a,t,g, or c
  misc_feature (110)..(110): n equals a,t,g, or c
  misc_feature (422)..(422): n equals a,t,g, or c
  misc_feature (427)..(427): n equals a,t,g, or c
  misc_feature (548)..(548): n equals a,t,g, or c
ggcacgagccagggcccagcatcagaagccggccgttttgatagacgtgttccctctgcgtccttgcagccttccatctgtgctacctcccaggaagccgaagcgncagnagtccctttcggatggcactgggagcaggaaaatgaggtgattatgggctgctgctccaagaagtattggcagctgttgctgggggcggctccctggggtgtcatcccttkcttgctcttgtggatgggaaccagagcaccccacttcaaagactctgtaagccagggcttaccaragaaagctgaagagtctagggccaattttaatcagtttcttgtgcttctcatgccaaaagagatgattgtcctcactatagttcatcctatagtgcggcgggcctgactcgctactgccctctaatgttctggganagaanctgttgggtctttcctacctaatctggtagaaatgtgagaacagaggctaatttggggaaataaatctctcaatttttttgagttgctttgtgtgtgtgcgcgcgcgcatgtgtgtgtgtnaggggcagggtctctaagaaagaa

SEQ ID NO: 216 - DNA, 1350 bp, Homo sapiens
gtgacttctatattcaatagatttttgtaaatgttaaaacatctatatttaaatgttaaaacactaaatatagagaggggctttatttcaatcatagagcaacaacaaaaataatgcttatagctaaactgcctgttctagaaagcatctgctttttcatgttattcctaaatcctcttgtcatacttttgtcattgaacaatgctctccctctcgtcttccatcctcattcagaatttttagaagaccacaatcgtggagatacactacccagtattgtttgatacatttttatttgataaacattcagtgcaggaaactgtgatttgctatatgtttatgtatataatcttattctgtagtcatcagaatgttaatgtaaggtacatttgatttttattttttacatgtgtagttttctttcttcacagtcaaagcatttatattattgggggtgggggcagggaattaagttggtgggctcgaaaatccattcatatgtatctgtctacaaatgtctggggataatttaaatttgaaacctaagttatatatagtttggcaatgctcttcttcaatatttacaataataggatgatctacaagaaaataagtttctttttgcaaatttttatcatactaaagttgttcttttaatttagcatatctaaaataggatttagttcagtttagctcacacaggtgtttgctgacattcattggccatttaatacagtgttgagtggttctccgtaaaagtataagtgctaacactacgaagaaatgcacacgatcattcttgctcacttctataacaaacttacataaaatggatttaaaaattcctactcacagcctaaaacttctggagttcactacctttttttcaaattcatagtaagatcacctgtgtattttatattttagtaaagccaattatgaagtacaagtatcatacacgtacttttgagctactattatttgaaaaaaatctgccaaatagcatctttaggatatatttacattttcactcatctaaaaagtatacaaaaataaaaagtggaaaaaggtatcttctgaatgttcaagagcatcctatagtgccaaataataaagcaccatttttttcttcataaccaggattaaaattcatatatactgcagggcagacatacatatgatagcttgtgctgattaatttaaccccatttgtaaacagatgaaaattttattttcttatttcatttataagatggctcaatgtattgggaggcttcttttttattacagaaagtgtatattggtatataataaatgaacttttcaaatgaaaaaaaaaaaaaaaaaaaa

SEQ ID NO: 217 - DNA, 947 bp, Homo sapiens
  misc_feature (547)..(547): n equals a,t,g, or c
  misc_feature (555)..(555): n equals a,t,g, or c
tgaagacaagggtggcatatatttactttgcaataagtacaccatattgggtccttttgagattgtcatttgggtgtgtagcatttaagatttaacagctttctattatagagatcctacagctttatattagaagattattctgaagtcataacatttttttaaaaaagtaatttcagaaaaaaaaaagaatgttactgggataatgaggaatgatgtctagctgcctggtggtggtcatcactctgcgtgcttattttagttggttgcaggccattagaagtcaagttgtctggtcacgaatgaaacgtttacagtctgcttcaaggcaatcaggactatccattcccaggagtgaaatgtctgcattgcatagactgcaagattggagtgataaatcacacatacttttttttatttttttgccaagagtttgtaggttcccattataaagccaggcacttgatttagaatgtgtaaggcaatcctttgggaatgctttgggatycagcataactctttgaatgaactggagctttgtgaattncctttttntcctcagatcataaggtagaaaaaaattccttttaacaaaatagcattcttatccacccaccttctgatccaggggagtacactgggtattgacctcaggaaagagaacaagggagtgagggtacaggaaatgttaggagtgtgagcttgaagacaaagacgacccaactggcaaagacagcagttgtcaatcagagcagatgaatcatcacatcagcaaatattcattatatatctgctcaataataagaaaagcttctaccaaaggccaatgctccagacctctccccgaacctccagattcacttacccacctgcctaccccagcaatgtacagagcatcgcctcgtgccgaattcgatatcaagcttatcgataccgtcgacctcgag

SEQ ID NO: 218 - DNA, 1918 bp, Homo sapiens
gaattcggcacgaggtaggatgagagagaaagaagaataggagatggttaaggttggggcctggagagctgtacagatattgatgctattcgccaatccaggacatgcagaaggagcatgcatcagccccgggcccgcaggaaagagggagccactcaaactaggataatgcacagagggtgttttcacaaaggtgtgagcgtggtgtcggataaaggcaggactaatgcagtaacctagagccagtagcagtggagtgaaggagcttctcccatcacccagccagaagaccaggaggagaacagctacctggaccagaaggagaggtcttgtagagaagctcccttgagaggatccccttctgccaagggacagccaacctaggtggtcttgctgggagcatgacagaggagttaattccccggtttcatgttcctcctttcctccactcctctgagggttactagccaaatccaccgaaggcagccaccaagacatcctcacagatcagcctcccaggacacacagcagggcaaagaaggtggagatggatgggaggggagcaaggagcagatttggaggagtgcagcatggtcctaggagagcgccatccctgctgcccctagctgtgtggccttggccaggttacctaacttctctaatcctcagagagaggttggggctgaatactcaggagtcttcagtggaaaggtggatgccatgggtgtgctgcgatttcctggagaaggtgtagcttagaggggaactggggcaggctgaagagtgagagtcagggtacgaggctggggaggagccaccacacagtcagcagtagcttcctcctctgggatcctctagcattttctctttaacttctcacagaagactttacagattttattgccactgcttccgtgtgcctcccatcagagtgtgagcacctttgttcctcagtccctcaaggccgatgcatggtcagcccttgttagttgagtgaatgaacaaacaacactgaagaagctgcccttgaaaaaccggggcatcgttaagggctttgagcagaggatagaagacagtggagggggaggctcakgaggaagtgggatgtcaagctgtggggcagctgcaagaccttgcatgcatttggtggaaatttcytaggggctaccagggggcaggctgtgcttgggactagaggctagagaggtggggaaggctcagtctctgtgctcaagagacagccctctggacagagcacggcagctcctccatgacacagctgtccacaagcttcggagcacagctccttgttagtgagtggtggtgttaggcaggtggggaggtgggggaagttgaaaggtatcctggggatgagcaaagtctgatttgggggtgaaggggaacatgcaacaatgaacccagttcaatgtttagggcaaacgtttaatgcaggaagcagtgagaggtaagactggagccataagcaggcagaagctcgtggagacccaagtgcccagatgtggacttttccttataggcagtggagctccctgaagggttctgaagcagagaagagcatacatagtcaggtgtgcttcttacctggactactgctgagggatatttaggatgcagcatcctctggatggttgctataataataactattgtgacaaagcttcttcctgtggagctgttgtgtttgcaaatcggaccaaggtcccaggcatccaggccatggagctaagttcctagcccaggtctctggtcagggcataagtcattcagtgtgccaaacctctgaaaggtagcccggcccctttatttaccatactacacacagccagttcaccttctcctcctgagcacctgctcgtgccgaattcgatatcaagcttatcgataccgtcgacctcga

SEQ ID NO: 219 - DNA, 1026 bp, Homo sapiens
gtctaaatgttcagtttttcttcctaattccaatgattctcctcatttctcaatgtcctttgtccatctttgctgctccatttgcactgcctcccaaaggtcactgtggctccttctctgacttccacagtcaagttacacttcataaaaattctaagctcattttcagaagccacaaatctatccttctttaaagtcttcaaactttgattgtgtaaataaatactcagaaacaagatttctaaaaaacaaacactattggccatcgtatgttcaaaggagataacaaatgtttaaccttatatgttgtaggctttctaaacttaatttcaaaaaaagactaaataaacagtgtcaatatgtctataaactcacaacgaaaattttcagatcatccaattgtgtattcattggccggaaacaatcatgtaaaaaccacagccctggagctgggtagcatagaaacaagaagattcagcatttcatggttggtgactcaaatctctaaagggktgtcaggttaaaaaaaaaaaargaaaagaaaagaatagaaatttgacctgatctataaaaatgaaagtcgctgggcaaagttttggcttttcactcctgacaaagatgagctctctcataggtagaccaaggcacacgagtgatgactttcgtggccccaaaattcttcaagaaaatagtagattgaggaagcgatctgcgcattgatagaggtgctgtttgaactggatgacatttaagcttccttctttctccaagattctgtgaggccatgaagcatgctatttcatccccactccaattgctgtctccctggcctggtgcccttaccacctcaatcttgggtcactgatctcttttgcaagaaatcagtcctgcctaccacctgcaacttcatcttcctaaaatgtcactttccttaaggcctgctctgttcaaaggccagttcccagccacaccaatgtaaactcgtgccgaattcgatatcaagcttatcgataccgtcgacctcga

SEQ ID NO: 220 - DNA, 1757 bp, Homo sapiens
ggcacgaggtagatgggtttttggtgtggatgtcctttctgtttgttagttgtccttctaacagacaggaccctcagctgcaggtctgttggagtaccctgcaatgtgaggtgtcagtgtgcccctgctggagggtgcctcccagttaggctgctcgcgggtcaggggtcagggacccacttgaggaggcagtctgcccgttctcagatctccagctgcatgctgggagaaccactgctctcttcaaagctgtcagacagggacatttaagtctgcagaggttactgctgtctttttgtttgtctgtgccctgcccccagaggtggagcctacagaggcaggcaggcctccttgagctgtggtgggctccacccagttcgagcttcccggctgctttgtttacctaagcaagcctgggcaatggcgggcgcccctcccccagtctcgctgccgccttgcagtttgatctcagactgctgtgctagcaatcagcgagactccgtggggtaggaccctctgagccaggtgggggatataatcttgtggtgcgccattttttaagcccgtcggaaaagcgcagtattcaggtgggagtgacccgattttcccgattttccaggtgccgtccgtcatccctttctttgattaggaaagggaactccctgaccccttgcgcttcccgagtgaggcaatgccttgcgctgctttggctcgtgcatggtgcgtgcacccactgacctgcgcccactgtctggcactccctagtgagatgaacccggtacctcagatggaaatgcagaaatcacccgtcttctgcgttgctcaggctgggagctgtagaccagagctgttcctattccgccatcttggctcctcccccaccccccgcccaatcctaagtttatctcttaacaaagtaaatactgcacacgtatttacatgttttaaaatattgtttatggagcacttactatgtgttttacggtccaagtactttatattattcactgactctttatagcaactctataacatattaatagattgtctcaatttcactgatgacaaaactggcagcttagtaactaatgagtaacaataccagcccctaaaacctagggtctttccactacagcacactctgactgacattgctcttgttcagacacagcactcttcacctagaaaaggatggagagctagaaagtggttttctttttcaagttgttcccattcatcaatattctatcaagatatatggaagagttattttctaggtcttccagaaggggctgctgacacttgggaattcaaaataattactccagagggaaatgtgggcatagaaactttttaaaaactgaattttcccgatctaatatcggcttccacatacagtatattatttcttaaaaatcagccagaaatgcacctgcagttttatctactggattttcctttcccagccccattcttctttaagtagttttttttccccattttataaaagaaaagcatacctcccacctatagcttccctccttatggtatattatctcaggggataatttgaaatattgcttgagacacaattctcattaagaaataaactttcaggctgggtgcagtggctcacacttgtaatcccagaactttgggaggccaaggcgggggaggatccctgaaggccaagagttcaagaccagcctggaatatataccaagatcccctctccacaaaaaaaaaaaaaaaaaaaa

SEQ ID NO: 221 - DNA, 752 bp, Homo sapiens
ggcacgaggggagaggcaggcatttgcattcagtcttgaaggctgaatagggcagggtaggcacagtgattccagagagaagtctttgctcctccatctatggaaaaacttctcacattgtatttattactatatgtttcttactggagtgtctctcctactggacagggagcaggtttatttattgctcagtcctcagcccctggacttaggcagactcatagtagacatttgggaaatgcttgggaaagaaaggaggggaggagagaggaaggactccatggccatgtctaaatgcccagcaatgtcatagaggttatgggggtgcaggagaagacacagccctccctctggcagctaggatagagcctagctgctgttaaagacaggcagctcattcctcacctgggccaagctgcagctggtcatctctgcccctttctccttccatcttatgggagcttttatggagtcagaagtgagtgaggcagacctgggagagccctacactcaggaagaatgtaggctgcagaaaggaacaggtgtcctggagttagctcaggaaggtcttgaaggaaggggttaacyagcagatggcaacccagtgacttttgttgctctctgaagccacagaggaaaacagtagcaacrrratraaataaaataaaataaaaaataataaaaaagcaaagttcccaaggaaataagatgggggaattcgatatcaagcttatcgataccgtcgacctcga

SEQ ID NO: 222 - DNA, 1602 bp, Homo sapiens
ggcacgagaaaacctgtggatttgagttgggatgacattattgatgattagctgagtgtggatttgagttgggatgacattattgatgattagctgggggagtttttgtcttcacagtgttttctccccatgtatgaatgtttcctgtctctgtctttactgaagtcttgtaaagctgtgagtggacttatgtgcctcctgctgccgaggcttggtctgctgctcctcctaccgagtgagcgatgcttctgctggattccggtgtactccctcattacctgccttgctgagtgctcagttgttctgcgggatccagggtttgcgggagctttccaggtacacaggcgccaggcctgcttctccaccctgcgctggtcctgcctgctgctctggtgggtgtcccgggtgagtgcaggccgccctctcataggcagccctcatatgatggctcccagcactttctgtcccaccgttaggggccctgggacctgtgcttccagcgacccagatgggtgaggctgtaacagcctgggccggctgcctctgccctttggtgaccgtgatggggaggtgtccacaaagcaccctatatgttggcttatcctcccgccaggtctgtagtctctacccggtcaccccttcttcctgggaccatgccccagatcagctgctaccctcaagctctaccattagggggcccaggcgtgttcagggaaggtcactgggtgccaccttctcccccatcatcacgctcactgctttctcttgatgggtaaggcttcccgaatgatgggaactaacagtggtggtgaagtcgaggcagacttcatcaggcatttagcatccaaggggtggctcatgagtgcagatacagtgcaggggccggagaggggctgggctgggctgacctgggaggctgaggctgatggagagtgggcaggtagggtggagaggcaggaaggttggtggcagccacatggctgagggctagagcctggccagggagtctggagagaggcagtgggtgggctgggggttcagcctgctgaaggggagcactggtcagtgcccataccccatggggtgaaggcctgggcagggcccaggggcagcttcgagggtgacctggagctgctcaggaagtgagatggcccagcctgacctgaccattggctggcaaggaacgggatggagaagttgtgtcctgggccttcagcgagtgtgacattgtcattgttgggatagctttaaagatctgattgcttatgacatgccttgtagcgctaccagcatcttggcatttggcaggtctagtccagctcgctgtttgcacgtcttctgtcttattcctagaagagagagttcccagcttgcttgatttccccccattgatgggaggctcatcactttatgggagactcattttacttaggccttctgaggatagtttcattctgatagtttttttttttttttttttttggagactgagtttccctctgtcgcccgggctggagtgcagttgtgtgatctcggctcactgcaagctccacctcccaggttcatgctcgtgccgaattcgatatcaagcttatcgatacc

SEQ ID NO: 223 - DNA, 1873 bp, Homo sapiens
ggcacgagctcaggctcccgtcggacttcacttggccacatccttcactactctccttccttatgctttatttaacacatttccacgagacatgtgttcccatgaccttcttccatgtccacctccacagttttgctcaggttctcgttccctctcccaggcctctctccactctatactttcaggaattctacccatgcaaagcccatctcagcttccacctcactcctgacttgacacctcctcatgcagcctgcctgcctggcgccttgtctagatgctctcacctcgttctgccttggattactaaaacttactttctgtcttgctttctttccttctggagttcttgagggggagtgcagcttctttacaatgtctagatccctgtcccatccacgcacactgcacagatacactacagagcgcccagctcacagcagacactaaatggtgaaagaatgcaagagggtcctgtgtctccctaagtccaaaaggagacataagaatattacaggccgatatttgtaacccattaagaaaaaaggtgaaatagtgtcaatacctaagcaaaataccatgagaatataaatcaaagtgtgaacaggagtaatattaagacagaaaggcaatggttctcttctggaaccattagcatttaaatacagaaaagaaaatgcaccattttaacagctgcagaagataataacagacacaattatttttccctaactagatgccatgccccatgtacagtagttcctaatcatcccctcatcttagtctcataacaaccctattattgtctctatgttacgtaggaggaaactgaggtaccgagcagttaattaaccttttccatcatgcaaccagcaaggcagagctaggatttgtatcccagtagcaccttttccagattcaagctcaactcctaaattctcctgcgtcttcactgtattgtttttacaacacatttgcaggttgtgggctaagtcaccggctactgagagataaagaagtaacactcctatgaattttacatttctggctgggcaccgcagctcacacctgtaatcccagcactttaggaagctgaggcaggagaattgtgtgagcccagaagtttgagaccagcctgggcaatatagccagaccccatctcaaaaacaattgtgcatttctaatactcactgagcccctgctatcccctggctcagtgtacattgctctatatctcctagcaaacccaggagctatgtatgaactgaaaccctggttaaatagcttggtcaaagtcacacagctcaggtgggggaggctgggtttaaaggcaggctgctgatgctatgatccatacttgaggctactgctggccacaggctccatctgaggccctgtagggggtgagaggagaaacccggccccagagacagggtctgaaccctctgctgccagccagtagagaaaacagtccctcacccacaacgtggggataacactgcctaccacaccaggcagtggaaagaattaaattaatttaaataaaggagacagtgcagagtacctgacacgcaataagcactcaatgagagctattattagaggtaactctccctgctttcagtctaatgccatgtttcttatcacttaaggtgatcaccttgttgctctttaaaatattatgtatggttttctctaagatacatgtaagtgtaaaatgcagaagaaaagcatgcggggacggggggggggaagaaattcccttttctttattgatcagcctttcccccaaaatactttctcaaggaattattaaatactcaacatggcgcctcgtgccgaattcgatatcaagcttatcgataccgtcgac

SEQ ID NO: 224 - DNA, 941 bp, Homo sapiens
ggcacgagattttggcaagtgctgttatgtgaacaccaccatcacaatcaagatagtctatagttctagtaccccctgccctgaaacttgcttgttctgtttagtcagctcctctccccaccaccagcccttgtcaactgactcattttctgtctgtatagtttatatcatttccagaatgtcatataaatggaattctagagtatgtttcctttggagtcgcacctttcacttaatgcttctgagactcatctgtcttgttgcatatatcagtacagaagtcatttcttttattgctgagtagtaatctgtcatatggatgttccacagtttgtttatccatttatcactggtggggatacttgggktttcagttttcagtgattatgaagaaagctgctgtcaacatttgcaaacagtttgtgtgtccacattgtcktagtaaataactaggagtggaattgccgggttgtatggtaacagtatacttatctatgaaaaactgacagacttttctaaaataactgtaccattttacattcccaccaccagtgtatgaaagtcccagttccttaacttcactgacaattggtatgtcagggtttggtttcatttttattttgttgttaggatttcaaagggttatagcgggatttcattttggttttaatttacacttccctaatggccattgagcatctccactgctcgtttgctatccatttgcctattttcttttgtgaactatgttcaaatcttttgtccatttttttaaaacctggattgtttcttattgatttttgagagttctttatatgttctggatagatatctttgtcagttatgtgttttgcaaatattgtataccattatgtggcttgtgtttttattccattaacagtatttttcacacaagaaaaaaaaaaaaaaaaaaaaaaaaa

SEQ ID NO: 225 - DNA, 1715 bp, Homo sapiens
ggcacgagggacattggagctccccacaccactcattgctgcccaccagctatacaactacgtggctgatcacgccagctcttaccacatgaagccattgcgaatggcccggccagggggcccagaacacaacgagtatgccctggtgtcggcatggcacagttctggctcctacctggactctgagggacttcgacaccaggatgactttgatgtgtctctgcttgtctgtcactgtgctgcaccctttgaggagcaaggagaggctgagcggcacgttctgcggctacagttcttcgtggtgctcaccagccagcgagagctcttccccaggctcactgctgacatgcgccgcttccggaagccacccagactgccccctgagccagaggctcctgggagttcagctggcagccctggggaggcctcagggcttattctagcgcctggaccggctcctctgttcccaccactggctgcagaggtgggcatggcacgagcacggctggctcagctggtgcggctggctggagggcactgccgtcgggacaccctttggaagcgcctcttcttgctggagccaccggggcctgatcgactgcggctaggggggcgcctggccctggcagagctggaggaactcctagaagcagtccatgccaaatccattggggacatcgacccccagctggactgcttcctatccatgacggtctcctggtaccagagcctgatcaaagttctcctaagccgcttccccagagctgtcgccatttccaaagcccagacttgggaactcagtacctggttgcgctgaatcagaagttcactgactgctctgcgctagtgttctggactccacttaggaaagacgtctctgaagtggttttccgagaagcccttccagtacagccccaggacacgagaagcccccctgcccaactggtctccacctaccaccacctggagtctgtcatcaacacagcctgtttcacccttctggacccgcctcctctgaagggagtggactggaccactgaatgtcactgttccttgaatcatgggcctaccagattgcctgccagaggcaggactgaccagcccttctgggccccagggcaagccagacactgagtgacaccaaaggctttgtaactatgtcttgagggtctgctgccccagcctggcagcaggaaccgccctccccaaacacccacagccactgacccatccaggactccagagagtcaggtcaaccccgaggaccccttgggcccttctggggtactcctttcggcccccctggtagagtctcgggagttcacacagggtggcaaacaccccctagagctcctctgcctgaatcctgccccctagcctttgaccactgtcagccacctgtgtcccttgagccttcgggtcttcacttcccacttggacatcactgctggacattcccatcgagatgacacctgggttccaatcccagctctgcctttgaagcacttgcggccaccgtcaagtccctttgctctcggaccctgggtttctcatcctttaatgaggtgggttcagaagctctcccatcttcacagcaaccctggcactggcttctcaatgggagggaagtcagcagagaaactgaagtgttagacactatgtgtcccaccaccccattacagagacatatgacaatgaaaaaaaaaaaaaaaaaa

SEQ ID NO: 226 - DNA, 945 bp, Homo sapiens
  misc_feature (295)..(295): n equals a,t,g, or c
  misc_feature (875)..(875): n equals a,t,g, or c
  misc_feature (914)..(914): n equals a,t,g, or c
gaatggtgaaatattaagtgctttctcccccaggttcaggattatgacagctatgtccattcacctcttctgtacagcattgtcctgtggaagttctggccagtgcaataaggcaattaaaagaaataaaatatcaaacgattggaaagatgttaatgtgtcatcattcatagaaaacatgattcatagatatacatacacgaatgctttgaattcataagtagattcagccagttgctggatataaagtcaatatacaaaaactatttttatagacatgaaacacgcaatgagnaaaaaaatttaaccatttttagtagcatcaaaaaacccccatacctaggaatatgaatttgtagtactatttgggatatgttgatggatatttatcatttccagtttgggattattataaagaaaatagccctgaacatttgtaatatatgacttttggtgaatgtagcattcatttctgttgattacaaactcaggggtgaaattgttgagtcctaagggagctatagatgtattcaacttcagctgatatggctaaataaatttgcgaaaaagattgcatcaagttatgctcccatcagcaatatgagagttcctgtttttccacattgtcagcaacactttgtactgttactccttttaattttagccgatttggctgaaggtgtggtaatatctcattgtagtggccaggcgtggtgctcacgcctgtaatcccagcactgtgggaagccaaggtgggccgatcacgaggtcaggagatccagaccatcctggctaacatgatgaaaccctgttgcctgtagtcccaactacttgggaggctgaggcaggagaatggcatgaactcgggaggcggngcttgcagtgagcctccagcctgggcaacagagtgagantctctcaaaaaaaaaaaaaaaaaaactcgag

SEQ ID NO: 227 - DNA, 1538 bp, Homo sapiens
  misc_feature (112)..(112): n equals a,t,g, or c
  misc_feature (147)..(147): n equals a,t,g, or c
ccgggttcggctctgtgtcagcagccgggcggcgctcgggcgggacatggcagcctgtacagcccggcggcctggccgtgggcagccgctggtggtcccggtcgctgactgnggcccggtggccaaggccgctctgtgcgcggccgnagctggagccttctcgccagcgtcgaccacgacgacgcggaggcacctctcgtcccgaaaccgaccagagggcaaagtgttggagacagttggtgtgtttgaggtgccaaaacagaatggaaaatatgagaccgggcagcttttccttcatagcatttttggctaccgaggtgtcgtcctgtttccctggcaggccagactgtrtgaccgggatgtggcttctgcagctccagaaaaagcagagaaccctgctggccatggctccaaggaggtgaaaggcaaaactcacacttactatcaggtgctgattgatgctcgtgactgcccacatatatctcagagatctcagacagaagctgtgaccttcttggctaaccatgatgacagtcgggccctctatgccatcccaggcttggactatgtcagccatgaagacatcctcccctacacctccactgatcaggttcccatccaacatgaactctttgaaagatttcttctgtatgaccagacaaaagcacctccttttgtggctcgggagacgctaagggcctggcaagagaagaatcacccctggctggagctctccgatgttcatcgggaaacaactgagaacatacgtgtcactgtcatccccttctacatgggcatgagggaagcccagaattcccacgtgtactggtggcgctactgtatccgtttggagaaccttgacagtgatgtggtacagctccgggagcggcactggaggatattcagtctctctggcaccttggagacagtgcgaggccgaggggtagtgggcagggaaccagtgttatccaaggagcagcctgcgttccagtatagcagccacgtctcgctgcaggcttccagtgggcacatgtggggcacgttccgctttgaaagacctgatggctcccactttgatgttcggattcctcccttctccctggaaagcaataaagatgagaagacaccaccctcaggccttcactggtaggccagctgaggccccaagtgcccaggcttggtcaccgggaagaacaactctcatcccacaattgctgcagaactcttctctccccatcatgggccacagtgggtctcttaatttgattgtggggttctttttgtggggaggggtggtataacttttcttcagaagacccatgtgggacacctccaaggctggcctcctcataagccctgcctacaccatgttccagtaaacctctccaccaaggaactgtgttcagctgccacaggcctggaggagtttcctggcctgtcacgtgaggtttgatcagtaaaccagtgcasgyttggccaaaaaaaaaaaaaaaaaaaaaaaaaaaaaaaaaaaaaaaaaaaaaaaaaaaaaaactcga

SEQ ID NO: 228 - DNA, 663 bp, Homo sapiens
ggcacgagaaaccatgaaagtcctttcttggatccactttatcttgattagtctgcattttactagttcactggatccctcctctaggggcctggggactttcactgatgctcttcctgattctagagcaaaggtgtgggaaggggaaatggaggaatgccctcctgtctgtgtcgttctctgtgccacagctacagatgcagaaggtttctctggatagcacacctctgaatgtaaatcatgataaaatggatatttggaaacttactcctaagctgtgatttagggtgtatttctacttctggactgcctcaatatcaagggctgagacttttgaattttgaatattcgttgggtttcatgttaagaagcctgtggtctaggagtgctattcagtgtttcttttcctgataaacactttgaatattttttttgtgtttttgtttccttttctgaagctgttcctccttttaaatatttttaatcacattgataaaatctatccttcaccacctctggttctactatagttgatttttattttaaatgtttaattgtatttgattaaacacttaactggattttggaataataaaactctcgtccaatttggcttttaaaaaaaaaaaaaaaaaaaaaaaaaaaaaaaaaaaaaaaaaaaaa

SEQ ID NO: 229 - DNA, 1816 bp, Homo sapiens
  misc_feature (504)..(504): n equals a,t,g, or c
  misc_feature (1405)..(1405): n equals a,t,g, or c
gcgtggatccaagatggcgacggcgatggattggttgccgtggtctttactgcttttctccctgatgtgtgaaacaagcgccttctatgtgcctggggtcgcgcctatcaacttccaccagaacgatcccgtagaaatcaaggctgtgaagctcaccagctctcgaacccagctaccttatgaatactattcactgcccttctgccagcccagcaagataacctacaaggcagagaatctgggagaggtgctgagaggggaccggattgtcaacacccctttccaggttctcatgaacagcgagaagaagtgtgaagttctgtgcagccagtccaacaagccagtgaccctgacagtggagcagagccgactcgtggccgagcggatcacagaagactactacgtccacctcattgctgacaacctgcctgtggccacccggctggagctctactccaaccgagacagcgatgacaagaagaaggaaagtgatatcaaatgggnctctcgctgggacacttacctgaccatgagtgacgtccagatccactggttttctatcattaactccgttgttgtggtcttcttcctgtcaggtatcctgagcatgattatcattcggaccctccggaaggacattgccaactacamcaaggaggatgacattgaagacaccatggaggagtctgggtggaagttggtgcacggcgacgtcttcaggccccccccagtaccccatgatcctcagctccctgctgggctcaggcattcagctgttctgtatgatcctcatcgtcatctttgtagccatgcttgggatgctgtcgccctccagccggggagctctcatgaccacagcctgcttcctcttcatgttcatgggggtgtttggcggattttctgctggccgtctgtaccgcactttaaaaggccatcggtggaagaaaggagccttctgtacggcaactctgtaccctggtgtggtttttggcatctgcttcgtattgaattgcttcatttggggaaagcactcatcaggagcggtgccctttcccaccatggtggctctgctgtgcatgtggttcgggatctccctgcccctcgtctacttgggctactacttcggcttccgaaagcagccatatgacaaccctgtgcgcaccaaccagattccccggcagatccccgagcagcggtggtacatgaaccgatttgtgggcatcctcatggctgggatcttgcccttcggcgccatgttcatcgagctcttcttcatcttcagtgctatctgggagaatcagttctattacctctttggcttcctgktccttggtttcatcatcctggtggkatcctgktcacaaatcagcatcgtcatggtgkacttccarctgtgtgcagaggnattaccgytggtggtggagaaattycctagtctccgggggctctgcattcwacgtcctggtttatgccatctttwatttcgttaacaagtgactgcagcgccaagcggcatccaccaagcatcaagttggagaaaagggaacccaagcagtagagagcgatattggagtcttttgttcattcaaatcttggatttttttttttccctaagagattctctttttagggggaatgggaaacggacacctcataaagggttcaaagatcatcaatttttctgactttttaaatcattatcattattatttttaattaaaaaaatgcctgtatgcctttttttggtcggattgtaaataaatataccattgtcctacaaaaaaaaaaaaaaaaaaaacttctcggccgcaaggaa

SEQ ID NO: 230 - DNA, 406 bp, Homo sapiens
aggttttccagaaagttatcagatcttgctttcctgattagcagcagttagcggggtggataaaagcaccccttcagagcaatctcatttccatttctttcaggccacttattttttccaactttttttccgtatcttcataaatgtttcactcttctttgttagtatttcttagtctcttgagtcaagaaatatttactgagtatgattgcatgcataagtagtgtgcgttagagatacgatacctgtaagacaccacagtgctgggtagatccgggtgccattgtctgttgccagggccgaagttggcattttgtaagtgttcgaataagcaccatgccgtgggataagaaataaaagtgtgtgcctcatctgtaaaaaaaaaaaaaaaaaactcgaggggggg

SEQ ID NO: 231 - DNA, 1495 bp, Homo sapiens
cccccgggctgcaggaattcggcacgagctgacatatatttgagaaactgggctactgaaagccctaaccccacttggctgcattttatttggtaaccagtgaggcaaacacccttgccagacccctaccatccatcttgatgtggttcctgcactggacactgcttgggtacgggcctgcccagatcttgggaatgtgggcagtggctcctctgaagcaccagtgggcagaggatgagtcatggtatcctcccggcacccctccctctgccttgcattttacttgtgatccaggtacttcctattgaagacagtggaccagcacatgaagctggccttctccaaggtcttgcgacagacaaagaagaacccctctaatcccaaggataaaagcacgagtatccggtacttgaaggcccttggaatacaccagactggccagaaagttacagatgacatgtatgcagaacagacggaaaatccagagaatccattgagatgtcccatcaagctctatgatttctacctcttcaaatgcccccagagtgtgaaaggccggaatgaccaccttttacctgacacctgagccagtggtggcccccaacagcccaatctggtactcagtccagcctatcagcagagagcagatgggacaaatgctgacgcggatcctggtgataagagaaattcaggaggccatcgcagtggccagtgcaagcactatgcactgagatgccttggccatggcacaagagaaaccagccaggaaaaaccagacagactttcacactaaagaagaggcctccatttttttttttcttttttttattggtgtagttacgaagcctttcaggctgcttctgtttaaaatataaaagaaaactttgccccctttgcatcttcataaacctgctgcggcagactcctcagccgatggtggctctgggtttccttgagtgtcatatgtcctagaaagttgctggctgactcttttttgtctggggcctggggaaagggcttggactgtgaaaagaaatgtggcccctttccatcttcaagagagatggaattaatgatggatggaccctggagggaatctccccagccgacttccactgggctgacagactttgctgaccacaggggaacgatgttcttttctttcttcatgatcagacataaacttagcatcttaatggaagaaaaatgaggggaacttcaattatgatttattaaagacaatttctattacaccctcctttatgacaagtgacattttagatgtaaaagtaaaaactttaccatgccttttttttttttgttggcctaacattgaggccttaaaacctgaggctcctgtgcctgatggaattcttgtaacatacacttgtgtatcatataaagataccactctgtttctcttatgtattcttactctagttgtttattaagaatgacaagcacgtcttttcaaaaaaaaaaaaaaaaaactcga

SEQ ID NO: 232 - DNA, 2895 bp, Homo sapiens
cgacccacgcgtccgctttcttctatttcttgtggatattatggctaataacacagcaagtttagggagtccatggccagaaaacttttgggaggaccttatcatgtccttcactgtatccatggcaatcgggctggtacttggaggatttatttgggctgtgttcatttgtctgtctcgaagaagaagagccagtgctcccatctcacagtggagttcaagcaggagatctaggtcttcttacacccacggcctcaacagaactggattttaccgccacagtggctgtgaacgtcgaagcaacctcagcctggccagtctcaccttccagcgacaagcttccctggaacaagcaaattcctttccaagaaaatcaagtttcagagcttctactttccatccctttctgcaatgtccaccacttcctgtggaaactgagagtcagctggtgactctcccttcttccaatatctctcccaccatcagcacttcccacagtctgagccgtcctgactactggtccagtaacagtcttcgagtgggcctttcaacaccgcccccacctgcctatgagtccatcatcaaggcattcccagattcctgagtagggtggcttttggtttttgtttctttcttgtcttgtcttttattgaaaggaaatcaaaaataggctaaacagaattttgagggcatggcccaaataactcatgagttccaagttgaaacatggttgtgcaagttggacattacaatgtaaaacacattttcttcaaacacgttttcccttttgtttcaaaaaatgtaatattttcccccaagcgttttatatttatgtattttgtattcaatgtgaggcttattaaaaatagtgattctaatgtaagaatcagctaagatgcattatatatattttaattaaaattaaaacttcagatatttgtggattacaatcctcatttacttccaatgtgactaaaaagagaaaaaaaatcactgtgtcactttaaagaaaaatcttctaagggatttggattttactttctttagaatgacaagtgaatcatattgacattttacaatcttagatttttctttttttttcttttgagacagggtcttgatccgtcgcccaggcgggagttgcagtagcatgatcaggactcactgcagcctctatctcccaggctcaagtaatcctcccatcttagtgccccaagtagctgggactacaggggtgcactaccacaccgggttgaattttttttgaattttagtagagatgaagtgtcactatgttaccaaggctggtctcaaactcctaaactcagatgatcctcctgcctcggcctcccaaagtgctggaattagcctggccaatcttggatttttaatggaatatgtgggcacaaaatgacagaacataggacattctaaagttccttgatttgatcattataagaagtgtgggactcaagcacaggaaactgaactcttttggtgtcattggatgtttcatttttgacactaattttttctggacaaactctttatgtgtttttcccaagaatagttatctacttcctggaggcaaaatccttggatttactaacatgatgatttaccttttcttcaccgttgtcgttacattgttagaaaagcaacaggaaaaaatccaattcatttgacctaaaaacaagcctcaagtttaaaaccaagctcacgtttttcttaagggaaaaattttctttcttaaacttacatctagcaacttggaaagcactttctctggggatcttcttttgtaactttgcagacaaataagtatgagtcactggggagagagtttgttattgaaatagatgttgcccatgaagaattctccttcctggattgactcttaatcatcaggcatcattcctggtttgcttctctacgaatctcaattccaacttctctgcagagtctgtacagtgattaagccatgccagatggtctttggtgcacacagttatttaagaatccacttccacaggtggctgcccttgtaaggaagaatgcatccctaaatgtggccaccagagagttccagtgggcagatgtctgtggctgcccttctcatttaaggacatgagttcactggagtattactcaaaaagtctgtggtccatttccagtattgtgaatatttagtttatgtggccgtttctttgtttctttgaacagtgggattttcagtgaaaaagtaccctctttttcatttcctattgcagtggtcacagctaatagtgtctgaacatggttcaagaataagagattccatgtagcattttctttattattttcatttcccttatattatccatcattccttaaggacaattattcttaataatgcttatagaaaatgttctctaattaaacatgccaaaaggaaaaagtaagggaaagagggagcaagaagaaaatggaagaaaaagggaaaaaagctaaccggataaccaatttgttataagttggttttcaacaaagaaatttagcagccaagtaaggtttcaagggaatattaacttggtatcagggctacttttttttttttttttttttttacttgcatgtcatccttaatgtctaacatgaaaaatcaccaaagagtatggtttttatcaagaatttgtgttgggagtaaaaactgctttatagctcccaaattaggaagagaagagcagaaatcctctggggcatttaaccatctggcagaattgttgctgcacccttatcccagttataagacagtcaaaatgactatttcctaaatattgtgagtgtatgaaatgtgaaattaaagcaaaaactggagacttttaatgtaaaaaaaaaaaaaaaaaaaaaaaaaaa

SEQ ID NO: 233 - DNA, 2150 bp, Homo sapiens
  misc_feature (874)..(874): n equals a,t,g, or c
  misc_feature (1198)..(1198): n equals a,t,g, or c
  misc_feature (1201)..(1201): n equals a,t,g, or c
  misc_feature (1266)..(1266): n equals a,t,g, or c
ccacgcgtccggacccgagctccagtagttccgcccgctggtcatcgcgccctttcccctgccggtgtcctgctcgccgtccccgccatgctgtctctagactttttggacgatgtgcggcggatgaacaagcggcaggtgagcttgtccgtcctctttttctcctggctcttcttgtcccttcgaggctgctgctgcggggcccggcggaccccagggttctggtgtgagggtctgagctggtctgatacccgggtcattcgctttctttggagactgtggccagaggccgccttgtccgcctcattatttttaaccccgaactgattcagggcctacctggggcggggcgggaagcggtgtcttcacgttccattcctcccactgaggcaggggagcaaatggaaaccgtacgcgcttgaagtgggagttggggtgcttattgttttagtcattttaatgcggcggactcttgatttctccagtcggagcgactccaggtggtttcgggagagacgaggtttagccggtttctggggcgctcaggaaggcgattggaggccccacaaaaaccgttttgctgctttcagctccttgcaaccctttagtagagctgaaccgtagcgggctgcaccgactttgacttggaccactctgggctccgagttggaacagttacactacttgcccttgcgtccgcttagcactaaggcggcagccctcggaatctatggttttacagtccaatatcagtgccacggggatctggaaatgtaggtctcctgattttgtccttacactttactttgatcttctagatcgtatgccaaatagtactgagaatattgttgtaattatttagtccttagaaaangttgttctgttttatcttttgcgcctagtgtgtctgtagagcctagttttgctgcatcggactttttttttgttttaaacagtattttactgttatgattatcctgatgtcaccattaaggattttttttttccttggacttgcattttttgtacttataactgccacttagggaagtagatacacaacctttccttactccccttcaggccttagctagctcagtgtcaattctgtcagtcagaattgagcattctataaaaattgcgcaaacgttactttatgtctttatgacaacacttcaaatttttacttgtatagtgntgnctttttttaatccatatttggatttctagatgccacagatatttctctgaggaaagtatttattntgagtctgatatttattgactctatgctaggtccaatgagagaaatgcaaagatagttaagaaagactcggccttcaaggagcctaaatgtgtagaaaaggactaaggcaaaacaataacttttttgagctcttgccatgtgtgaagcactttatacacctgtaaggtaggtaacgttgttcttattaaacatgaagaaaatgagactttgtgagaagcaatacagtatagaagttaagaatatggactctaaagctagatttcagaggtttgaagtagctctgctacttactggctgtgtgactttgagcagattacttaacctgtctgtgcctatgtttacttttattgttgtaaaaagatatgcaacataaaatattccatttcaaccgtttttacgtgtatacttcactgacattagttgcattcactatgttgtgcaaacgtagggtcgctatgaagattaaatgagttaattcatataaagccctcagaagagtgtctggcacatggtgagtattggctgtactgtggtcgatgtcattgttagagagctttagtgatttgcttaagacagaaggtagactgggtgcgggtggctcacgcctgtaatcccagcactttgggaggctgaggcaggcggatcacaatgtcaagagattgagaccatcctggccagcatggtgaggccccctctctactaaaaatacagatactagctgggcctgttggcgcacgcctgtagttccagctactcaggaggctgaggcgggggaatcgcctgggaggtggagattgcagtgagctgagatcgtgccaccgcactccagcctggtgacagagtgagactccgtctcaaaaaaaaaaaaaaaaaaaaaaaaaaa

SEQ ID NO: 234 - DNA, 3102 bp, Homo sapiens
  misc_feature (3096)..(3096): n equals a,t,g, or c
tcgacccacgcgtccgcccacgcgtccggcccagtagtttttattgttgggtttttgaaaaaacctctaccaagaatatggtgttttttttgtttgtttgttttagaaaaattgggatttccccccaccccgccccacccagataaactatatctacactgtctcgtcaagttctctgacacgatctttctgggctctacatttcctactagtttgtgtccagaaactgcaagttgacatgaatagaggacaaaggttgtgtcttgcttttgtctctctcttccctccctgcaactctctcksscctcctcccactctcttcccctcccccctcctcccactgtctctcacctcccccaccccccactctctctcatctctcgctgtgtcctgtgtatgtgtgggtgtgtgtgtatttgggtgtgtaaatgttggttcttccactactggattttgtaatctaggataaatcactttttttggggactttgattttgctccattacgttttcattttttctgagcactgactgttctgaaagctgcacaaaacgtagaaagaagacatagcgcctgccagggaataggaaatgagggcacttacacattaatgtgaattagtaattgtggtatagaaatgttttatagtgaaagattcaaatttgcttttcaagaaaaatgccaaaagctatttaaataattcgaggttacatcgtargttttgatttttctcaatttaagatacagaaatacagcaagccttaatataaagtttcctaaagtttcttcaagtattttttaaggtggagaaatgcaggaattgtataaccagaattgtttctgcctttagcttttcagaacttgagatgtggcagcactggactgggtttttttaaatgttaggactaggaatgtttgctcttgttaattatgaattaattgattattaagtttagaatgcatttttacaagtatctaactatcaaattgtgtttagtaacttgagtgtatgcacaagtttgatcaacagcaaaatagagttctgaatttcttttaaagtgatgatatattattttgtgaaactttgtgtttgaaaatgtttatttctgtttatggtgtaatcattctgaggtgaggcttttcttatttcctttgcattttgctagagctgtgctgagttcagcatttgcttatttaaccactacataatgacagaccagttattaggtattagcatgtgtggtaataataatagtggaacttcacacttacatcaattcagtgcaggggcatagaataaaatattaaatattggcagatgtatgaaaagaagtgtgagttaaaaatattgaatattggcaggtgtgaaaacaagtgtcaaaattcctcatatagagaaaataattttgagtttagagtattatcttttaattaagtgtagtctaaacttaactttctgtaaaggcactttgtggttttyccaaagatgttctagatctatttggttgctctatagtcaaacagctcttttgaagacaactgtcttattttattacaaattggcttgacatatyyatactgtaacattgtaatattgctgtgctgtacattttggcccttackaaatacgtctttttcagaactgttaaagttttgatgtacatcragctgaattctgtttttaccagtttcaaaaccttcaagtgatatgtggaaaaaagtgaatgagacctctgatagggggttttcagaaccttgttcacaccaaaatgtgacagttctttcatgttttcctaaaccaagttaaaattacatgtatattttggtgttaaggttgatttttaagatacttctgatttgtacaaaaggaatgtttcctttataaatcacagaagaaaatgacaatatctgttggatatttgatataatttaatggtgttataaaacctttaagaggattcatggtgaatatatgtgataacatctttatactttgaaaaatgttccacttacccttcagatatttgttgtaagttaattcaattcttaatactttaattttgctccaacaagggctttatgttgctggtaagagaatttatttactaaatgcactatgtataaagtgaaagatagtttacttatctgactttgatattagatggctgacattagtgcacataatgcagagtttaaccttgattcttcaacagagtccagatttaaatgtctacttagttaattagttagctgatattcttccacaattaatatattcaatttcccatcagtatatcactttaaattttatgtttttctaaggaaactttccacagaattttaaacaactgatgcatccatactcagggtgtagggagaatactttgcatttaaaaaccctgtccacctgtcaccagcacaagagaattagagcttcagtgagaatttagaaaaattatactaaagtgagatgcattttttctcattttcagcaagactcctctaagcatttactcatttactgtattcctgctctgaagatgtggatacagaattagtcactcttgtcactttatttatttattggtttttttttaaccatctgtgtacattcctttcatagggtagagttctagttctagaagttcttattttgtttttgttgtaatgtttgaatactatttaatatccggttttaatattgctggatttgctacctttggttacttgtgcagtgttaaaagtaatccactttcttgtttaatataccagatacatagcaaaagcagcttggaataattatagctgtttatttggctgtgctcagttactatattaagatcttgtactgtgtaacagtaactcttttttgcttttcagtaatttaatatgttcacttaacaaaatacgaactttgagatgcactaaagttttgtttcagcagtggctcaaaaaatttcagaaattacttttgtaattatttgcaattaattgttcttttatcttacaattgtttaagcctgtgatctttcttctcccagctaagagttcttcaataaatttaagaaatacaaaaaaaaaaaaaaaaaaaaaaanaaaaaa

SEQ ID NO: 235 - DNA, 865 bp, Homo sapiens
gctgaatataaggaaatatgtctaatggacaccagttaatactttttaaaactactctttaaaaaaaaaatacgttccccttggttaactgattttttaatccagggtggacattttttcaacctttattaaaaagacaaataaactattttgtagaagatcagactcctacttaactggaagagaaatgtctattaaatgtctctcctctttctctgggtcaagaccatgtaattttatgcttcagagatgaagatactgtttgtttacaaagagtttagtttttaagacatccaaaactctatgctagagcaaaaatcaaatagcaaaggacactagccagaaaatacagtgtgtgtgtgtgcacctgtgtgcctgctgaacaacttgacagtgtaacagataaggtaactgaagatggtggatatttgaattgtattagcttaatgtctacatatctttggccaaaactctattgtcatattagaaacatgttatctttttcatgtttattagtaatttatttttgattctttgttttctttttcgtccaactaaaacaactgtaatgtacttgatacatttatatcaagttctaaagtatttagacaaatccaaatactttgtttttagttttttcctcctttccatcctgttaaccacagtgaaacgctgcagtattttgatttggtcagtgctacggaggaagaccatgaaagctgaattggtctgtgccacccagagtaaacctcttctcttcttctggaaagatggcgtgatgtttttcaaggattctaataaatatcccgcagtcatctcctgaaaaaaaaaaaaaaaaaaaaaaaaaaaaaaaaaaagggcggcc

SEQ ID NO: 236 - DNA, 2612 bp, Homo sapiens
ccacgcgtccgcccacgcgtccgctccccagtagctgggatgaccggcactcgccaccaagcctagctaattttttttgtattttgactagagatggggtttcaccatgttagtcaagctgctcttgttttgttgttgttgttgttgttgttgttgttgtttgatactgagtctcgctccagcctggcgacagagcgagactccatctcaaaaaaaaaaaacaaaaaaaccaaaaaaaaaaacagaaaagaaacaaaaaacgttgttttaattttaattaactcaaatagcttcatgtggctagctgccgccctgtagaacagcacagttctagaactttcgagaccttctccctgttatccacacttactttacagagtagactcagcacttcgagtcccctgtccttcaggccaggccaaatcttggtccccagagcccagtgtggcagaggccatcgaaaactgacccacgcactctagcccagccctggatttacagccaagcgctgtatagggatgggtgactcttttgtttttgtttttgttttgagttgggtctctcgctctctcacccaggctggagtgcagtggcataatcatggctcgctgtagccttgacctcctgggctcgggccatcctcctgcctcagcctcctgcagaactggggctgcgggcacatgccaccacacccagctattttttattttatttttttgtagagtcagggtctcactgtgttgcccagactggtcttgaactcctggcctcaagctatcttcctgcctcggcctcccaaagtgctgggattacaggtgtgagccactgtgcctggcctcttggtgactctttgcaagggcattgctggctggctgatatggcctgcagcctctgcctgtaaccatcagagcgatactctcattatcggcaaggtgggaccccccctggcccaagagacagggcctgttattccactgtatggaggagaagctgaggcttagggaaggcagatgacttggcaaggtcataaagacagcaagctgcaggaccagctcattctaaggcatgaaccccctgtggcccacctcaccatgatgttaacatttcagcctgctccattccaggcagacagtcttccagaaagttacccggctccctggctgggcgcagtggctcgcgcctgtaatctcagcactttgggaggccgagacgggtggatcacgaggtcaggagatcgagaccatcctggctaacacggtgaaaccccgtctctactaaaaatatagaaaattggctgggcgtggtggcgggcatctgcagtcccagctactcaggaggctgaaacaggagaatggcgtggacctgggaggcagagctcgcagtgagccaagatcgcgccactgcactgcagcctgcacgacagagcgagactccgtctcaaaaaaaaccaaaagttacccagcaacccaagtcatatcctgatgatatccatactcctcagtcatgcatcccgtggtgcaggggctgaccccaagaggagctgctgcccccagagggtggggagccgaggcagggccttggtcagacttaccaggctatgctcccagcccagccctcactagggacccccgagtgcatctctctcctctccaggcctctgtttctccatctgtgcaaccacagtgttggacatggtagtcccaagtgtctgctcgtaactttgccctctctgtgcccccaggtcagggctgcgataagacccggtcacgggtgaccctgcaggagtggaatgaccctcttgaccgtgaccttgaggcccagctcatctaccggcacctgctgggcgtggaggccatgctgtgggagaggcaccgggagctgagcgggggcgcagaggcaggcacggtgcccacgagccctggcaaagtccccgaggactcattggcccggctgctccgggtgctgcaggacctccgcgaggcccatagctccagcccggccggctccccaccctcagagcccaactgcctcctggagctgcagacgtgaggcccgccctacgctccccttgctgagtcccctgccaagcgctcggagcccccccaggacactctgcaccccctcaccccggtcctcctcattagggtgcagggcctaggtctcttccaggtgggggaggggggagagtcaggaataaggggatccccagaagtgcagagctgagcaggcttgggcctgtcatggctggccggaagtgtccccagctccctacagacgctgtagccatcactgcctctccagggaccctcctctcctgcccaggacagacccagccagaaccactgctaggatgggccgcacccaggggtctggcctccagggacctagagaatgggagggagaacggggccccaggagacccggccgccaccccacccgctacccttgggtgccacagggctgtgctgttgccaacagtaaacctgctcttactgtcaaaaaaaaaaaaaaaaaaaaaaaaaaaaaaaaaaaaaaaaaaaaaaaaaaaaaaaaaaaaaaaaaaaaaaaaaaaaaaaaaaaaaaaaaaaaaaaaaaaaaaaaaaaaaaaaaaa

SEQ ID NO: 237 - DNA, 1899 bp, Homo sapiens
  misc_feature (1439)..(1439): n equals a,t,g, or c
ccacgcgtccgcccacgcgtccgcccacgcgtccgttacgatttataaaagcaaacttttaatttttcataatatatctattcctacctaggtttttttaatcaaattaataaaatggtactcccttttgtgttattgttcagaccaaattttatcagtgtccttcaccctttattctactcacattgtttatttctatacttaataagtcctgttcactcttcctctataatatattacaaacctgatcattgtcactacaccccattcattcctggtctactacaatagccaggtctacctactttcctttcggcatttggacaatctgtgtttctggaagtagcccaaatgatctttttttgttcttatattattcagatcctattactccttgatctcaacccctacaagatattcctattatatgcttaataaaatccaatatccctaccttggcctgtatactcaataaagtccaatatccctaccttggcctacaagatcttagatgactgggatctaggaaacctattcagctaatttcctgcaattctctatgtttacctgctcaaggtttttaccactcctcaaatattcaaactggttttgcatctttttagttctatctattcttttgcagatgccaatcttagtaatcataagcagtttacctctaaattaatgctaaatattgtaaaaggtgtattataagttcagtctttcatttattctttcaaccaccaagtgtcgattgaacacatacattgggtcacaccaatcaaataagatagactcccaggcatcaccgagcatctactactcaattcatctcaggatctatacaaggggtcattttatcagaaaccaaagtcttgatgctgtccgaaaaatcacgttttcaccatgatctcctacttccctaggtggaagtataactttttaggatatatcatggttgctgacttaacttttgtattttttaaatatactcatgacaagtatcatataaaacctaaccagcaactttgcaccagcaaaagtttttcaacatttcaattcttacaaaatcaaatgatataatttcctatgtagtaaaaaattcacacatctgcaaagcttggtttcactaccacctgttaaaatcttacctttggaagctatttatgattgaaaaacactttacctcactcacaaagagctggaagtctctcttcaatccaatatgcacacagaagacaaaaagctgtatcattccttgatgatatatttgaaatcatatggccacgtctgtccattgtcttcagagtttctaagtatttcagaaaattatgacttgcactgtagaactattttaaagaaattccatggtgcaaacagaaaaactaaaacttttcatgttaggataatttattaaaaatacaaacaaatcctatgtntacataagaagatagtaactagcctttttgagagggaaatttttctctcataacttcttttctagtaatttcaataaagaataactgccattccaacgtttagcccatctcactctcttgtcttcttatggccaagtattcaagcttgaaatttgcagaggaaattcttgtccgttttttatatcatgtggtaagcctaataaaacatcttctgaaataattagcccttaaaaggatagtatcttctacctgacagaggcaaatattattgaaaagtttgtaccttataagcacattaatcatggagtcctggaactggattctgtctaagactgacttttgcttaattaagttcacagagattttccacatatttttccagaacattgcatgtagagatattgtcgatcaatcacataactagggtcagaaagatgtaacaagggagaaaaaaaaaaaa

SEQ ID NO: 238 - DNA, 238 bp, Homo sapiens
ccacgcgtccgctgcccccatgcagtggtagtcaccgttctgtcccccgcgggtgctggtgagaaaggtaaaagggcggttccagagcctgagggcctgtgagtgcagtttacataactgccgaaacttaaggaagcgtctaaataaaaagaaacatgttaacccaaaatggtttatttgtttttttttttttttttggtttccagagctcatgcaaacatgcaaaaaaaaaaaaaaa

SEQ ID NO: 239 - DNA, 1459 bp, Homo sapiens
acgcgtccggcgtctgcagctgcaggggaggaggactgggtccttccctctgaagttgaagtgttggagtccatctatctagatgaactacaggtgattaaaggaaatggcagaacttcaccatgggagatctacatcactttgcatcctgccactgcagaggaccaggattcacagtatgtctgcttcactctggtgcttcaggtcccagcagagtatccccatgaggtgccacagatctctatccgaaatccccgaggactttcagatgaacagatccacacgatcttacaggtgctgggccacgtggccaaggctgggctgggcactgccatgctgtatgaactcattgagaaagggaaggaaattctcacagataacaacatccctcatggccagtgtgtcatctgcctctatggtttccaggagaaggaggcctttaccaaaacaccctgttaccactacttccactgccactgccttgctcggtacatccagcacatggagcaagagctgaaggcacaaggacaggagcaggaacaggaacggcagcatgctacaaccaaacagaaggcagtcggtgtgcagtgtccagtgtgcagagagcccctcgtgtatgatcttgcctcactgaaagcagcccctgaaccccaacagcctatggagctgtaccagcccagtgcagagagcttgcgccagcaagaagaacgcaagcggctctaccagaggcagcaggagcgggggggaatcattgaccttgaggctgagcgaaaccgatacttcatcagccttcagcagcctcctgccccggcggaacctgagtcagctgtagatgtctccaaaggatcccaaccacccagcacccttgcagcagaactatccacctcaccagccgtccaatccactttgccacctcctctgcctgtggcgacccagcacatatgtgagaagattccagggaccaggtcaaatcagcaaaggttgggcgaaacccagaaagctatgctagatccccccaagcccagtcgaggtccctggcgacagcccgaacggaggcacccgaagggaggggagtgccacgcccctaaaggtacccgtgacacccaggaactgccacctcctgaggggcccctcaaggagcccatggacctaaagccagaaccccatagccaaggagttgaaggcccccacaagagaaggggcctggcagctggcaggggcccccaccccgcaggactcgggactgtgttcgctgggagcgctctaaaggccggacacccggttcttcctaccctcgcctgcctcggggccagggagcataccggcctggtactcggagggagtccctgggcctggaatctaaggatggttcctagcaggacttggtggggggaacagggaattggggatgggagggaggcaataaagatatttggccttcaaaaaaaaaaaaaaaaaa

SEQ ID NO: 240 - DNA, 532 bp, Homo sapiens
actcatataagaaagcagtacgccgcagtaccggtccgaattccgggtcgacccacgcgtccgcccacgcgtccgcacctcccttggctgtggggaggggcttccatgccctgtgtggctctcgggtgggctgtcgcaccacactgctcttcctttctcttcacgaatcacgcaagcctcctagtcagttctgatgagataacctggatatcttggttgccggtgaaggatttacatgcttattatggtttttttgttgttgttgttgtttggttttttttttgatgggagcctcagatcgccgctgttgctaatcatccatcttggccctgcccccacatttctgcaaatttaaatatgagatttgtccccttaggtgcacagtccagaccccatccagtccagctccttttaaagccacatggaaagtcagctgagaatggtttgggagcccaggtgcgctgtcttccgccctgccctctccctgaaataaagaacagcttgacagaaaaaaaaaaaaaaaagggcggcc

SEQ ID NO: 241 - DNA, 1084 bp, Homo sapiens
agaagacgacagaaggggagccgctggggccgcgattccgcacgtcccttacccgcttcactagtcccggcattcttcgctgttttcctaactcgcccgcttgactagcgccctggaacagccatttgggtcgtggagtgcgagcacggccggccaatcgccgagtcagagggccaggaggggcgcggccattcgccgcccggcccctgctccgtggctggttttctccgcgggcgcctcgggcggaacctggagataatgggcagcacctgggggagccctggctgggtgcggctcgctctttgcctgacgggcttagtgctctcgctctacgcgctgcacgtgaaggcggcgcgcgcccgggaccgggattaccgcgcgctctgcgacgtgggcaccgccatcagctgttcgcgcgtcttctcctccaggtggggcaggggtttcgggctggtggagcatgtgctgggacaggacagcatcctcaatcaatccaacagcatattcggttgcatcttctacacactacagctattgttaggttgcctgcggacacgctgggcctctgtcctgatgctgctgagctccctggtgtctctcgctggttctgtctacctggcctggatcctgttcttcgtgctctatgatttctgcattgtttgtatcaccacctatgctatcaacgtgagcctgatgtggctcagtttccggaaggtccaagaaccccagggcaaggctaagaggcactgagccctcaacccaagccaggctgacctcatctgctttgctttggcatgtgagccttgcctaagggggcatatctgggtccctagaaggccctagatgtggggcttctagattaccccctcctcctgccatacccrcacatgacaatggaccaaatgtgccacacgctcgctcttttttacacccagtgcctctgactctgtccccatgggctggtctccaaagctctttccattgcccagggagggaaggttctgagcaataaagtttcttagatcaatcaaaaaaaaaaaaaaaaaaaaaaaaaaaaaaaaaaaaaaaaaaaaaaaaaactcga

SEQ ID NO: 242 - DNA, 870 bp, Homo sapiens
  misc_feature (743)..(743): n equals a,t,g, or c
ggcacgagcagatattaaatctcacagaaaggtgttccttattaatctttacaaaattgtcatttccccggtgaagccaatttacattaaaaataatgttcagaaaatgctgctgcctgctttctctcctcttttacccaccccttgttctcccagcaatcttcgccctgtatgtttatgtggacaatttctattgtaacattctccattccattaactctgcctcttcctctgaggggggaaaataaaaccctaaatggctctaatagttatgtattttattttgtctcagaggtttccaaacttctgcttttagcttccttttcactgggacaaatggatgtaagttattttccagtttcctgaaaaataatcagggactattttcttcatctatctcaggtgcttcatgagtttcctaagatattaattacggtttccatacattcagaatcaagggactcacggatatggtactgtgttcactgctacacagagtttttctagaaaaaaaaattctttatttttatcttctatttgtatccaaacgatggtaaaacaaaattcctctttagctaggtactgggattttttctttaggaaatactaatagagttacaaaggttagcttataggtagacaaaagactggcggccaaacagagcagtgggtgaaatgggtccctgggtgacatgtcagatctttgtacgtaattaaaaatattgtggcaggattaatagcanaaaaaaaaaaaaaaaaaaaaaaaaaaaaaaaaaaaaaaaaaaaaaaaaaaaaaaaaaaaaaaaaaaaaaaaaaaaaaaaaaaaaaaaaaaaaaaaaaaaaaaaaaaaaaaaaaaaaaaaaaaaactc

SEQ ID NO: 243 - DNA, 2263 bp, Homo sapiens
  misc_feature (1586)..(1586): n equals a,t,g, or c
  misc_feature (2262)..(2262): n equals a,t,g, or c
aattcggcagagcagcagcgtccggcgagatgaaggcgctyggggctgtcctgcttgccctcttgctgtgcgggcggccagggagagggcagacacagcaggaggaagaggaagaggacgaggaccacgggccagatgactacgacgaggaagatgaggatgaggtkgaagaggaggagaccaacaggctccctggtggcaggagcagagtgctgctgcggtgctacacctgcaagtccctgcccagggacgagcgctgcaacctgacgcagaactgctcacatggccagacctgcacaaccctcattgcccacgggaacaccgagtcaggcctcctgaccacccactccacgtggtgcacagacagctgccagccyatcaccaagacggtggaggggacccaggtgaccatgacctgctgccagtccagcctgtgcaatgtcccaccctggcaaagctcccgagtccaggacccaacaggcaagggggcaggcggcccccggggcagctccgaaactgtgggcgcagccctcctgctcaacctccttgccggccttggagcaatgggggccaggagaccctgacccacggcccctccccacccccacccggctcacccccggccctgccagcactctgtctggtaccttcccctcctgcccctgcaccagctttggagaatggatttggagtgtcttgggcgatccagccagcgcaggccccccggcccggttgcttcctcagttcccggctgtgtccttggtgtcctttctccaccacctgtgagcagcaagactgccgcacgtgggcgctgggtccagacctcggctgccacgycccaggacctgyagccctcacgggggctggggatccccatcagcacagccaggcagagatgatacccaccacacacctgggggcccccacacccagtcctcacccttaacttctgccatgggaatttctccatctgcagcagtcacacgggcccaccctgcccttccccaggtcggcctctccgctgtctggagggaaggggatttggagggaggctgtcgtcgcccccaggaaagacgggcctgggggaggcgggacagtgggagaggcgcgctgaggatgagagggcacagggaggtgggttggggtgaggccacatgcggaggggcggggcggggcggggctggggggacaggcaccaagtatgaagaggatggggccagcggggcctgtctggctatggcgtgagcaccgctatgggagaccctggcttggaaagtgaacttgcagccttggatggggaagggccagatgctgggtgggtgcctgtcaccttgaggtgaccatctagggtcagtacctgctgggcttaggacagcgcctgaggctgggaatacctgtctctgctctagcagaggctaaagcaggctagagcagtggaggggtggagttgatgaaaggagaggagtagatgagatggaatttttccagcctcatcctggcctgccctctagactccagtccccaagccctcagcctagtgggtgtcatggatggatctgggggtgtcagacaggcttaccctgtgnccagggagggggcagaatgggcctgcagcttcctgcaraggaagcaggactgggtagcagagccgggaaggtgggtggcccattacaggggggtccccagggtgtcctctggcagggctgtgactgctgcaagctctgccttcaccagtagctggtgccaggacagagctctgggacagcaggcagaggccgagcctgggccacagctcagccactgacttgggtatcagtttccccttctgagaagtacagagtgagacttaaagaacccctagatccccaccagttcaacactccattaactgggaagcccagagtcctgtccggcctgccaagttcatcctggtggacagcgggaggcctccgctaactgttctcttcttttccttattaataaaacacacaatgcctagctggggggtcggaaggcaaatgccctagatggtggggtcacgtctttctccttctccttcctccttctgctggctgaagtgatgactggagctcagcaaccactttgcaccatgaggcagcactgagcacggtagggcagcctggtgagaggggcctagctcgctgccgacagaagtcactgcctacctcagggtccccttacctgggtgggaaataaatttctgctgtgttgaaaaaaaaaaaaaaaaaaaaaaaaaaaaanc

SEQ ID NO: 244 - DNA, 2566 bp, Homo sapiens
  misc_feature (2553)..(2553): n equals a,t,g, or c
gcaaatagcaacttcagtacatcataatataaatagaaaaaaaagatcagtgcttagattgttaatgttttgtttttatttgaattattttactaacttgtttttgtttttaacctgttctcgctcagagtccctctcctccccgacaggaccctattcaggtttccccttcttaaagtctcccccagtgaggaactctctcaacaagggcccactcctggtgcagtactatagcttttcatcccacctcagagtcccccgcaaaaagaaacaagtgatcagagtaccagtcagggtacctcctaaaagcccagcgatgtcccctccatccagtccaaggtttcactttttcaccttttctggtcctttccccaacagctattaatggtattatccattcaggtctttcttcaccccaggccttgtgggaccamccttaatcatccagtggtactgccccctcttaggatataccaccamcgstcacacaggatctccacccagaaacaatgacatctggggtctttctccagtcccctggcatggtatttcttacaaactttctacctcccactggctaatagctttattcaagtasaattacacgccataaaatttactcattttatttttttatttttattaagttaggttgtgttcaggatttactctttttaagtctgcaattcactttttttttggtaaatttagagttgtacagtcatcaccatcatccaattttagcacatttccatcacctcaaaaagatccctcatgcccatttgstgctattccacattataaccttccacccctggcaaccactaatctactttgtgtctgtatarattggctttttctgcatatttcatataaaaatggaacatataatatttggtcttaagtatttttgaaacatataattttgttgtggaaatagtagttgattttatctatgtctttatcaggcctttctctgtattgaattttcacattgtcaataccactcagaaacagtggttyatcctactgcagcaagttcattgaatactgttggcactggaatttatccctgctgtaaccaaaaggtyctycggtttgatcctactcagcttacaaagggctgtaaartgagggaccacatggttacmcttcgtgatcaaggtgaaggsggagatttgccgtcctgtcccactgctagaatgttggacgatttgcacaagtacagagatgtcattgttgtgcctttttcaaaagatacagttagtgatgttggggttggcctctgtgatgaaaagggtatagaatgtgatgttttactggagccaaatacaccatggggtcccaaaactggggagctcaatgctttcttgtcattgaaaaactggactctacaactgaaacaacagtcactgttttcagaagaagaagaatataccactggatctgaggtcactgaagatgaagttggagatgaagaagaagtatccaagaaacaaaggaaaaaggagaagccaaagaagttcactagacmaccaaaaaagcaggtatcttcaccctgtgcccagaggaaagaaaaggcattggagaaggtaactctgaattatctgktgktaaagtcatatggaaaaataagcatgtgagtatagccagaaaaaaataaaaagagtaatgaagacacatggaatgctagcaatgtaaaaatgaagttttttatagactgagattaaagatctctaagatatattgacaaatgagaaaaggaaggtgcagaaacgtatagtggtatagtatgctaccatttgtgtaaagtagatgggggaaatatataaataacttccttgtatatgcataaaatgtttctggaaggctacataagaactcgataaaattggttgcctctcaggaagggaactgaacgtgtaagggacagaagtgagagtcttttcattatatgtgccattataccttttgaattttaaaccaatattatttattcaaaaaattaaaaatagtcttttaaattaaaaataaatcatattttatgatatttaaaaataattcttatttctccatgcctttgaaggaaggggtaaaaaagccaggtaggaataagagaatagtaataaccaccattggctaaaagaaaaactgtgaatttcaaaaatgtgtgataggttgagtctgggttaagatccacagaattacattggacacattgtacattcatctttgtgttaagtagcacaggcatataagtgggttaattctaaaaaaaaattgtatcagctggtcttgagcttttgacctcgtgatctgcccgcctcagcctcctaaagtactgggattataggcgtgagccacaatgcctggccacatttatgtatttttttatattctgtatcagttagcctgtttattcacgtaaaagttttccaccatgtcttattatccatggtccataggtcatctataacacatataataaagtacatcattgctgaaaaaaaaaaaaaaaaaactcgagggggggtcccgtacccaattctcctnacatgcatcgtat

SEQ ID NO: 245 - DNA, 1835 bp, Homo sapiens
ggcacgagagccgccctgggtgtcagcggctcggctcccgcgcacgctccggccgtcgcgcagcctcggcacctgcaggtccgtgcgtcccgcggctggcgcccctgactccgtcccggccagggagggccatgatttccctcccggggcccctggtgaccaacttgctgcggtttttgttcctggggctgagtgccctcgcgcccccctcgcgggcccagctgcaactgcacttgcccgccaaccggttgcaggcggtggagggaggggaagtggtgcttccagcgtggtacaccttgcacggggaggtgtcttcatcccagccatgggaggtgccctttgtgatgtggttcttcaaacagaaagaaaaggaggatcaggtgttgtcctacatcaatggggtcacaacaagcaaacctggagtatccttggtctactccatgccctcccggaacctgtccctgcggctggagggtctccaggagaaagactctggcccctacagctgctccgtgaatgtgcaagacaaacaaggcaaatctaggggccacagcatcaaaaccttagaactcaatgtactggttcctccagctcctccatcctgccgtctccagggtgtgccccatgtgggggcaaacgtgaccctgagctgccagtctccaaggagtaagcccgctgtccaataccagtgggatcggcagcttccatccttccagactttctttgcaccagcattagatgtcatccgtgggtctttaagcctcaccaacctttcgtcttccatggctggagtctatgtctgcaaggcccacaatgaggtgggcactgcccaatgtaatgtgacgctggaagtgagcacagggcctggagctgcagtggttgctggagctgttgtgggtaccctggttggactggggttgctggctgggctggtcctcttgtaccaccgccggggcaaggccctggaggagccagccaatgatatcaaggaggatgccattgctccccggaccctgccctggcccaagagctcagacacaatctccaagaatgggaccctttcctctgtcacctccgcacgagccctccggccaccccatggccctcccaggcctggtgcattgacccccacgcccagtctctccagccaggccctgccctcaccaagactgcccacgacagatggggcccaccctcaaccaatatcccccatccctggtggggtttcttcctctggcttgagccgcatgggtgctgtgcctgtgatggtgcctgcccagagtcaagctggctctctggtatgatgaccccaccactcattggctaaaggatttggggtctctccttcctataagggtcacctctagcacagaggcctgagtcatgggaaagagtcacactcctgacccttagtactctgcccccacctctctttactgtgggaaaaccatctcagtaagacctaagtgtccaggagacagaaggagaagaggaagtggatctggaattgggaggagcctccacccacccctgactcctccttatgaagccagctgctgaaattagctactcaccaagagtgaggggcagagacttccagtcactgagtctcccaggcccccttgatctgtaccccacccctatctaacaccacccttggctcccactccagctccctgtattgatataacctgtcaggctggcttggttaggttttactggggcagaggatagggaatctcttattaaaactaacatgaaatatgtgttgttttcatttgcaaatttaaataaagatacataatgtttgtatgaaaaaaaaaaaaaaaaaaaaa

SEQ ID NO: 246 - DNA, 661 bp, Homo sapiens
gaattcggcacgaggggaaaaggatgctgaacgagagcagaaagcctctttcctttgcttcacgcctttccagtctttattttaaactcgggttccctttctgtggtcgcagcaacctttactccacctgcactgctgctcctgggggctccccaggcctccctctgcctttctacccagtggctgacgggatgcctgtcttgcctggacgcaccactgctctcctgtccctcaccttggcttttgctgtgccctgctctggggttgaagctggcccatgtgtcccccggagtcatggctgctcctcctgggaggcctctgtgtgcgtcacgtcttccacacctgggggcagctggcgagcccgtgctctgttcccctcggctgcttggcacagagytgcagcctgggaytctccgtggacccagactggggattttgccaggggggcgatgggaggagcaggtgctttgcctggcggctgtgtctgcatttctggacgccccagagcacagaagttgccggcactttgaggtcttcctcggcatgtgccagattacatgagtgacggctgggaatatgttttcttttttgtaatggaggcgtgtttcacatatagtaaagctcaccaaaaagtaaaaaaaaaaaaaaaaaaaaaactcga

SEQ ID NO: 247 - DNA, 1378 bp, Homo sapiens
agacgtgaaacatgtgaacactcaagtgaagcaaaagccttccatgattacccttttatgtcacctcggtaccctggaggtccaaggcccccattgaggatacctaatcaggcacttggaggtgtcccaggaagtcagccattactccccagtggaatggatccaactcgacaacaaggacatccaaatatgggtgggccaatgcagagaatgactcctccaagaggaatggtgcccttaggaccacagaactatggaggtgcaatgagacccccactgaatgctttaggtggccctggaatgcctggaatgaacatgggtccaggtggtggtagaccttggccaaacccaacaaatgccaattcaataccatactcctcagcatctcctgggaattatgtaggtcctccaggaggtggagggccaccaggaacacccatcatgcctagtccagcagattcaaccaactctggtgataacatgtatactttaatgaatgcagtacctcctggacctaacagacctaattttccaatgggycctgggtcagatggtcccatgggtggattaggaggaatggagtcacatcacatgaatggctctttaggctcaggagatatggacagtatttccaagaattctcccaataatatgagcctgagtaatcaaccgggcactccaagggatgatggcgaaatggggggaaatttcttaaatccttttcagagtgagagttactcccctagcatgacaatgagcgtgtgatccattaccaagtctcctcatgaaaaccacagtgagtcagcccttcacagaactactacggaagaaaattattcatcacagtgtacagttaaacaaaggaatctcagtcacaccaaaccaacctttttatttcctgctctctcccctcttttgtgaagaaagcgggtccaaatgtgattcaaacaactgtacggagtggcatattagaattgccctaaactgaactgcaaataattatgtgtgtatgtatatgtgtgggaaagagaatgtactgtatatgtgtatgttatacagacatatacacatacatacattgacccacaggacattgtaaaatattatcacatgacatcttaagtagaaataagtagggacttttattccatcctttttttcacgtttacattttaattattacaagttgctcctgccccctccctgaactattttgtgctgtgtatatcactgctttatataagttattttttaaggtgaactcagatgttatggttttgtaaatgtctgcaatcatggataggaataaaatcgcttatttgagagctttcattaaaaaaaaaaaaaaaaaacttcgagggggggcccggtacccaat

SEQ ID NO: 248 - DNA, 1366 bp, Homo sapiens
ggcacgaggttttcagcggtattattatttgtgagtctaacctagcgggtggtcctggctgtcaccggtgcttgggcgggatcaccaccagcggctgcccgtacttgggccgccacatgaggacctgggcatcgttggcattgggcttgaccagggcgctgggcgggatgggctcattcttgctcaggattttgggctggtcctgggcgatgggctcccgcagccgggcgcgctggcccaggggccggttggggttcacctcgatgctgagctgcatgcgccagtgcagcgtctgcaggatgatcatgtcgttggtggaggtgttggtggccaccagccaggtggtgaagctctggtcccggtagatgttggtgagcttggccacgttgctctcgctgacgggcacggcccatgtgacgctggggtaaaagttgtcattcatgctgatgatgaacttggagtccctcttggtggggcccacgatggtgcaggtctctgtggtgttgccgtaccaggggtagttcaccccgtccgagtcgctgatggcttggatcttgccctcctggaggtcggggagctcccagctggacatgccctgctcgccgtactggttgtagaactccatgtggctgcacgcctggatccagccaactacccaagtctccttcttggggatgggcggcatgaccacctgggccgaggcccggaagtggggtgtccggtagcggagcaccacgctggaggactcatcgatgctagtggggacggggtcgatggaggctttcacatcaatcaccgtgatcccttcccggaagactctggctttgcctccgatgctctgaatacagcccatggcatacaggagcgctctgatctccagggaaggccagcagtcacagaaaaaaccaggcattgaaaggacagaggctgcaggacccagtacagacggcgctgctctccaatctcaactctcaagaccgatatccataggatagaaaactcactgagtagactggggttgcatatatcactaccgcggcctgtttataaataaggattctgctgcatttcatgagccctgggctctctcttcttctcctcgcagtggacaaaaatcaccgatattctttgggttaaaaaaagtttgtagtttaatgaataattatgcggttctgacatccagcccttctgtgcctcacacgcggggacggcagctcgcagactctccctgaagtcttcggaggaagcaggcgagcgccggcagactcataaataaggaaggctctgtccccgcgcggccgcgccaccctcgcggcagaagcctgacttcctgccctccggccttccgcacgcgctcccggcacga

SEQ ID NO: 249 - DNA, 715 bp, Homo sapiens
ggcacgagctttccctcagtccaatcttgcaattgctatgtcagtttcagttcacaataataccagtgcagacatggctccttaagattttctccttttccctcacgcgggtcccaattctaaattcccaagggctgacatgattgacatttgccatagcctgaggagggagcatttccttttgtggtctttccttggtttgttttattgggcagtgaatggcaagtctgtctgtgtttctttgcttcaccccaaacaccttggcaaaaatgaaagccttctaatttagctgtgtcctcctttacttatgtcaggaagcctgagccataacctttgattaaaaaaatttttttttgttttttgtttttgagacagggtcttgctctgtcacccaggctgaaatgcagtggcacgactgcagctcattgcagccttgacctcactggagtgtagtggcatgactgcagctcactgcagtcccaagtagctggcacttacaggcaggtgccaccatgcctggctaatttttaaattttttgtagaaacagggtcttgctggctgggcacggtggctcacacctgtaatcccagcactttgggaggccaaagcgggcggatcacgaggtcaggagtttgagaccagcctggccaacatggtgaaatcctgtttccactaaaaataccaaaaaaaaaaaaaaaaaaaaaaaaactcgta

SEQ ID NO: 250 - DNA, 711 bp, Homo sapiens
ggcacgagcgaagaccctgttcggaccctgccccgattccagactcaggtagatcgtcggcataccctctaccgtggacaccaggcagccctggggctgatggagagagatcaggtatcccccagggagtaggggctaccttgaggggatgatagacctcccccactcccagtgkkactctggaaatatgaaggaactagggagtggaagagatttcagagctggggagaggagttcctcccttcaaagccagcaactgcctttggggaatgtcggggggtctctcctttctcctgcttgtgtkargtggtacacagtccccccttcacctggcgggaagctgtcccggacagactcatctcagctttcccttggggcaggatcgggggcagcagctccagcagaaacagcaggatctggagcaggaaggcctcgaggccacacaggggctgctggccggcgagtgggccccacccctctggragctgggcagcctcttccaggccttcgtgaagagggagagccaggcttatgcgtaagcttcatagcttctgctggcctggggtggacccaggacccctggggcctgggtgccctgagtggtggtaaagtggagcaatcccttcacgctccttggccatgttctgagcggccagcttggcctttgccttaataaatgtgctttattttcaaaaaaaaaaaaaaaaaact

SEQ ID NO: 251 - DNA, 875 bp, Homo sapiens
ggcacgagtgccagtgtcccgtgccctccagtgtcaaagatttggggcactgcccgtcgaaatggaaaggttggtgctcagcctctggagcctcacctgcagggcgtccccagctaacacccatccacgcaccacctccaggacgagaacccttgatgtcaaaaccaagtgcccagtggaggcggtgaagctctcggaaatgctgccacctgtgtgaggccgggtctgaactcgagggagtcggagctcagctgtcggtttaaagagacactgaggggaccgggctgccgccctcagcctgcattcctgtgcgcaatcgattccgcaatgacagcaccttactccttcctgcggcaggctcacccctgcctgtgggatgttgtgagaggaacatgagccagacaaagacttggctcagggctccgtggaacaagccaggatgcacggggagctgggggagcccccascctggggcagcccagcaggccgctgaacaaacaccccagaagccagcactgtggcagggtgctggggagatgcccctctgagccttcctcccccctcagacctgaatgcaccccacagttgggggctgcccctgcccactcccctggtaatgcataaaaggggaggggaaggttccctggggcttgagctccctctgtggaggtgaggaggggagattccgttcacatcccaggaggggcaaaatgactgatgtatttttatgtatctacacagagagtgcattttctctccagagatgctgtctggttaacaaaggaataacttaagaaattgattgattatcttaataaactgtgcaaacccaamrrraaaaaaaaaaaaaaaaaaaaaaaaaaaaaaactcgtag

SEQ ID NO: 252 - DNA, 890 bp, Homo sapiens
  misc_feature (818)..(819): n equals a,t,g, or c
  misc_feature (829)..(829): n equals a,t,g, or c
  misc_feature (859)..(859): n equals a,t,g, or c
  misc_feature (887)..(887): n equals a,t,g, or c
cttgtaaatgtttcttttcccttaaatacagataattcatttgtattgcttattttattatgagctacaacaaaaggacttcaggaacaagtaatgtattagtatggttcaagattgttgataggaactgtctcaaaaggatggtggttattttaaatataaatagctaatgggggtggtaggcctataaaattaaatgccttgtataaaatccaaaatgaatgcaaaattgttttcacttgtattgactttatgttgtatgattccaatctctgttctgtttggcacttgtatttaattcttcacctttgtaagacatttgtatattgtggatgtgttcattcaagctatttaatatctggcactgttaatacacagtactttattgtacagactgttttactgttttaattgtagttctgtgtactttttttggatggggctggcatgttttctttgtttcctggcaatacgacgtgggaatttcaatgcgttttgttgtagatgctaacgtgtcagaatcctttacattcaacttttctaagaaaagcattttcagtcttgtagtgtgtgcttacagtaactaattttgttgaaaatggtttcaagttattcaaatttgtacaggactgtaaagatttgttgacagcaaaatgttgaagaaaaaagcttatagaataaaagctataaagtatatattaggatctgcaaacaatgaagaattatgtaatatattgtacaaatgtaagcaaaggctctgaaataaaatgccatagtttgtgaaaaaaaaaaaaaaaaaaactcgagggggggcccgnnacccaatcgnccaaaagtgagtcgtattacaattcactgngccgtcgtttacaacgtcgtgactgggnaaa

SEQ ID NO: 253 - DNA, 1050 bp, Homo sapiens
ggcacgagcttttcagcatttgatggttgctgaccactcccactttcacagaaccctcatcaaacagccttctatgatcccaaatgcaactttctatcacatttttatgctcttcttctgcctactcatgaaaatgttggggccatccaggcttccatttttagccctcactttgtgcaggtttatactttattttcagttttgttatctgatctctgactccagcccagaccattcctgactccacatccacatattcatctggcttgctgaataacttctcttggatgtacatgtgtgccttagactcattatgtgcagacatgaagtcatcttttttctctccagacctgcttttcctctcgtattcttctttttggtgaatggtacaattattcagatggaacgtccaagtcaaaagtcgttctagaatcctccctcactcctaatgccacatccaattagtgaccaaatcctatcgattcggccttctaaatacagtcaaaacatttcattcaattcagcgtcactgtcattgctttaatgtagaccttctctattttaccatgatcaagcagaggccctgtatctatattcttctgccttccagtcttgtcatcctactccgcagttaatcccctgagtgctatcctagtgatccttctaacagtacagatttggtcatggattctccagcttgaaatacttcatgtcttttgtgggaacatggatggagatggaggctattatacttagcaaacaaatgcatgaacgaaaaccaaataccacatgttcttacttataagtgggagctaaatgctgacaactcatgaacacaaacaaatgaacagcaaacactggggtctacttgagggtggagtttgggaggagggagagaagcagaaaaggtaactattgggtactgaacttaatacctgggtgattaaataatctgttcaacaggcccccatgatatgagtttacctacgtaacaaaccttcacatgtatccccaaacctaaaataaaagttaaaaaaaaaaaaaaaaaaa

SEQ ID NO: 254 - DNA, 1161 bp, Homo sapiens
ggggaaacggagctctgggtgtgatatttcctctgcattttcctgtcggggtggtgaaataactggtttgaacccagtccactggactcgaaagctcatgctcagaagccccagggctccctctaactttcttggttgctgcaactcagagagcgctggaatggacccagggcatgctcctcatctcagcggttcaggttttcattcttctatctccatccttctatttaattctgtacttactaagacctgggggtacagggaggggcttggagcctatttgcccagctgctgaatggggaggttggagagatggatacttatggctccagtaccaggagccaactgtttcccttgacaactggggaaactgaggcccacagagccaaggccacttgcccgtggttacctaaagatgttaacgagaaatccgggtctggaactcagatccctttgtatcctgtttcggtgttggtgtagtttgttgctttccctaagatgagcccagatagggaaactgaagtgcctgggstcctggttgggtcttctgcggggagagaatggcgattcaactcccgtgtactgttgaacttgacacaaacacgctcacatcccaggctgcatacgtgttttgctttagaaatgacatgaagccttttgactatttttaagagaaaggcaatggctgtgatatttcccctgcacctccctctcggggccacttggttaaatgtcaggaaagggagagtatttcctggtcaggaacattcagagcttgctgggagctgaagttttgttttccattaagtaggtattcggggagtctatttccctctgcctcctctgtttccctggaarcttgcgcttgacagttgcagggaggaggggtttgagaatgagcagccgagatgcccacgtatcgcgtgcccgctctaggagtggcggggtggctatttttagccatcctgattcagtagaggcatttcagcgtttgttcaatatttaattatccatctgaaattggcccatgtggccttcagtttggaagcagctctctgtgctgtgatttcccagttgcataaataaggaagtcaagggaatctcaatagccctccaaataataataacgaaaaaaaaaaaaaaaaaactcgacggcacgta

SEQ ID NO: 255 - DNA, 1002 bp, Homo sapiens
ggcacgagcccagcggaagccaagccaccaggccccccagcgtccacgcggagcatgaacattgaggatggcgcgtgcccgcggctccccgtgccccccgctgccgcccggtaggatgtcctggccccacggggcattgctcttcctctggctcttctccccacccctgggggccggtggaggtggagtggccgtgacgtctgccgccggagggggctccccgccggccacctcctgccccgtggcctgctcctgcagcaaccaggccagccgggtgatctgcacacggagagacctggccgaggtcccagccagcatcccggtcaacacgcggtacctgaacctgcaagagaacggcatccaggtgatccggacggacacgttcaagcacctgcggcacctggagattctgcagctgagcaagaacctggtgcgcaagatcgaggtgggcgccttcaacgggctgcccagcctcaacacgctggagctttttgacaaccggctgaccacggtgcccacgcaggccttcgagtacctgtccaagctgcgggagctctggctgcggaacaaccccatcgagagcatcccctcctacgccttcaaccgcgtgccctcgctgcggcgcctggacctgggcgagctcaagcggctggaatacatctcggaggcggccttcgaggggctggtcaacctgcgctacctcaacctgggcatgtgcaacctcaaggacatccccaacctgacggccctggtgcgcctggaggagctggagctgtcgggcaaccggctggacctgatccgcccgggctccttccagggtctcaccagcctgcgcaagctgtggctcatgcacgcccaggtagccaccatcgagcgcaacgccttcgacgacctcaagtcgctggaggagctcaacctgtcccacaacaacctgatgtcgctgccccacgacctcttcacgcccctgcaccgcctcgagggggggcccggtacccaattcgc

SEQ ID NO: 256 - DNA, 515 bp, Homo sapiens
  misc_feature (3)..(4): n equals a,t,g, or c
  misc_feature (7)..(7): n equals a,t,g, or c
  misc_feature (20)..(20): n equals a,t,g, or c
tanntgnatccccccgggcntgccaggaattcggcacgagttacaactggtggaccacacaccaggcactaatcacctggtgaggatttggcatatccaccaaaaaatgcatccgatttaaccaacatctccaccagcgctacggactcctcccaattctgacatctcttgcagacaatactatgctctctacacactgtttagaaatggaaaggtgatctgcactgtatcttgggtttgttggctatgcttcctttgatgacatatattatacagtatatatatacatatatttwwwwwgttagagttctagccattttatttctccgcagggtcctttctcagacattactgcatgctgtatatggcgttagctgtgtgttgatcttctaaaagatgatagagtttactggtaattgtgtaatcagctcctgcctttttattttcttgggttatttacatgtcagagacatttataaaaagtgaaaggataaaaaaaaaaaaaaaaaactcga

SEQ ID NO: 257 - DNA, 1113 bp, Homo sapiens
  misc_feature (349)..(349): n equals a,t,g, or c
gttggtgttgagcacagctttaggcttagattcttcatcaactaggagaagctgtgcttcaatacagttattcgtttgcatggttcctaatgtgcttcactcaatttagcagaattttttttttaacctcttccttgacgctagctgcttgtgcaaatcacatcttggccgcctactcttcttcacttgctgacagatgtgtaggtgagaaaagtctcatagtcattgttcctgaaagaagcttccagacccacttctagggccagtgacatatgcaggaaatcagctgcttctgggccaggacagagctggtcttttttttagtgggggatggcgggcagtggggcangggacattcaaaatttattttccaacagacagatagcatcagcaggtacaactacaagggtatctacatagatcatacattcacaaggcattattagttcaacagtgagaaagccactcgtgggttttctgtaacaatatcccacttcatagtgtaaacaggtactattttgttcacttacaattccggaaggaagggcacaccttgcaggggggaagaaaaggggaatcctaaagtaaggtgcaacaattaagagacaacactttggctaacaatcttggatccacatttcagtcagggccttccacatagaggggaaagacttttctctcagaagttagaatctttcttcctcctttcttgttaaactgagagcagtgttttgtttgctcaatattacatgtacaaaaggagattagaagaaaatgcatcacaaaaccatcttgaacgttcagctcttcctgccaatacatcacaactcttaggttttagacggggcctgggaatacgtaagtgttttttcttttttttttttttaagtgaaagcaagtttattacgaaagcaaagggataaaagaatggctgctccataggcagagagcagcccagtaatcttaaaataggaaaatagacactatggctacaaaaaataaaaaataaatgaggtagataaaattttcacacccaggacttgcctgttccaacttcatagtcttcatgaaatattcatcaagaagacaaaaaaaaaaaaaaaaaacctcgta

SEQ ID NO: 258 - DNA, 1668 bp, Homo sapiens
aatttcgaacacccataaaattgtaaagaattgtacagtacattttaacatattkgcttgttacaayctatacatttwawgttttttaaccacttcaaagtaagtttcagacaccaacacattttttaaatgatccctaccattttttaaatgatccctaccaaaatggaaggctggtatcccaaggttttgttccatttctcaattctagtctgtgaaattgargtctgatgaccactcttaagrgggctgttcattagggkgcgggctgggcattatgagtgtgtttttcatgagkcagtggaaggaggggcttgttgtgagcagtgcatgagaaaaacggcttggctttgcttctttttccagctctgtggccttggtcaggttacgtctcttcagtatcgtaactgtaatgtggagataaagccttcattagttaggggcacacaccgcagtattccttaagtcatcttgatgacaagtgaatgcaaggcagctggtacctttcaggtagtagttgaattcaggtagtattgttcagtttttttttttcccttcatgttctaagaccagctgagaggcaaagttgtaccactgagctctagttgttgttacctaaaaagsccttgttttaaatttctgtgatacctaagaatttcaaatctgggttgtcatggattctttattctttttttctcccttaaaaagttacattttagatgaaatcccctttyttaaaatgggcaaagcaataattctacatcatttctccccttcccttccacttgtttagactaagatatgttagagagggaaagggtcgttgttttagtaaatactattgctgttgacatgttaatactattgctgttgacatgtttactgatgggctgtgttccataattttgttttaggtcttttgtttgaaacagtttactgtttttatcagttttggtccctaatttttcctaacctacagtttttctctgagtacatatggtttcattgtttgatctactttctatctatctgaatatgaacttctaggatcatgtttattctagtagatgatgacttaaagcctgcagtataggagggacaacgtcaactactgcatgtgcaataacaagcttgaagggaagctaaatgtttgttacaaatttaagacagtattttaatgccgtttgcatttttctaagaattttctataaagctaattctgktattttttgtctctaaattagggaactgtccaggtttattgctgccgggagactacactgcaaaatagataaagtgaatgaaatagtagaaaccaacaggtactctcatttctcagaataagggggcattcctaaattttaaaagtaggkcaactattgkcatggaataatgtgactggtaaataattcattttttcttgaatttatttatagacctgatagcaagaactggcagtaccaagaaactatcaagaaaggagatctgctactaaacagagttcaaaaactttccagagtaattaatatgtaaagccatgtaactaacaaaggatttgctttagagataattatttggaatttttatagcttacttcacaatgtgcccaggtcagctgtataaaataaatactgcattgttgttaaaaaaaaaaaaaaaaaactcgta

SEQ ID NO: 259 - DNA, 575 bp, Homo sapiens
ggcacgagtgcaggaattcgtgtgccggatttggttagctgagcccaccgagaggcgcctgcaggatgaaagctctctgtctcctcctcctccctgtcctggggctgttggtgtctagcaagaccctgtgctccatggaagaagccatcaatgagaggatccaggaggtcgccggctccctaatatttagggcaataagcagcattggcctggagtgccagagcgtcacctccaggggggacctggctacttgcccccgaggcttcgccgtcaccggctgcacttgtggctccgcctgtggctcgtgggatgtgcgcgccgagaccacatgtcactgccagtgcgcgggcatggactggaccggagcgcgctgctgtcgtgtgcagccctgaggtcgcgcgcagcgcgtgcacagcgcgggcggaggcggctccaggtccggaggggttgcgggggagctggaaataaacctggagatgatgatgatgatgatgatggaaaaaaaaaaaaaaaaaaaaaaaaaaaaaaaaaaaaaaaaaaaaaaaaaaaaaaaaaaaaaaaaaaaaaaaaaaaaa

SEQ ID NO: 260 - DNA, 1532 bp, Homo sapiens
  misc_feature (1412)..(1412): n equals a,t,g, or c
  misc_feature (1433)..(1433): n equals a,t,g, or c
  misc_feature (1446)..(1446): n equals a,t,g, or c
  misc_feature (1505)..(1505): n equals a,t,g, or c
gctggagcggtttcattgcctacattccgcattggaaaatagaagcaggcacaatgaagggaaaaggccgaggcatcagcgtgtgaagaccgcaaagacgatcccgagtacagttgtgaacagcattgctgctaggctcctcctgcagatcatctgaaatgaacctctcttattgatttttattggcctagagccaggagtactgcattcagttgactttcagggtaaaaagaaaacagtcctggttgttgtcatcataaacatatggaccagtgtgatggtgaaatgagatgaggctccgcaatggaactgtagccactgctttagcatttatcacttccttccttactttgtcttggtatactacatggcaaaatgggaaaggtaaggaaaatgactcggaaaatgtgcatgaaatgtactagggtttttgcttggttaaggtgcctaaatgcttaggtcaaataccctggcaatctgcatgttacatgctatctgctggcagtttctttctgatataaaaatgaaacagtattcttggacagaggacacagaatttctaattccagtggggcttgttttgctttcagtttcttataattgtacttggagaaacagatactgatcagtgttttatattctaaaagacagccaagttgaataataaagactttcgttttggcattttgttctttttactaaacataattaagtgtttaataagcttccttgtaccgagtgttgcataaaacacttaaaaggacacaattagtgccttcgtgagatttacatgctaattatgctaaygattgggtgctatgtagttaatgatttaaactgcatgcattgacagattactccttaggcaaaagtatttaagaagggataagtagaaattctgattggaatattaaaacattttttaaaaattaattatgkttagactgktgaaccgkgttatataattttaggataawggattwatttgctttttttttttttaagagaaactacttgaagtaaattcctacccatacttcttacttgtctcctttcctttgattaatctaaggaatgktgatgatgagaagaaagatggaaatgttgaggtggttgcatatttggtttgttagaatatctgtcatcacctgggctwtttgaagctgctgttgctgatgttgttttattgactcatgaagacaactgaaaagattgctttgtaaccttatttttttctgatgtgtgtttacatccatgtctatatatacatattgcatatgtatatatctgtatgtgcatgtatatgttaaaaatctgatataagtgaaaacatgctctgtgctttgaaacaaaaaaaaaaaaaaaaaactcgagggggggcccggtacccaattcgccctatagtgagtcgnattacaattcactggccgcgntttacaacgtcgngactgggaaaaccctggcgttacccaacttaatcgccttgcagcacatccccctttcgncagctggcgtaatagcgaagaggcccg

SEQ ID NO: 261 - DNA, 1192 bp, Homo sapiens
ggcacgagaagaagtgctgtggaaaccgtcaggccatgaaccaggctgaccctcggctcagagcagtgtgcttgtggactctcacatctgcagccatgagcagaggcgacaactgcacggatctactcgcactgggaatcccctccataacccaggcctggggactgtgggtcctcttaggggctgtgacgctgctatttctcatctcgctggctgcacacttgtcccagtggaccaggggccggagcaggagccatccggggcagggacgctctggagagtctgtggaagaggtcccgctgtatgggaacctgcattatctacagacaggacggctgtctcaagacccagagccagaccagcaggatccaactcttggaggccctgccagggctgcagaggaggtgatgtgctataccagcctgcagctgcggcctcctcagggtcggatccccggtcctggaacccccgtcaagtactcggaggtggtgctggactctgagccaaagtcccaggcctcgggccccgagccggagctctatgcctcagtatgtgcccagacccgcagggcccgggcctccttcccggatcaggcctatgccaacagccagcctgcagccagctgagatggagggcctggcacagcggggcgtgcactgccccagccccccgtagcaggggcatgactgtttcccaaccagcacccaaagacgggcgccattgccaagtcacaggatgtgatctaccccggacttcctatctgagcttcaagggagacatctcagggcaaagctttcgtgatggaggaggcaaagacagtagccccctccttatttcttttttctatctgttcctcttagcccccaaactcccaggttctcacttccttcttctggagtttaaccagatcctccccacccccgctccctcatagtctacccccacgcctcagtgtctcctcaggcacaggaagtgggcggtgggggaggggtaagggcctgacagtgggtgggtgggtatattcctcaggagtccacagactggagtggacctggaacttagagacgggagggacccgagcctggcttttgacctaagaaccctagcaggagaatacagtctccatcctgctgtctctgtcctgtccccaagttttcaaataaaactttccaaaaagtgaaaaaaaaaaaaa

SEQ ID NO: 262 - DNA, 1559 bp, Homo sapiens
  misc_feature (1445)..(1445): n equals a,t,g, or c
  misc_feature (1551)..(1551): n equals a,t,g, or c
atccagcagtggggagacagcgtgctgggcaggcgctgccgagaccttctcctgcagctctacctacagcggccggagctgcgggtgcccgtgcctgaggtcctactgcacagcgaaggggctgccagcagcagcgtctgcaagctggacggactcatccaccgcttcatcacgctccttgcggacaccagcgactcccgggcgttggagaaccgaggggcggatgccagcatggcctgccggaagctggcggtggcgcacccgctgctgctgctcaggcacctgcccatgatcgcggcgctcctgcacggccgcacccacctcaacttccaggagttccggcagcagaaccacctgagctgcttcctgcacgtgctgggcctgctggagctgctgcagccgcacgtgttccgcagcgagcaccagggggcgctgtgggactgccttctgtccttcatccgcctgctgctgaattacaggaagtcctcccgccatctggctgccttcatcaacaagtttgtgcagttcatccataagtacattacctacaatgccccagcagccatctccttcctgcagaagcacgccgacccgctccacgacctgtccttcgacaacagtgacctggtgatgctgaaatccctccttgcagggctcagcctgcccagcagggacgacaggaccgaccgaggcctggacgaagagggcgaggaggagagctcagccggctccttgcccctggtcagcgtctccctgttcacccctctgaccgcggccgagatggccccctacatgaaacggctttcccggggccaaacggtggaggatctgctggaggttctgagtgacatagacgagatgtcccggcggagacccgagatcctgagcttcttctcgaccaacctgcagcggctgatgagctcggccgaggagtgttgccgcaacctcgccttcagcctggccctgcgctccatgcagaacagccccagcattgcagccgctttcctgcccacgttcatgtactgcctgggcagccaggactttgaggtggtgcagacggccctccggaacctgcctgagtacgctctcctgtgccaagagcacgcggctgtgctgctccaccgggccttcctggtgggcatgtacggccagatggaccccagcgcgcagatctccgaggccctgaggatcctgcatatggaggccgtgatgtgagcctgtggcagccgacccccctccaagccccggcccgtcccgtccccggggatcctcgaggcaaagcccaggaagcgtgggcgttgctggtctgtccgaggaggtgagggcgccgagccctgaggccaggcaggcccaggagcaatactccgagccctggggtggctccgggccggccgctggcatcaggggccgtccagcaagccctcattcaccttctgggccacagncctgcgcggagcggcggatccccccgggcatggcctgggctggttttgaatgaaacgacctgaactgtcaaaaaaaaaaaaaaaaaaacccgrgggggggcccggnacccaatt

SEQ ID NO: 263 - DNA, 1021 bp, Homo sapiens
gtaattccttaaacataccatctgtcacagttaatctagatttgtaaataggtagtaatttatagaatttttaaagcgtaaaatccggtaatattaaaagataggtaaacctaggcctggaaagctgttatttggctaaaattgcacaggaggccatgaacagaggcaagtgccccagagactccactttcattcctaactgttctcaaattaatgctcatgattgagtattctcagtgcaactcgtagagtttgataagtaaaagttacatgcccctgttttcctagcatgatattcactgttatcaaagacaagaggcagaccattcattcattctcaaaacactgaatgccattctgtgcctagtgctatacaaggcatgggagattcagtgtgaataagtctttgctctccacctaacaagggacagttttaattatagattgtcttcctattaagtatgagttttagtaggcattaaaaatcgtaattagtttgataatatgagacccaaccctaacttgccagaagagtaatcagttcatgaaccattgatatttcctgtatatttcatgaatgtgacttcagtcattctagtgttaatactgtggaatgtcattggtgtagcaacgtgggttcaccaaaacacctttttatacaaaagacagatgygtgaattaaagagattaaaggatagagtattctgtttctttgttttgatttggcttttaggtattaaaataaggcccagatcactaaaaattagtaacagagggagacctctaatagatttaaagtcagttaattctctctgaaatttgatgttttcttctataaagaataactctaaaataggcatcttcccaggactttccattctcaggaaaagacctagttacgtataaaaaataacttctactgctttatgtagtcatataggtctgcctaaaataagaatttgtatttaataaataccaaaattttcaaatggtaaaaaaaaaaaaaaaaaaaagggggggc

SEQ ID NO: 264 - DNA, 1024 bp, Homo sapiens
  misc_feature (5)..(5): n equals a,t,g, or c
  misc_feature (14)..(14): n equals a,t,g, or c
  misc_feature (32)..(32): n equals a,t,g, or c
  misc_feature (713)..(713): n equals a,t,g, or c
gtggntcccccggntggccaggattcggcacngggcgctggccgccttccagctgctcaacctgactgggcaacgtggggctcttcctgcgctcggatcccagcatccgtggcgtgatgctggccggccgcggtctgggccagggctgggcttactgctaccaatgccaaagccaggtgccgccacgcagcggacactgctctgcctgccgcgtctgcatcctgcgtcgggaccaccactgccgmctgctgggccgctgcgtgggcttcggcaactaccggcccttcctgtgcctgctgcttcatgccgccggcgtcctgctccacgtctctgtgctgctgggccctgcactgtcggccctgctgcgagcccacacgcccctccacatggctgccctcctcctgcttccctggctcatgttgctcacaggcagagtgtctctggcacagtttgccttggccttcgtgacggacacgtgcgtggcgggtgcgctgctgtgcggggctkggctgctcttccatgggatgctgctgctgcggggccagaccacatgggagtgggctcggggccagcactcctatgacctgggtccctgccacaacctgcaggcagccctggggccccgctgggccctcgtctggctctggcccttcctggcctccccattgcctggggatgggatcaccttccagaccacagcagatgtgggacanacagcctcctgactccaggaagagccagagctgtgcagggaggaaggggtgagaggggggcccccacacctagactcagtaaggaagtcgggttggaccttaacatctgcattggacaactccaccccttccttggccttgcccctgcccgcctacactcctacgtgtccagggcttgggccgtgacttaggcagaggagtgcagaggagggtctggcaggggctgctcaggccgcctagctgcccctttgccaggttaataaagcactgacttgttaaaaaaaaaaaaaaaaaaaaaaagggcggccgct

SEQ ID NO: 265 - DNA, 621 bp, Homo sapiens
  misc_feature (488)..(488): n equals a,t,g, or c
  misc_feature (536)..(536): n equals a,t,g, or c
  misc_feature (539)..(539): n equals a,t,g, or c
  misc_feature (548)..(548): n equals a,t,g, or c
acagagtctcgctctgttgtccagcctgggcaacagagaaaacaaaaaggaaaacaaatgatgaaggtctgcagaaactgaaacccagacatgtgtctgccccctctatgtgggcatggttttgccagtgcttctaagtgcaggagaacatgtcacctgaggctagttttgcattcaggtccctggcttcgtttcttgttggtatgcctccccagatcgtccttcctgtatccatgtgaccagactgtatttgttgggactgtcgcagatcttggcttcttacagttcttcctgtccaaactccatcctgtccctcaggaacggggggaaaattctccgaatgtttttggttttttggctgcttggaatttacttctgccacctgctggtcatcactgtcctcactaagtggattctggctcccccgtacctcatggctcaaactaccactcctcagtcgctatattaaagcttatattttgctggantactgctaaatacaaaagaaagtccaatatgtttccattctgtagggnaanagggatgcnggcttaaaattctgagcaagggttttttggcagtgcagtgttggcactatggaaaacccttggtcccccggaa

SEQ ID NO: 266 - DNA, 884 bp, Homo sapiens
  misc_feature (307)..(307): n equals a,t,g, or c
  misc_feature (356)..(356): n equals a,t,g, or c
tcgacccacgcgtccgccggatggttgccacccctcctgctgtaggatggaagcagccatggagtgggagggaggcgcaataagacacccctccacagagcttggcatcatgggaagctggttctacctcttcctggctcctttgtttaaaggcctggctgggagccttccttttgggtgtctttctcttctccaaccaacagaaaagactgctcttcaaagtggagggtcttcatgaaacacagctgccaggagcccaggcacaggctgggggcctggaaaaaggagggcacacaggaggaggganggagctggtaggggagatgctgggctttacctaagtctcgaaacaaggnggcagaataggcagaggcctctccgttccaggcccatttttgacaratggcgggacggaaatgcaatagaccagcctgcaaraaaracatgtgttttgatgacaggcagtgtggccgggtggaacaagcacaggccttggaatcccaatggactgaatcagaaccctaggcctgccatctgtcagccgggtgacctgggtcaattttagcctctaaaagcctcagtctccttatctgcaaaatgaggcttgtgatacctgttttgaagggttgctgagaaaattaaagataagggtatccaaaatagtctacggccataccaccctgaacgtgcctaatctcgtaagctaagcagggtcaggcctggttagtacctggatggggagagtatggaaaacatacctgcccgcagttggagttggactctgtcttaacagtagcgtggcacacagaaggcactcagtaaatacttgttgaataaatgaagtagcgatttggtgtgaaaaaaaaaaaaaaaaaaaaaaaaac

SEQ ID NO: 267 - DNA, 1231 bp, Homo sapiens
ggcacgagtgaatgtcgaggagttccaggatctctggcctcagttgtccttggttattgatgggggacaaattggggatggccagagccccgagtgtcgccttggctcaactgtggttgatttgtctgtgcccggaaagtttggcatcattcgtccaggctgtgccctggaaagtactacagccatcctccaacagaagtacggactgctcccctcacatgcgtcctacctgtgaaactctgggaagcaggaaggcccaagacctggtgctggatactatgtgtctgtccactgacgactgtcaaggcctcatttgcagaggccaccggagctagggcactagcctgacttttaaggcagtgtgtctttctgagcactgtagaccaagcccttggagctgctggtttagccttgcacctggggaaaggatgtatttatttgtattttcatatatcagccaaaagctgaatggaaaagttaagaacattcctaggtggccttattctaataagtttcttctgtctgttttgtttttcaattgaaaagtaattaaataacagattagaatctagtgagagcctcctctctggtgggtggtggcatttaaggtcaaaccagccagaagtgctggtgctgtttaaaaagtctcaggtggctgcgtgtggtggctcatgcctgtaatcccaacattctgggaggcccaggcgggagaactgcttgagccccaggagttcagaatcagcctgggcaacatagcaatactccgtctcataaaaattaataaataaaaagtctcaggtgaccaaaggctcctgaagctagaaccaggtttggataaagattgaagagccacaggccactcttccctctgagccattgggcctagtggtgtcatgtattgtaattgctcgcagggagagcagtctttttggtgtaatagtgggatgtctgcttagttggcaggggttcagtccaaatggaagaatattgggaaataaacctccactatcctttatagccagggacttttttcctatttattcataaaataaattatagttaattatacccataacacctttatttaaatccagtgttctccgcagccttttgtctatttatatgtgtaccaagtgttaaacataattattattgggcatttgaactttgtttttctttaaagaaatgctgctattaaacatatttgtaaatggaaaaaaaaaaaaaaaaa

SEQ ID NO: 268 - DNA, 1223 bp, Homo sapiens
  misc_feature (1204)..(1204): n equals a,t,g, or c
  misc_feature (1206)..(1206): n equals a,t,g, or c
gcttagctcgaaattaaccctcactaaagggaacaaaagctggagctccaccgcggtggcggccgctctagaactagtggatcccccgggctgywkgaattcggcacgagctgctgtctgtgcttcgggatcctgccctccagaagtcctccaaggcttggtacttgctgcgtgtccaggtcctgcagctggtggcagcttaccttagcctcccgtcaaacaacctctcacactccctgtgggagcagctctgtgcccaaggctggcagacacctgagatagctctcatagactcccataagctcctccgaagcatcatcctcctgctgatgggcagtgacattctctcaactcagaaagcagctgtggagacatcgtttttggactatggtgaaaatctggtacaaaaatggcaggttctttcagaggtgctgagctgctcagagaagctggtctgccacctgggccgcctgggtagtgtgagtgaagccaaggccttttgcttggaggccctaaaacttacaacaaagctgcagataccacgccagtgtgccctgttcctggtgctgaagggcgagctggagctggcccgcaatgacattgatctctgtcagtcggacctgcagcaggttctgttcttgcttgagtcttgcacagagtttggtggggtgactcagcacctggactctgtgaagaaggtccacctgcagaaggggaagcagcaggcccaggtcccctgtcctccacagctcccagaggaggagctcttcctaagaggccctgctctagagctggtgccactgtggccaaggagcctggccccatagcaccttctacaaactcctccccagtcttgaaaaccaagccccagcccatacccaacttcctgtcccattcacccacctgtgactgctcgctctgcgccagccctgtcctcacagcagtctgtctgcgctgggtattggtcacggcaggggtgaggctggccatgggccaccaagcccagggtctggatctgctgcaggtcgtgctgaagggctgtcctgaagccgctgagcgcctcacccaagctctccaagcttccctgaatcataaaacacccccctccttggttccaagcctcttggatgagatttggctaagcatacacactgttgcactggagggcctgaaccagccatcaaacgagagcctgcagaaggtncncagtaaggctgaagttt

SEQ ID NO: 269 - DNA, 1494 bp, Homo sapiens
gtcgacccacgcgtccggcggcggcaggcgcgggcgagggccacggggagaggagacgcagccccgcgggtggcacgctcggccgggccccggcccgcgctcaacgggcgcgatgctcttctcgctccgggagctggtgcagtggctaggcttcgccaccttcgagatcttcgtgcacctgctggccctgttggtgttctctgtgctgctggcactgcgtgtggatggcctggtcccgggcctctcctggtggaacgtgttcgtgcctttcttcgccgctgacgggctcagcacctacttcaccaccatcgtgtccgtgcgcctcttccaggatggagagaagcggctggcggtgctccgcyttttctgggtacttacggtcctgagtctcaagttcgtcttcgagatgctgttgtgccagaagctggcggagcagactcgggagctctggttcggcctcattacgtccccgctcttcattctcctgcagctgctcatgatccgcgcctgtcgggtcaactagcctcaccgaggtgccggagagggagcgctggacaactagaatgttgacctcgagccgaggccctacttgcagcgcaccggaggagaggctctctagtctgaaggcaccgccggcttgcgccgagctgagtgccgggtttccctattccaatcctgtttgaaatggtttcttcagcagggcttaaaagagcagccttcatcctgaaaatgtatttccttttgtttaatgctttgagtagataatcctgaattgaggtcatgaggaggccccccaggccagacagtcctgaacccctctgacacttggaaactgaatataagtaaaatgtccaggtggactctgagtatttcctgtggatcctgggaaagtactgttgcacaaaggctgcaaagctggactcaggaatgtcctccaaccagcagcgctgacctaagagctccctgtgccgtctatccagaccagacttcggtagatgcctttgttagatctatcacatgtaaacgagcttgtatctccttccctgtgccacgagagagattggctttttattccagtctaggcagagacagaagaatgttgaataagagcacgattagagtcctgtctggttatctgttgcccaagaaaagaactctgctgtccaggcactgcttggcttactatcccagcaaagactgcagttttgtggacttttgaccaccttgggctggcactcttagcacacctgagacagatttaagcctccctaagagactgaagagaggaacaggtgtcagatactcataggcactgagatctacaaatgggaagcttgtgagtggcccatctttgttggcctacgaactttggtttgatgccagtcaggtgccacatgagaacctttgctgagatgcaaataaagtaagagaatgttttcctgaaaaaaaaaaaaaaaaaaaaaaaaaaaaaaaaaaaaaaaaaaaagggcggcc

SEQ ID NO: 270 - DNA, 1216 bp, Homo sapiens
ataactcaggcccggtgcccagagcccaggaggaggcagtggccaggaaggcacaggcctgagaagtctgcggctgagctgggagcaaatcccccaccccctacctgggggacagggtgcagcggccatggctacagcaagacccccctggatgtgggtgctctgtgctctgatcacagccttgcttctgggggtcacagagcatgttctcgccaacaatgatgtttcctgtgaccacccctctaacaccgtgccctctgggagcaaccaggacctgggagctggggccggggaagacgcccggtcggatgacagcagcagccgcatcatcaatggatccgactgcgatatgcacacccagccgtggcaggccgcgctgttgctaaggcccaaccagctctactgcggggcggtgttggtgcatccacagtggctgctcacggccgcccactgcaggaagaaagttttcagagtccgtctcggccactactccctgtcaccagtttatgaatctgggcagcagatgttccagggggtcaaatccatcccccaccctggctactcccaccctggccactctaacgacctcatgctcatcaaactgaacagaagaattcgtcccactaaagatgtcagacccatcaacgtctcctctcattgtccctctgctgggacaaagtgcttggtgtctggctgggggacaaccaagagcccccaagtgcacttccctaaggtcctccagtgcttgaatatcagcgtgctaagtcagaaaaggtgcgaggatgcttacccgagacagatagatgacaccatgttctgcgccggtgacaaagcaggtagagactcctgccagggtgattctggggggcctgtggtctgcaatggctccctgcagggactcgtgtcctggggagattacccttgtgcccggcccaacagaccgggtgtctacacgaacctctgcaagttcaccaagtggatccaggaaaccatccaggccaactcctgagtcatcccaggactcagcacaccggcatccccacctgctgcagggacagccctgacactcctttcagaccctcattccttcccagagactgttgagaatgttcatctctccagcccctgaccccatgtctcctggactcagggtctgcttcccccacattgggctgaccgtgtctctctagttgaaccctgggaacaatttccaaaa

SEQ ID NO: 271 - DNA, 859 bp, Homo sapiens
  misc_feature (27)..(27): n equals a,t,g, or c
ccgggtcgacccacgcgtccggcagangcgggactgtcgtctgggggagccgcccaggaggctcctcaggccgaccccagaccctggctggccaggatgaagtatctccggcaccggcggcccaatgccaccctcattctggccatcggcgctttcaccctcctcctcttcagtctgctagtgtcaccacccacctgcaaggtccaggagcagccaccggcgatccccgaggccctggcctggcccactccacccacccgcccagccccggccccgtgccatgccaacacctctatggtcacccacccggacttcgccacgcagccgcagcacgttcagaacttcctcctgtacagacactgccgccactttcccctgctgcaggacgtgcccccctctaagtgcgcgcagccggtcttcctgctgctggtgatcaagtcctcccctagcaactatgtgcgccgcgagctgctgcggcgcacgtggggccgcgagcgcaaggtacggggtttgcagctgcgcctcctcttcctggtgggcacagcctccaacccgcacgaggcccgcaaggtcaaccggctgctggagctggaggcacagactcacggagacatcctgcagtgggacttccacgactccttcttcaacctcacgctcaagcaggtgcgctggactggggtcacctgatcggggccacctgtccttcttgtccaaattaccactccactccagcctgggcaacaaaagcgaaaactccatctccaaaaaaataataataataataataaaataaaaatcacacaaaggccaaaaaaaaaaaaaaaaaaaaaaaaaaaaaaaaaaaaaaaaaaaaaaaaaa

SEQ ID NO: 272 - DNA, 1238 bp, Homo sapiens
ccctcacatcagggaaaatgaccttcactgctgttaacagtaatgkgtccctttcattttctggatcaagccttctcagcggtgggtctggatgtgggtaaactaaggtaaaggggatgatattccacaaactaattatgcacacagaaaatctgtggagcctatcagaccccaagtgtcttgaaatgtttgtagaaacccactaaaatgccccttctctgggtgtgggcccttattgcagctgtctcacagcctgagctgtggtacagagaaatgggggttctccttttattttcattttttttccccaatggcagcttttctcccgttgttttaccttcctatttcccaaacagttcctcttattttgtcttttgcaccagtttctggaggcccttgtcatttcaaaaaggatagtctcttttcttactctggcaaacctgtgagtgattccacaaagatacagtattacttagctawctgaattatgatagaaaaggtcctagttaggttcctatataaagcatttggaagatgaccttgttgcccttgaaacttgaaaatagggattctggggtgaggatacaaagacattgtcttgcatatccataagcaggtcttagagcattattccaaactctagctgtttcagtagttctatgaggattgcaagtcataggtgtgtgtggcatatcagtccatctccctcatctccattctcagtttcttccccacaaaatttggaatcaaagcttttatgacgtttgccaattgcagaacttcttcagctaaggttaatttgacgctatgataaaactgagagatgtcaaaaagcctcttagaaattttaatcttgaaagacttttcagggtatctcattttttaggtgggggtggcaggtgtatttcttttttaacaaataaaaggcatttaagtaaaactaaaatgaaaaaagtaggccttctgacattgtgtacttggtggttctgtccctctgcctgtaacaaatctcatttttgttaccaagaactgtatgaaagaagtaaatccaccccgattctgtatgattaattccatctgtgtttgtcatttctgactggaaaacttcttactccataccttgttcgatatggaggacaaataattggattgtctgataagtctgccaataaactatccagaaatagcaagtgtaaaaaaaaaaaaaaaaaaaaaaaaaaaaaaaaaaaagggcggcc

SEQ ID NO: 273 - DNA, 1189 bp, Homo sapiens
gcgtccgctgggctggaacagcacagaacccacagggctgccgtccacactctcccggtcagagtcctgggaccacatggggacgctgccatggcttcttgccttcttcattctgggtctccaggcttgggatactcccaccatcgtctcccgcaaggagtggggggcaagaccgctcgcctgcagggccctgctgaccctgcctgtggcctacatcatcacagaccagctcccagggatgcagtgccagcagcagagcgtttgcagccagatgctgcgggggttgcagtcccattccgtctacaccataggctggtgcgacgtggcgtacaacttcctggttggggatgatggcagggtgtatgaaggtgttggctggaacatccaaggcttgcacacccagggctacaacaacatttccctgggcatcgccttctttggcaataagataagcagcagtcccagccctgctgccttatcagctgcagagggtctgatctcctatgccatccagaagggtcacctgtcgcccaggtatattcagccacttcttctgaaagaagagacctgcctggaccctcaacatccagtgatgcccaggaaggtttgccccaacatcatcaaacgatctgcttgggaagccagagagacacactgccctaaaatgaacctcccagccaaatatgtcatcatcatccacaccgctggcacaagctgcactgtatccacagactgccagactgtcgtccgaaacatacagtcctttcacatggacacacggaacttttgtgacattggatatcaataaggccaggcgtggcggcgattacgtctgtaatcccaggactttgggaggccaaggcgggcagatcacttcaggccaggaattcaagagcagcctggccaatatggcgaaactctgtctctactgaaaacaaacaaacaaacaaacaaacaaacaaagaaacaacaaaaattagccgggtgtggtggcacacgcctgtagtcccagctactcaggaggctgaggcataagaattgcttgaaccctggaggcggaggttgcagtgagctgagattgggccaccgcactccagtctgggagacagagtgagactgtctcaaaacaacaacaaaaaaatccctaacataatctcaaaaaaaaaaaaaaaaaaaaaaaaaaaaaaaa

SEQ ID NO: 274 - DNA, 496 bp, Homo sapiens
tcgacccacgcgtccgaactgacacaatgaaactgtcaggcatgtttctgctcctctctctggctcttttctgctttttaacaggtgtcttcagtcagggaggacaggttgactgtggtgagttccaggacaccaaggtctactgcactcgggaatctaacccacactgtggctctgatggccagacatatggcaataaatgtgccttctgtaaggccatagtgaaaagtggtggaaagattagcctaaagcatcctggaaaatgctgagttaaagccaatgtttcttggtgacttgccagcttttgcagccttcttttctcacttctgcttatacttttgctggtggattcctttaattcataaagacatacctactctgcctgggtcttgaggagttcaatgtatgtctatttctcttgattcacttgtcaataaagtacattctgcaaaagcaaaaaaaaaaaaaaaaaaaaaaaaaaaaaaaaaaaaaaaaa

SEQ ID NO: 275 - DNA, 3153 bp, Homo sapiens
  misc_feature (1)..(1): n equals a,t,g, or c
  misc_feature (2584)..(2584): n equals a,t,g, or c
  misc_feature (2590)..(2590): n equals a,t,g, or c
  misc_feature (3153)..(3153): n equals a,t,g, or c
nggccgtgggtgtacgcggcgcagcgcggcagtcctgatggcccggcatgggttaccgctgctgcccctgctgtcgctcctggtcggcgcgtggctcaagctaggaaatggacaggctactagcatggtccaactgcagggtgggagattcctgatgggaacaaattctccagacagcagagatggtgaagggcctgtgcgggaggcgacagtgaaaccctttgccatcgacatatttcctgtcaccaacaaagatttcagggattttgtcagggagaaaaagtatcggacagaagctgagatgtttggatggagctttgtctttgaggactttgtctctgatgagctgagaaacaaagccacccagccaatgaagtctgtactctggtggcttccagtggaaaaggcattttggaggcagcctgcaggtcctggctctggcatccgagagagactggagcacccagtgttacacgtgagctggaatgacgcccgtgcctactgtgcttggcggggaaaacgactgcccacggaggaagagtgggagtttgccgcccgagggggcttgaagggtcaagtttacccatgggggaactggttccagccaaaccgcaccaacctgtggcagggaaagttccccaagggagacaaagctgaggatggcttccatggagtctccccagtgaatgctttccccgcccagaacaactacgggctctatgacctcctggggaacgtgtgggagtggacagcatcaccgtaccaggctgctgagcaggacatgcgcgtcctccggggggcatcctggatcgacacagctgatggctctgccaatcaccgggcccgggtcaccaccaggatgggcaacactccagattcagcctcagacaacctcggtttccgctgtgctgcagacgcaggccggccgccaggggagctgtaagcagccgggtggtgacaaggagaaaagccttctagggtcactgtcattccctggccatgttgcaaacagcgcaattccaagctcgagagcttcagcctcaggaaagaacttccccttccctgtctcccatccctctgtggcaggcgcctctcaccagggcaggagaggactcagcctcctgtgttttggagaaggggcccaatgtgtgttgacgatggctgggggccaggtgtttctgttagaggccaagtattattgacacaggattgcaaacacacaaacaattggaacagagcactctgaaaggccattttttaagcattttaaaatctattctctccccctttctccctggatgattcaggaagctgacattgtttcctcaaggcagaattttcctggttctgttttctcagccagttgctgtggaaggagaatgctttctttgtggcctcatctgtggtttcgtgtccctctgaaggaaactagtttccactgtgtaacaggcagacatgtaactatttaaagcacagttcagtcctaaaagggtctgggagaaccagatgatgtactaggtgaagcattgcattgtgggaatcacaaagcaaatagtactccagaaagacaaatatcagaagcttcctattcttttttttttttttttttttttgagacagggtctttctctgttgcccaggctagagtgcactggtgatcacggctcactctagccttgaattcctgggcccaagcaattctcccacctcagcctcctgagtagctgggactacaagtgtgcaccaccatgcctggctaattttttgaatttttgtagtgatgggatctcgctctgttgcccagggtggtctcgaactcctggcctcaagcgatcctcccacctcgacctcccaaagtgctgggattacaggtgtgagccacctcgcctgggcccccttctccatatgcctccaaaaacatgtccctggagagtagcctgctcccacactgtcactggatgtcatggggccaataaaatctcctgcaattgtgtatctcagacatttgtgtctttgatcctcaccctgtgaccctaaagggaagaaagcctgagtgtcaagtaactctgggcctcccctaaagagaaatggagatggtggctcatctaggaagtagaggagcagggggttcctggttctcaggccacgtgtgatctctgcccacccagggcctgccccagcctgcaggtattgctgtgtggtgggaacacccacttcccttgtgcacagcctttgagaggggatcgtggcctcagttccaggggttcctggccagggccaagtgctccttctgcagaggcctgcacgcatctcacccctttgacttgtatttccatggcttcccctccccacctgccccctagccctccctgactggccagcccctcagtagtcctcctcggccagggagaggagcacggccttgggtgtgttctcgaaaagggctgcccggttctgctgctgccccttcttcacccagtggccatagattcggaaagcgtaggcgtcgatgagccggcgcagaggccggagggcataggggtctcggatgacgatctcccgggtcacaggcttcacccggcgntactgntagtagatccgcactgaagccagcacggtcagagcgatcaccttgaacttcccccgggggctgaagtgccgcacttcctctaccaagtactgctggaagaaggggtgtgccaaggcctcttccgctgtgtagcggttctggggttgcaccaccaggaatcgggagaccaggtccttcacggtgtccgagtaatcatcccactcgggcgagccaaactggtagttgccgctcatgatcatcctcagcatcagcatctgcttccggtgccagaagggcggggagccggccagcagcgtgtacatgatgacgccagtgctccacatgtccacctctttcccgtagcccgggtggtcctcattcatggagcactcgataatctcaggggccaggtaactgggggtcccgcagacctctcgcagcctctctcccggctccagctggcaggaaaagccaaagtctgtgagcttgatgttcatgttgtcatccaagagaatgttctcgggcttcaggtcccggtgcacgatgttgagtttgtgcaaggtgcagatcacctccagcagagn

SEQ ID NO: 276 - DNA, 686 bp, Homo sapiens
tcgacccacgcgtccgaactgccaaaagctggtgattctgggacaggccttcactttggagccacgggatggggtgggggagccccatgggcctgggaaggagggtgctgtggagggggctgcagggctgaccagcaggcagcctcatctggtcgggggcgggggcggcaggagcagaagcggggtctccgtccttgggactgtcctggttggccacgggccctgaggatgcacggtgcctggggctcctgtgccggtgggcggggggcatgctggcctctgagcgatcaggcgaggccagcgagggtgtgcttgcaaattcaagcaataagaggggggttcctgggggcttccagcccaggctagaagcccccatggcttctggcagctggacatcagccccaggtattggggtgattttggtcatgacagtgtgcctgtcccactgttacacgcatgaatgggggttatggggtgggggtgggactcaaggcttgaccgactcctagtggacctgatgtgaaattcctgtcaaacaaacaccacttttcaatggtttgctaggagtatttctgtattgaaagtttctaattatgctttttaaaaaaatactaaaaataaaggttcaagctgccaaaaaaaaaaaaaaaaaaaaaaaaaaaaaaaaaaaaaaaaaaaaaaaaaaa

SEQ ID NO: 277 - DNA, 2352 bp, Homo sapiens
  misc_feature (1)..(1): n equals a,t,g, or c
ncaggcagtgagactggctcgggcgggccgggacgcgtcgttgcagcagcggctcccagctcccagccaggattccgcgcgccccttcacgcgccctgctcctgaacttcagctcctgcacagtcctccccaccgcaaggctcaaggcgccgccggcgtggaccgcgcacggcctctaggtctcctcgccaggacagcaacctctcccctggccctcatgggcaccgtcagctccaggcggtcctggtggccgctgccactgctgctgctgctgctgctgctcctgggtcccgcgggcgcccgtgcgcaggaggacgaggacggcgactacgaggagctggtgctagccttgcgttccgaggaggacggcctggccgaagcacccgagcacggaaccacagccaccttccaccgctgcgccaaggatccgtggaggttgcctggcacctacgtggtggtgctgaaggaggagacccacctctcgcagtcagagcgcactgcccgccgcctgcaggcccaggctgcccgccggggatacctcaccaagatcctgcatgtcttccatggccttcttcctggcttcctggtgaagatgagtggcgacctgctggagctggccttgaagttgccccatgtcgactacatcgaggaggactcctctgtctttgcccagagcatcccgtggaacctggagcggattacccctccacggtaccgggcggatgaataccagccccccgacggaggcagcctggtggaggtgtatctcctagacaccagcatacagagtgaccaccgggaaatcgagggcagggtcatggtcaccgacttcgagaatgtgcccgaggaggacgggacccgcttccacagacaggccagcaagtgtgacagtcatggcacccacctggcaggggtggtcagcggccgggatgccggcgtggccaagggtgccagcatgcgcagcctgcgcgtgctcaactgccaagggaagggcacggttagcggcaccctcataggcctggagtttattcggaaaagccagctggtccagcctgtggggccactggtggtgctgctgcccctggcgggtgggtacagccgcgtcctcaacgccgcctgccagcgcctggcgagggctggggtcgtgctggtcaccgctgccggcaacttccgggacgatgcctgcctctactccccagcctcagctcccgaggtcatcacagttggggccaccaatgcccaggaccagccggtgaccctggggactttggggaccaactttggccgctgtgtggacctctttgccccaggggaggacatcattggtgcctccagcgactgcagcacctgctttgtgtcacagagtgggacatcacaggctgctgcccacgtggctggcattgcagccatgatgctgtctgccgagccggagctcaccctggccgagttgaggcagagactgatccacttctctgccaaagatgtcatcaatgaggcctggttccctgaggaccagcgggtactgacccccaacctggtggccgccctgccccccagcacccatggggcaggttggcagctgttttgcaggactgtgtggtcagcacactcggggcctacacggatggccacagccatcgcccgctgcgccccagatgaggagctgctgagctgctccagtttctccaggagtgggaagcggcggggcgagcgcatggaggcccaagggggcaagctggtctgccgggcccacaacgcttttgggggtgagggtgtctacgccattgccaggtgctgcctgctaccccaggccaactgcagcgtccacacagctccaccagctgaggccagcatggggacccgtgtccactgccaccaacagggccacgtcctcacaggctgcagctcccactgggaggtggaggaccttggcacccacaagccgcctgtgctgaggccacgaggtcagcccaaccagtgcgtgggccacagggaggccagcatccacgcttcctgctgccatgccccaggtctggaatgcaaagtcaaggagcatggaatcccggcccctcaggagcaggtgaccgtggcctgcgaggagggctggaccctgactggctgcagtgccctccctgggacctcccacgtcctgggggcctacgccgtagacaacacgtgtgtagtcaggagccgggacgtcagcactacaggcagcaccagcgaagaggccgtgacagccgttgccatctgctgccggagccggcacctggcgcaggcctcccaggagctccagtgacagccccatcccaggatgggtgtctggggagggtcaagggctggggctgagcttta

SEQ ID NO: 278 - DNA, 1105 bp, Homo sapiens
  misc_feature (797)..(797): n equals a,t,g, or c
gggggaaaaaaggacacgttgaattctgttgctttaaatgtatatttttttattgtgctaaaatgcacagaacataaaatttgccattagtaacactgagtacattcacagtgtcgtgcaaccatcagcactgtctagcgccagaactttttcatcaccccaaagggaaaccccgtatccatgaaggactcactccccattcgccctctccagcccttggcagccaccagaatgctttctgtctccataaattcatttttaataagtgcaattctgtgtgactttaaaataaataaacatgagcacgatgagttgcttattggaaggatatccatgcggggaggccggcgtgtggagtgcgtargcctccggacgggcaggagttgaaggggcgtggatgtgccgccctctcctccccttgctctttccttggggtcactgcctgagtatccctctttgcaaatggccccaaataatgtctcagcccccacgtctgcatcgcctcctagcttcaggaccctccaccaaaaaacattccaagcttcagactcactcctgggaaaattccaatggcctcactctcccttttgagccagccagatcccatggcctgtggcgggctgcctttgagtcctgagcacctgtgagytagggaagcaggacaggcacacccagggaaggggaagagtcgtcgtcagtcacagtaattgatatctttggaatcgtctaagagatacttagcgtgtgcctaaaacattcatttctttttttgtttgttttttgwgacgaagtctcgntctgtcgcccaggctggagtgcagtggcgtgatctcagctcaccgcaacctcctcctcccgggttcaagcgattctcctgcctcagcctcctgagtggctgggactgcaggcacacactaccacgcctggctagttttttgtatwtttagkggagacggggtttcactatgttggccaggctggtctcaaactcctgacctcgtgatctgcctacctcggcctcccaaagtggtgggattacaggcatgagccactgcacccagccaactagtcttaaaaaaaaaaaaaaaaaaaaaagggcggccgc

SEQ ID NO: 279 - DNA, 2496 bp, Homo sapiens
  misc_feature (2340)..(2340): n equals a,t,g, or c
  misc_feature (2373)..(2373): n equals a,t,g, or c
ggccttacctactagcggaatcgactgaagagacgcctgccagtgcgggaggtaggaagctcgatccccaaagaaaagagcgagtgggcaggcagctgcgagacagaaccggagtgtgcagggtccctagaggccggttcctggtctgtgctgctctcctggaagccatggtacaggcagagctcagggcgatccccaggtgagggcagcggctctgcctgggattccaccgcagtacaaccgggtagatgcggggtggagaagaaaggatgttgcctgcactgctcgccaatagcaccctgagaggctacatttgcagaagcagcagcagcagaagacacagcgccggtccaggaggcggctcgagctgttcgtaaagtcgcccgacagctttttctccgtagtatgcgagttgacaaaacagccagagaacagggctccccattacaatcttttcgagatcttttcccttgctaaccggatctgatttgtgcgaaaacatgccttgcacttgtacctggaggaactggagacagtggattcgacctttagtagcggtcatctacctggtgtcaatagtggttgcggttcccctatgcgtgtgggaattacagaaactggaggttggaatacacaccaaggcttggtttattgctggaatctttttgctgttgactattcctatatcactgtgggtgatattgcaacacttagtgcattatacacaacctgaactacaaaaaccaataataaggattctttggatggtacctatttacagtttagatagttggatagctttgaaatatcccggaattgcaatatatgtggatacctgcagagaatgctatgaagcttatgtaatttacaactttatgggattccttaccaattatctaactaaccggtatccaaatctggtattaatccttgaagccaaagatcaacagaaacatttccctcctttatgttgctgtccaccatgggctatgggagaagtattgctgtttaggtgcaaactaggtgtattacagtacacagttgtcagacctttcaccaccatcgttgctttaatctgtgagctgcttggtatatatgacgaagggaactttagcttttcaaatgcttggacttatttggttataataaacaacatgtcacagttgtttgccatgtattgtctcctgctcttttataaagtactaaaagaagaactgagcccaatccaacctgttggcaaatttctttgtgtaaagctggtggtttttgtttctttttggcaagcagtagttattgctttgttggtaaaagttggcgttatttctgaaaagcatacgtgggaatggcaaactgtagaagctgtggccaccggactccaggattttattatctgtattgagatgttcctcgctgccattgctcatcattacacattctcatataaaccatatgtccaagaagcagaagagggctcatgctttgattcctttcttgccatgtgggatgtctcagatattagagatgatatttctgaacaagtaaggcatgttggacggacagtcaggggacatcccaggaaaaaattgtttcccgaggatcaagatcaaaatgaacatacaagtttattatcatcatcatcacaagatgcaatttccattgcttcttctatgccaccttcacccatgggtcactaccaagggtttggacacactgtgactccccagactacacctaccacagctaagatatctgatgaaatccttagtgatactataggagagaaaaaagaaccttcagataaatccgtggattcctgaacagtatggaaaagcaaactgtgcaactactacattatatcattacctggtatcccatggattttgtgcttgggacagaccataaatgatggaaaatgtcaacacaaaaatagctgaaagccaggtacaactactgcatttatatatgtaagttttgtatatcaaaaataattggtctaaatttcctagacttagacttgatttcttaacattagggtatcgcatactcaaatggtagacaatgaccccaactaaatcttcctgatgttacactgctttatcaagaggatggactttttttttttgaggcagacagagtcttggctctgtcacccaggctggagtgcagtggcgcaatctcgggtcactgcaagctctgcctcccaagttcatgccattctcctgcctcagcctcccaagtagctgcgactacaagcacctgccaccatgcccagctaattttttttttcagtagagacagggtctcaccatgttagccacgatgctcttgatctgaccttgngatcccgcgacctcggccttccaaagtgctggnaatacaggcgtgagccactgggccttgccaagattgggcactttttaacatcagaacttcctatcactgctgcattgagttgctccgcatttattagaagcattatgcctgtacggattgggg

SEQ ID NO: 280 - DNA, 549 bp, Homo sapiens
tcgacccacgcgtccgggctgacatgatgtatttctgccagatgctggcagttgtggaaactatcaatgcagcaattggagtcactacgtcaccggtgctgccttctctgatccagcttcttggaagaaattttattttgtttatcatctttggcaccatggaagaaatgcagaacaaagctgtggttttctttgtgttttatttgtggagtgcaattgaaattttcaggtactctttctacatgctgacgtgcattgacatggattggaaggtgctcacatggcttcgttacactctgtggattcccttatatccactggggatgtttggcggaagctgtctcagtgattcagtccattccaatattcaatgagaccggacgattcagtttcacattgccatatccagtgaaaatcaaagttagattttccttttttcttcagatttatcttataatgatatttttagggttatacataaattttcgtcacctttataaacagcgcagacggcgctatggacaaaaaaaaaaaaaaaaaaaaaaaaaa

SEQ ID NO: 281 - DNA, 1001 bp, Homo sapiens
  misc_feature (919)..(919): n equals a,t,g, or c
cgcgctggaaccctgtggcggcggccatggccatatggcgctgcccgcctggctgcagccaggtataggaagaatgcgtatcttttcatctattacttaatccagttctgtggccactcttggatatttacaaatatgacagtcagattcttttcatttggaaaaggtaaaactccgaaacagtttttttatttttaacttttaatccttgttttcacctcatcctgcttatattaaatttctacacacctcaaccttctaccacgggatacagattcaatggttgacactttttatgctattggacttgtgatgcgactttgccaatccgtatctctcctggaactgctgcacatatatgttggcattgagtcaaaccatcttctcccaaggtttttgcagctcacagaaagaataatcatcctttttgtggtgatcaccagtcaagaggaagtccaagagaaatatgtggtgtgtgttttattcgtcttttggaatctattggatatggttaggtacacttatagcatgttatcagtcataggaatatcctatgctgtcttgacatggctcagtcaaacactatggatgccaatttatcctttgtgtgttcttgctgaagcatttgccatctatcaatcgctgccttattttgaatcatttggcacttattccaccaagctgccctttgacttatccatctatttcccatatgtgctgaaaatatatctcatgatgctctttataggtatgtattttacctacagtcatctatactcagaaagaagagacatcctcggaatctttcccattaaaaaaaagaagatgtgaagtacagcattccagtgtgacacgagaaaagacaggctgtggattcagtgcagtaaataaaacacaggaagtattctggtggaaaaanaaaaaaaaaaaaaaaaaaaaraaraaaaaaaaawaaaaaaaaaaaaaaaaaaaaaaaaaaaaaaaaaaaaaaaaaaaaaaaa

SEQ ID NO: 282 - DNA, 1432 bp, Homo sapiens
acgagagatttaagtgcagcgtggattttttttttctcactttgccttgtgttttccactccgaaagaatgttgtggctgctcttttttctggtgactgccattcatgctgaactctgtcaaccaggtgcagaaaatgcttttaaagtgagacttagtatcagaacagctctgggagataaagcatatgcctgggataccaatgaagaatacctcttcaaagcgatggtagctttctccatgagaaaagttcccaacagagaagcaacagaaatttcccatgtcctactttgcaatgtaacccagagggtatcattctggtttgtggttacagacccttcaaaaaatcacacccttcctgctgttgaggtgcaatcagccataagaatgaacaagaaccggatcaacaatgccttctttctaaatgaccaaactctggaatttttaaaaatcccttccacacttgcaccacccatggacccatctgtgcccatctggattattatatttggtgtgatattttgcatcatcatagttgcaattgcactactgattttatcagggatctggcaacgtagaagaaagaacaaagaaccatctgaagtggatgacgctgaagataagtgtgaaaacatgatcacaattgaaaatggcatcccctctgatcccctggacatgaagggagggcatattaatgatgccttcatgacagaggatgagaggctcacccctctctgaagggctgttgttctgcttcctcaagaaattaaacatttgtttctgtgtgactgctgagcatcctgaaataccaagagcagatcatatattttgtttcaccattcttcttttgtaataaattttgaatgtgcttgaaagtgaaaagcaatcaattatacccaccaacaccactgaaatcataagctattcacgactcaaaatattctaaaatatttttctgacagtatagtgtataaatgtggtcatgtggtatttgtagttattgatttaagcatttttagaaataagatcaggcatatgtatatattttcacacttcaaagacctaaggaaaaataaattttccagtggagaatacatataatatggtgtagaaatcattgaaaatggatcctttttgacgatcacttatatcactctgtatatgactaagtaaacaaaagtgagaagtaattattgtaaatggatggataaaaatggaattactcatatacagggtggaattttatcctgttatcacaccaacagttgattatatattttctgaatatcagcccctaataggacaattctatttgttgaccatttctacaatttgtaaaagtccaatctgtgctaacttaataaagtaataatcatctctttttgattgtgaaaaaaaaaaaaaaaaaaaaaaaaaaaaaaaaaaaaaaaaaa

SEQ ID NO: 283 - DNA, 1048 bp, Homo sapiens
ccacgcgtccggcagtgaacactctttgctaaatttctgactgaatccaagatttttccttagaatagattcttaaaagtgggggccaggtgcggtggctcacacctataatcccagcaccttgggaggccgaggtggccagatcattgaggtcaggagtttgaaaccagcctggccaacatggtgaaaccccgtctctactaaaaatacaaaaattagccaggtgtgtggggcgtgcgcctgtagtcccagctacttgggaggctgaggcaggagaatcgcttgagcctgggaagcagaggttgcatgggccgggatcacgccactgcactccagcctgggtgacagcaagactccatctaagaaaacaaaaaaaaaaagtacgattggtgcgccagagtgaacacaaaatgtaaagacttgtgtatttgtgagacccttttgaagcatgctatctccccagctacaccctcttcaggtgccccttccctgcctcctcctgcttttcacactgtggctcgtggttccaggctcaagcacggacatcagtgaggactgggagaaagactttgacttggacatgactgaagaggaggtgcagatggcactttccaaagtggatgcctccggggaggtgagtgggcctggtgggtcagagggaagcgagcctaatggtcctgggtgtgagagctctccccagccagcccagctgtcccctcaggagggtccctgctcctgtctgaggtgacaggtggtgggaaaggagctggagcttcctgctcagacccacaacattggtcatcagcaggctgcacttttcctcagttccagggtggatagagggtcaagttcttgaccttagctctgtatcaaaattgcctgagaaactgcttaagaaaacagatgtcatgctgagcacggtggctcacacctgtaatcccaacactttgggaggccaaggtgggaggattgcttgaggcgaggagttcaagaccagcctggccaatatagtgagaccccatttctgtttttgaaaaaaaaaaaaaaa

SEQ ID NO: 284 - DNA, 1021 bp, Homo sapiens
  misc_feature (971)..(971): n equals a,t,g, or c
  misc_feature (1004)..(1004): n equals a,t,g, or c
  misc_feature (1008)..(1008): n equals a,t,g, or c
  misc_feature (1010)..(1010): n equals a,t,g, or c
  misc_feature (1018)..(1018): n equals a,t,g, or c
ggccgcccttttttttttttttttttttttttttttttttttttggccttagtcatcatttcttgaataatacaaataggtaagacaattttacaaaaattgtgctatagaataggatatttgtgactttttagatgaaatattagagctaccccacccagccacagatagcactgtaacactttcttaatagagtataggttcaaattataaagtccacacactggctaaaaagttcaagttcagagtttcaatcaattttcattgtaaggatgaaactgagttttactcaacttgtgtctttttaagagaatgggccacctcccacacatcctttctcttggactttttttaacacttctaatgttctgtatcacgaaatcagatggccaaaacaaaatctacaggtgctttaaaaaagcaagtccccaagtgattgttacccataccaaaatgagaattgctgctataatctgttcttactggamtggccakgccaatcttgggactaggattaaattgcaattaaattckgcagtgtacaaaatttttgtcagtctgyctagaaaaagaaagagaactctttcatggtagagcagttactgtgctcacgttgctttttctaaaaaccaacctactttcaaacaaagaatgaggaaatttgcagtaaattttaaatatgagtcacggaaatattaagataatagcatgtgtgggcaataataagtatgccaagaaataaagagtaatatacaaaacaatcaaacattattacatttggctacgaggttcctaataaacagggcaaaataaatagtgaaatataataaaatcgttatcatctgataaaaggctgcatggtacttttcccaaacgtaatggatgacttcaacacattttcttattaaatatttcaaattgtttcttcatgtgaaaactgtcttattaattgtaaaaaggatgtaacttgnataggcatgctcaacaggggtaagagtaattcngtangngccccctngat

SEQ ID NO: 285 - DNA, 1492 bp, Homo sapiens
gccttcccacactccattccctgtcaagttatggctgtcccctcaccccagctgctcctagagaggcccttkttacctgtgtcattcatgtttctaacaagccaccctccaccccgtcttgtgtgccccatgcacctgtgcatctgtgctgtgtgggtgttggtggcccttttgcgcatgcatggggcatcccctgcccagaccagcgggacaaggagcgggaacggcggctgcaggaggcacggggccggccaggggaggggcgcggcaacacagccactgagaccaccacgaggcacagccagcgggcagctgatggctctgctgtcagcactgttaccaagactgagcggctcgtccactccaatgatggcacacggacggcccgcaccaccacagtggagtcgagtttcgtgaggcgctcggagaatggcagtggcagcaccatgatgcaaaccaagaccttctcctcttcctcctcatccaagaagatgggcagcatcttcgaccgcgargaccaggccagcccacgggccggcagcctggcggcgctcgagaaacggcaggccgagaagaagaaagagctgatgaaggcgcagagtctgcccaagacctcagcctcccaggcgcgcaaggccatgattgaraagctggagaaggagggcgcggccggcagccctggcggaccccgcgcagccgtgcagcgatccaccagcttcggggtccccaacgccaacagcatcaagcagatgctgctggactggtgtcgagccaagactcgcggctacgagcacgtcgacatccagaacttctcctccagctggagtgatgggatggccttctgtgccctggtgcacaacttcttccctgaggccttcgactatgggcagcttagccctcagaaccgacgccagaacttcgaggtggccttctcatctgcggagacccatgcggactgcccgcagctcctggatacagaggacatggtgcggcttcgagagcctgactggaagtgcgtgtacacgtacatccaggaattctaccgctgtctggtccagaaggggctggtaaaaaccaaaaagtcctaamccctgctcggggccccacggatgctggtggactgtgtgcccctggtggaggtggacgacatgatgatcatgggcaagaagcctgaccccaagtgtgtcttcacctatgtgcagtcgctctacaaccacctgcgacgccacgaactgcgcctgcgcggcaagaatgtctagcctgcccgcccgcatggccagccagtggcaagctgccgcccccactctccgggcaccgtctcctgcctgtgcgtccgcccaccgctgccctgtctgttgcgacaccctcccccccacatacacacgcagcgttttgataaattattggttttcaamraaaaaaaaaaaaaaaaaaaaaaaaaaaaaaaaaaaaaaaaaaaaaaaaaaaaaaaaaaaaaaaaaaaaaaaaaaag

SEQ ID NO: 286 - DNA, 1543 bp, Homo sapiens
ggcacgagatttgattctcatgctcctttcaaaagagcatactagtttggggtggttggttattttcttaaccttagcaagccagcttatttcctatggaagcagaactggaaacagcagatgtccaccatgcttatacaggacactacacactgtctcgacaagccatgttctttcctccctcttcgtgagcactttctctggtgatgagttagtatggactacttgaacctcaaaactgggcctctcacccaaagccaaatgaagtagcgtatgccaggatgatgtttcttttgggccgttggcagtgagactgctaagcaggctgccttaggttttgctgtggcaatgctagcagattgttccctctttcaaaggggcaaaaatatcattttggtatgataactgactttctatttacagtttctggcccccaaagacaaaccaagtggagacacagcagctgtatttgaagaaggtggtgatgtggacgatttagtaagtacttttaatatgcacctggtgttctgtgattgaagtcacctgagctgtaaatacagccacaaaggctgattatcttacacttgttgcttatttgtgttttaatttccaatacaccagaagcttcctacaccattatatattgccattataaattcaatcagataggtaatttcataatagaaattcctgtgtttcatggtgtcggctatattgttcattcagattaatcctctcccttgaagggctgaaaaagactagggagctattccattagtagcaaaatgttgtaattcactgaaattgctgttaaccaaaaataagtaatacaacatggcattttgtgtgggttgacaaatgaaacaggccttaaaagggctacttcttaaatgttctcaattaacttaatgtaaacaaaatagaccgataggcatttgaggatttctggaccccattacaccatgttgttgatgtctgggaagctgtgtagtaaatgtcttttgtatctatccttaatgtttggaaacttcccgcctttaagcttcatatgacaactgaccaacaaacactacgtactatgatgtcaatcttttttagagacattctcattactaaaatgagtggatacttgaatgtttaactcctaaaataatgagcggtgaataaatgagcaagtacatgcatgccttccaatgtagagtcattttcattaaaccctctctcaccagagaagcagtggtatgaaattggcctgattcctttctaagtgtgttgttcttgttcacagttggacatgatataggtcgtggatgtatggggaatctaagagagctgccatcgctgtgatgctgggagttctaacaaaacaagttggatgcggccattcaaggggagccaaaatctcaagaaattcccagcaggttacctggaggcggatcatctaattctctgtggaatgaatacacacatatatattacaagggataatttagaccccatacaagtttataaagagtcattgttaaaaaaaaaaaaaaaaaaa

SEQ ID NO: 287 - DNA, 954 bp, Homo sapiens
gaattcggcacgagcccacaccaaacctgtggacgccgacccgggaccgccgctggctggctgctggctcactcgaccgtcatggagaccctgggggcccttctggtgctggagtttctgctcctctccccggtggaggcccagcaggccacggagcatcgcctgaagccgtggctggtgggcctggctgcggtagtcggcttcctgttcatcgtctatttggtcttgctggccaaccgcctctggtgttccaaggccagggctgaggacgaggaggagaccacgttcagaatggagtccaacctataccaggaccagagtgaagacaagagagagaagaaagaggccaaggagaaagaagagaagaggaagaaggagaaaaagacagcaaaggaaggagagagcaacttgggactggatctggaggaaaaagagcccggagaccatgagagagcaaagagcacagtcatgtgaagattcctggctgcctcttccaggcagtcccccagagatgcctcttctgccccctaaaagcagtgccctggacttgaagcccgtgaaatgactccatctgggattcagaatacagtgttctcaagtgaagaaggcttggaacccaccccacctccctcattgggggctctctgggcaaacatggttttcatgcacccctcttcctgagcttggtccctgcctggtgattcttcttatactcggagagcatccctggttgaggagacacccgcaatcctccacgatctcatggctccacctgcttctccccactgcctgatttcttttctctctgcctgatgtctactgaacagaacttcccctctcccatgcacccactgccagctgagagctgcttcccaatggcctgcattaaagcattcgtaacagccaaaaaaaaaaaaaaaaaaaaaaaaaaaaaaaaaaaaaaaaaaaactcga

SEQ ID NO: 288 - DNA, 2784 bp, Homo sapiens
ggcacgaggaactctgagcaccgtggcttccagcatcaatgccttggcaacagtgacctttgaggattttgtcaagagctgttttcctcatctctccgacaagctgagcacctggatcagtaaaggcttatgtctcttatttggcgtgatgtgtacctctatggctgtggctgcatctgtcatgggaggtgttgtgcaggcttccctcagcattcacggcatgtgtggaggaccaatgctgggcttattctccctgggaatcgtgttcccttttgtgaattggaagggtgcactaggaggtcttcttactggaatcaccttgtcattttgggtggccattggggccttcatttaccctgcaccagcctctaagacatggcctttgcctctatcaacagaccaatgtatcaaatcaaatgtgacagcaacagggcctccagtactatccagcagacctggaatagctgatacctggtactcgatctcctacctttactacagtgcagtgggctgcttaggatgcattgttgctggagtaatcatcagcctcataacaggtcgccaaagaggtgaggatattcaaccactgttaattagaccagtttgtaatttattttgcttttggtctaagaagtacaaaacactatgctggtgtggagttcagcatgacagtgggacagagcaggaaaaccttgagaatggcagtgcccggaaacagggggctgaatctgtcttacagaatggactcaggagagaaagcctggtacatgttccaggctatgatcctaaggacaaaagctacaacaatatggcatttgagactacccatttctaaggcaatacctgtatgaacgcacacacacacgtgcaatacacacacacacacacacacacacacacacaaactccacatacttcttgcctacttgttagtagatatgtatagttgccattgctagaagacagggatgtctggtgcctatttctacttatttataactacatgcaaaatgactatctctcgggatattcttagaaagactccaactttcacagagaaaaaccaacctgctccaaatgcccttgactacttccttcttgaataaattagggctggatttcattaccattcaagaaagcgaagtctttttgcttggtgtcatattaaacttcaggtttttcgttttagtagttttttaaccatcaaaatatcttggagtttagaggcagaacgggaaacagaaatatgcatatttaacactttcctgccacgagggataaaatagaggaatgacatccacccccgacctcatacctgacatacatgtagacatattttatgccacccatctcccatcctgtagctacaattggcatacaactactattaacctcccttcaccaccactgtcaggtcctcttccagtcattcctcattagctgtcctgaccaaacattaaaaaaaaaattcagctaaatacagaagaagatggtatgtctggctagtgggagtgattataactaaaaactttgctccttttgtgctgtccatgcagtatgtcttcttcctttctatcactttacaatgaaaaattgcctcagagctcaataagaagtctggagcctttttccagggctaaggaaagagaaaaggaatgtcctatagaaggttgttaggatagaatttggtaaaagaacgttgcagatattgtaacagaccataggagatttcatcagcaataggattcttctttggagaaaatacattgtccataagacttgtactctattcattcaactcatgtgagcaagctcaactcactccacctgggttaggtaacagaagtggagaacttcatagttcgtgtctagaaaataatgtttaaagttctggagaatgagggtattgcagattaaaaggcgagttgacaaatgaaggagcagtgaaagatttttggaagaagtgaagaagtgaaattctgaaaaggtaaaagaaagaaccagtatgtcacaggggccaagtcagaggacagataataagaaacaaagttgtatctgagagtcatatattaggacaggtgtcagatatttattttggtggccagataaaagcaaaaggcctagaaacagtgtgttagcaaagtaagaagaaatggtccaaataggcaaggataaggaaatccaaaggttgtctttaaatatttctcaaaagagaaagccttgaaagaagcatacaatagagaaaaaataaattaccagtatttattattagaaaagatagaaagacagacaaatcagtggaggaattaaaacagagaaactggagtttataaaacagagcccaatccttgccttctctccctccactcaaatagaaaaggagaatggagaaagagaaagaaggtattaggctacagtttataagagagatgagaaaaaaatacatttgggaatagagggaaagggtcaaaaggggtcacatttggagaaatatctgaaaatgagaaggagcagaatttttggaaacattttttaaagtctggcaacgctaattaagctgttgatctaaggatttgcaaattgagaggtgcaattattttccaaatgatttgtgacactcttattaattagaatatatattctgtgaatattgaaatctgagccaaaactagttagctttattaatatcttagggaaagaagagagaaagaaagagggagggagagagagaaagaaagaaagaaagaaagaaagaaagaaagaaagaaaaaaaaaaaaaaaaaa

SEQ ID NO: 289 - DNA, 943 bp, Homo sapiens
gtattttcaagggtctgtcctgttatagcacataacggaacttcattccttttttaaaagatataattcatgtaccaggtgattcacccctttaaagtctcaaattcagtggtttttagtatatttccagaattgtgcagttatcactaggagcaattttagaatgttttcatcacccggaaagaaactctatatccatacgcagcctctccccatttctccccaacccccagccctaggcaaccactcatctgctttccgtgtctgtaggattgcttgttctggaaatgttgtatacatggaatcatgcactgtgaactcttgtgtgtcacagaaggatcatgtttccatggtgcgtctgtgtcatagcatgtatcagtgcagtaaccccccttatccaaggttttactttctgcagtttcagttacccacagtacagtacagtaagatattttgagagagagaccacactcacattacttttattgtaatatatcgttataattgttctatttgattattgttgttaatctcttactgtgccttatttagaagttagactttgtcataagtatgtatgtataggagaaaagatagtatatataaggtttggtgctatccacagtttcggacatcccctgggggtcttggaatgtawcctgtggataagcgggaccactgtacttcattcctttttattgtcaaataatattycatkgkgtggctawgccatawtttgccyattcattcgtcagttggtagacatttgaggtgtttccatwttttggcttttgtgaagaatcctaggccgggcacagtggctcatactcctgggaccttgggaggccaagacgggacgatcacttgagctcaggaatttaagaccagcctgggcaacatagtgagactctgtctctacaaaaaaaaaaaaaaaaaactcgag

SEQ ID NO: 290 - DNA, 887 bp, Homo sapiens
  misc_feature (303)..(303): n equals a,t,g, or c
ggcacgagagaattataggtgcatgatggggcttttggagactggcaatgttctgttttgggtctgggtagtggttacttgtgtgtattcactttatgctaactcattgaactgtacagatatggactgtgcccctttctatatgtgtgtaatgcttcaacaaaagtgtcaatagtgatgcatgcacatgttaaaatttcaaactatattaaagagtgtgcaattaaaaggaagttatcctctcactctaaagtcctatttcctctcttcagtctatcattactactagtttctagtatatcntttagaaatgkgctgtaaaagaacaatgatgtgtatgtctctacaggtatatatttattctttttgtaattacaaaaatataaactcactacatatgttattctaccacatgctttttttcatgtaacagtatgtcttagacatcttttcctattattgcgtggaagctatcaaccttattctttgtaatgactccataaattattctactgtgaaaacacaccatgtttaaccagttctctgttagtgaacatttaggatttttccagtttttaaatattacagtgacatattaaacattaaacatatcttttgacacatgtccttgcacacatgtataggtatgatggactttaacaccctttggctagattctttagcacataacgtaaatatcccatagagtcaaaaccacccttaaaacttcctcaggaggctgggtgtggtggctcacgcccgtaatcccagcactttaggaggccgaggtgggcggatcacgaggtcaggagatcgagaccatcctggccaacatggtgaaaccctgtctctactaaaaatacaaaaaaaaaaaaaaaaaactcgta

SEQ ID NO: 291 - DNA, 1478 bp, Homo sapiens
ggcacgaggagggcggaagtgggagctgcgaccgcgctccctgtgaggtgggcaagcggcgaaatggcgccctccgggagtcttgcagttcccctggcagtcctggtgctgttgctttggggtgctccctggacgcacgggcggcggagcaacgttcgcgtcatcacggacgagaactggagagaactgctggaaggagactggatgatagaattttatgccccgtggtgccctgcttgtcaaaatcttcaaccggaatgggaaagttttgctgaatggggagaagatcttgaggttaatattgcgaaagtagatgtcacagagcagccaggactgagtggacggtttatcataactgctcttcctactatttatcattgtaaagatggtgaatttaggcgctatcagggtccaaggactaagaaggacttcataaactttataagtgataaagagtggaagagtattgagcccgtttcatcatggtttggtccaggttctgttctgatgagtagtatgtcagcactctttcagctatctatgtggatcaggacttgccataactactttattgaagaccttggattgccagtgtggggatcatatactgtttttgctttagcaactctgttttccggactgttattaggactctgtatgatatttgtggcagattgcctttgtccttcaaaaaggcgcagaccacagccgtacccatacccttcaaaaaaattattatcagaatctgcacaacctttgaaaaaagtggaggaggaacaagaggcggatgaagaagatgtttcagaagaagaagctgaaagtaaagaaggaacaaacaaagactttccacagaatgccataagacaacgctctctgggtccatcattggccacagataaatcctagttaaattttatagttatcttaatattatgattttgataaaaacagaagattgatcattttgtttggtttgaagtgaactgtgacttttttgaatattgcagggttcagtctagattgtcattaaattgaagagtctacattcagaacataaaagcactaggtatacaagtttgaaatatgatttaagcacagtatgatggtttaaatagttctctaatttttgaaaaatcgtgccaagcaataagatttatgtatatttgtttaataataacctatttcaagtctgagttttgaaaatttacatttcccaagtattgcattattgaggtatttaagaagattattttagagaaaaatatttctcatttgatataatttttctctgtttcactgtgtgaaaaaaagaagatatttcccataaatgggaagtttgcccattgtctcaagaaatgtgtatttcagtgacaatttcgtggtctttttagaggtatattccaaaatttccttgtatttttaggttatgcaactaataaaaactaccttacattaattaaaaaaaaaaaaaaaaaaaa

SEQ ID NO: 292 - DNA, 1780 bp, Homo sapiens
tatttgggattatactgaacctatttgtccaataacctgagttttcaaataattttagttctataagtactataattatataaatattaatgaattcagattagctgaaaggaaaaaaagtagaagcctgactacttggtgctaactactaaagattttggcagaatcaatgttggatttggctttcctgtcccttccccatgccagccccccagagtgttctgccttgtgctgcctcccttcacckggagtgccacacccctctctctgccagttcagctcttcattcttcaaggcctgaccttgtctgacccttgtgcctctaaacccgtggccccacctctcttgggcacgagctatgtcaggtgatgtttgtgtttttggttatgcccatctccatagccagaccaagcactctggaagccagggttgggtgcttatttatctgtttgccatgcagaaaatatcttgcacaaaattacctctgttaaggaatctgaagctgaatttagtttggctgagtcagggttgggttttttttaaggggctgtggggtgaaatgttgactggaagccacccacaaacacacacctgctggttaggaacccggctgtgggtggttctgagctgtttggcttcattgacagtttctgattgccctgagcaccaggtctcatcttgcatctcatcctggcctggagaacattcagtttccttccaacccttcccacctttcccccactcccttggaggaactgaagttggggttgaggagagccagatggctggagtgggtatttgaaggtctttctgtcacctgttcagtgtggtctgccccacccctgctgaccaagactgactgaaatgtaaaataatacagaccatctcaactcagaaagctggcacatttttgaaagcccaagtgtgggtaagtgcgtggaacaacgataattcacactgctttatgagtagaaattgtgagaaatattgtgccaggcaatttgcaaaatcttggaaggttgtgtgcacttaaccacccagcaactactcctggatgcatcctagagaagtgccatgtgaacagagaatgattttaagacttcactgaagtattgtttaggtagcaagattgggaaaagcctgcatttcatcagcagaagaatggataaataaatgagttgtttttggtccttggaaagtgaatatgaaagagttacgtctcaacacagatagatgaaaaattatgctgagaaagttggtgaagctacatacaaggtacccttagtgtaaagttaagcatactgtgtacctgtgggcacgttacttcaacttgtttttcactttttctgtaaaatgggatagtagtggcaatctcacagggtgattgtgggtgggggggtggtcaatgaagtaatgcatgtaaaatgcttagaatagtgtctagcatgtaagccttgtggacatatagaaagtgttattgttttgcacagtaatctattttctgtggattcaaataatatgaaatgagtataaaatcatgtattggaacgatgtgtgcaagtcaccattctgccttcctaaggcaggagacctgatggatttggggggggtacatggggccttcagttgtgttttctttgtttttttctaaaaattgatgcagaggcatcacaatgttaagattttaacagggtagtgtggtgggtactttttaactgtttgcttaaagtgtttcaaagtaaaaatatttcttaaaaaaaaaaaaaaaaaaaaaaaaaaa

SEQ ID NO: 293 - DNA, 1984 bp, Homo sapiens
  misc_feature (598)..(598): n equals a,t,g, or c
ccaagctcgaaattaaccctcactaaagggaacaaaagctggagctccaccgcggtggcggccgctctagaactagtggatcccccgggctgcaggaattcggcacgaggcggccctctgcgcctacgcggtcacctacacagcgatgtacgtgactctcgtgttccgcgtgaagggctcccgcctggtcaaaccctcgctctgcctggccttgctgtgcccggccttcctggtgggcgtggtccgcgtggccgagtaccgaaaccactggtcggacgtgctggctggcttcctgacaggggcggccatcgccacctttttggtcacctgcgttgtgcataactttcagagccggccaccctctggccgaaggctctctccccagagtgcctaccctcgcctgcctgggcctcagtttccacatctgcacaatgggggtgaccatccctgccctgctggctgccaggagcggctgtgagtcttcaggcgtggatgcagcctgggggaagccatagggcgctttcacaggcctggccttcaccatggcgggagggagaccgcatctgaagaggagtttctccatcatcccctgctttgncttcgtggagtcggtgctgctgggcattgkgatcctccagggccccagccatgtgttcgtcgccccgtgtgccccgtcctcgattgaggtctgagccgacgcccttgcccctgcccctacccctgccagcgcccacccccagccagggcccctcgccttcctcccctggacctggggggccaggcgggggtggtggacgtggccggaagctgctgctgcccacgcccctgctgcgggacctgtacaccctgagtggactctatccctcccccttccaccgggacaacttcagcccttacctgtttgccagccgtgaccacctgctgtgaggcccgaccacccacccagaatctgcccagtccccacttcttccctgccacgcgtgtgtgtgcgtgtgccacgtgagtgccaaagtcccctgccccccaagccagccagacccagacattagaagatggctagaaggacatttaggagacatctgcctctctggccctctgagatatcccgatgggcacaaatggaaggtgcgcacttgcccctactattgcccttttaagggccaaagcttgaccccattggccattgcctggctaatgagaacccctggttctcagaattttaaccaaaaggagttggctccaaccaatgggagccttcccctcacttcttagaatcctcctgcaagagggcaactccagccagtgttcagcgactgaacagccaataggagcccttggtttccagaatttctagagtgggtgggcatgattccagtcaatgggggaccgcccgtgtctaagcatgtgcaaaggagaggagggagatgaggtcattgtttgtcattgagtcttctctcagaatcagcgagcccagctgtagggtggggggcaggctcccccatggcagggtccttggggtaccccttttcctctcagcccctccctgtgtgcggcctctccacctctcacccactctctcctaatcccctacttaagtagggcttgccccacttcagaggttttggggttcagggtgctgtgtctccccttgcctgtgcccaggtcatcccaaacccttctgttatttattagggctgtgggaagggtttttcttctttttcttggaacctgcccctgttcttcacactgccccccatgcctcagcctcatacagatgtgccatcatggggggcatgggtggagcagaggggctccctcaccccgggcaggcaaaggcagtgggtagaggaggcactgcccccctttcctgccccctcctcatctttaataaagacctggcttctcatctttaataaagacctgtttgtaacagaaaaaaaaaaaaaaaaaaaaaaaaaaaaaaaaaaaaaaaaaaaaaaaaaaa

SEQ ID NO: 294 - DNA, 1222 bp, Homo sapiens
aattcccgggtcgacccacgcgtccgagcccagcaacgtgcaaggggaaaggggacaggattctggatggccatttgcttcactgggatgcaaaacctcttttgagtactagaatcagtatttcttcttccatctctgctgtacctgagaagaaatggccaaacgcaccttctctaacttggagacattcctgattttcctccttgtaatgatgagtgccatcacagtggcccttctcagcctcttgtttatcaccagtgggaccattgaaaaccacaaagatttaggaggccattttttttcaaccacccaaagccctccagccacccagggctccacagccgcccaacgctccacagccacccagcattccacagccacccagagctccacagccactcaaacttctccagtgcctttaaccccagagtctcctctatttcagaacttcagtggctaccatattggtgttggacgagctgactgcacaggacaagtagcagatatcaatttgatgggctatggcaaatccggccagaatgcacagggcatcctcaccaggctatacagtcgtgccttcatcatggcagaacctgatgggtccaatcgaacagtgtttgtcagcatcgacataggcatggtatcccaaaggctcaggctggaggtcctgaacagactgcagagtaaatatggctccctgtacagaagagataatgtcatcctgagtggcactcacactcattcaggtcctgcaggatatttccagtataccgtgtttgtaattgccagtgaaggatttagcaatcaaacttttcagcacatggtcactggtatcttgaagagcattgacataccacacacaaatatgaaaccaggcaaaatcttcatcaataaaggaaatgtggatggtgtgcagatcaacagaagtccgtattcttaccttcaaaatccgcagtcagagagagcaaggtattcttcaaatacagacaaggaaatgatagttttgaaaatggtagatttgaatggagatgacttgggccttatcagtttttcattcagcaagtctgcactagggacctactatgagccacgcaatacttccttggaatgatgtattccctggccttgaaataaggaatctagtacccatgtttgtgctactggaatgaatccattaaactctctgagactcaaaaaaaaaaaaaaaaaaaaaaaaaagggc

SEQ ID NO: 295 - DNA, 1815 bp, Homo sapiens
cacgcgtccgcggacgctgggctcaatctcctgaccttgtgatctgcccgcctcggcctcccaaagtgctgggtttacaggcatgagccacagcgcccggctgagtattgggtctttaggggtcaaaacttttgatctttgcttgcagtttttgtttttttctcttttacactctccctgttccctgattaaatgaaggccaggcttgcctagttccagggaaaaggcccagggtgcctagagcaaggtggatgggactttgttcgcagatgggccttgagagagcgacccctcgctcctaaatgcccggaggaagggacggacttctttatctttaccatgggtattctgccttactgctttggcctgtggcgtttcttcacttgcttttcctcattttgcttggaatgtgctttgcctgttgcatacccacctcgtctgcccccttgcacactccatggctggcctaaaagcccagtctgctgtcctgtgccctttagacttccactgtaggattatgtttccacactccctgtggactgtgccactggagctctctgcagacagggactgtgtcaggttgacctccatccttcagaccagcccagtgcctggcaggtagaggaaagagaagctgaggaaggacttgctgcacaagtggatgccaggagctctggtcttcccttcttgaatctgctaccttatgatgggagggacacagggctgtgctggatttgtgcacgatgctttggacagcccatgggagagggccaggaggaaggaaacccagactgagtggatagcaggctggatgggggcattgacagtgggggaagcattaaaggccatttatagccttcacaggtcttggtaatgggctcttacacgggttggtggcggaaggacacaggtggacctgggctggtggtcactcctgggctgctcttggccctggcatctgagacctgttggccaaaggctttgatgtggctctggtattttttcttttttttgagaatggaacttttttttttttaatgaaatgctcttttgaataggcaatacagtcacgtttctaaaatgaaaatatattaaaatatattttaagaaattttgcccctcactcctgatctcatctctgtcctccctcctccctggtaaccacctgtagcagtttgaatacccttctagtttttcttaatgcaagtacagcaaacacaaattgtgtattattatttctcccttttcagtaaatgaaagatagcattctgtgtgtactgttcttcatcttgtgctttttttaacttattgtagagatttttccatatcagtgcatggagaatggttgtcattctctttcagctgtgttgcactgtgaagttgtccctgtttgaatactcacccctgaggaaaggcacctggctgtttccagcttgtttcatgacatgccggcgacagttgtctcacgtgcacatcgtttcccacattgcagtggtcctgcagggtggcatcccgcaggcacattgctgagtcaaagaggaaacacagttgtaattttgacagattttgcccagttgccctctacagggcttgttccatgttgcactcccactggcggtgttgatgcctgattccccactgactcgtcaacacaaggtgtagtcaaatgcttggagttctgccagcctgaccaacatggagaaaccctactgaggatacaaagttagccaggcatggtggtgcatgcctgtagtcccagctgctcaggagcctggcaacaagagcaaaactccagctcaaaaaaaaaaaaaaaaa

SEQ ID NO: 296 - DNA, 1346 bp, Homo sapiens
cgctggggccgcgattccgcacgtcccttacccgcttcactagtcccggcattcttcgctgttttcctaactcgcccgcttgactagcgccctggaacagccatttgggtcgtggagtgcgagcacggccggccaatcgccgagtcagagggccaggaggggcgcggccattcgccgcccggcccctgctccgtggctggttttctccgcgggcgcctcgggcggaacctggagataatgggcagcacctgggggagccctggctgggtgcggctcgctctttgcctgacgggcttagtgctctcgctctacgcgctgcacgtgaaggcggcgcgcgcccgggaccgggattaccgcgcgctctgcgacgtgggcaccgccatcagctgttcgcgcgtcttctcctccaggtggggcaggggtttcgggctggtggagcatgtgctgggacaggacagcatcctcaatcaatccaacagcatattcggttgcatcttctacacactacagctattgttaggttgcctgcggacacgctgggcctctgtcctgatgctgctgagctccctggtgtctctcgctggttctgtctacctggcctggatcctgttcttcgtgctctatgatttctgcattgtttgtatcaccacctatgctatcaacgtgagcctgatgtggctcagtttccggaaggtccaagaaccccagggcaaggctaagaggcactgagccctcaacccaagccaggctgacctcatctgctttgctttggcatgtgagccttgcctaagggggcatatctgggtccctagaaggccctagatgtggggcttctagattaccccctcctcctgccatacccacacatgacaatggaccaaatgtgccacacgctcgctcttttttacacccagtgcctctgactctgtccccatgggctggtctccaaagctctttccattgcccagggagggaaggttctgagcaataaagtttcttagatcaatcagccaagtctgaaccatgtgtctgccatggactgtggtgctgggcctccctcggtgttgccttctctggagctgggaagggtgagtcagagggagagtggagggcctgctgggaagggtggttatgggtagtctcatctccagtgtgtggagtcagcaaggcctggggcaccattggcccccacccccaggaaacaggctggcagctcgctcctgctgcccacaggagccaggcctactctactgggaaggctgagcacacacctggaagggcaggctgcccttctggatatgtaaatgcttgctgggaagatcttacttgagtttaactttaacccc

SEQ ID NO: 297 - DNA, 1262 bp, Homo sapiens
cctaatggcccgasctgaatacttgaaggagctcaagatgagggaatctcgctgggaagctgacaccctggacaaagagggactgtcggaatctgttcgtagctcttgcacccttcagtgaccctagaagaatgattggacagatgtgagccatctggagcagaggggcactaacccaggctgacgccaagaatgaagtggcccactgcagccctggcgagcaggcttcttggatggacagtgctgagacccccatatcccagagtccccagcctccctcaggttactctgcaccccacagatggtttgatggctgtgctgtatactggaggggagggcaggactctgggagaacagcacttctttcatgagacctttgttactcggtggttactgggtcctgtgcctgtccgttttggggcatgcagccctctatcatttttggctccgagaagagggcaaggggcccccgcaggtarcttctgtgcttgccctcgccctgccagcaggcagctgtgcccctggcctgcccttcccgggaccccttattccaactcagctcctctttgcactggaatggggcactccaacacccctcagggaccaccctccccacagtatgcactcagccccacagaacccaccagtctttctgggaactcacacctgcccgccatcttggtactttaggttaatccctcaagcatgaaagctggatcttttggggtttaagaagcccaagccttgttcctgccctggcctagggagcactcaggagggttccttggtcctcatctctcccacctccgttccctctgggccccacactagccacagcgcgggccttgtgctggagtttgagcctgggacagggagagggaggcttggagacagtctgacccagtgccctctaggccacccacttctaggcctgccctgccgccgtggagccctgggcaagctctttcccctttctgggcctgggtctccccatctcttcaatggggctgataccttcacagcccacagcatgggcacttatgaggacaaagtgaatttaacctggaaaagaatgtatttgagagtttcttttaaataatcagcgggtgttggtgatttgtagcccttctgcccttaaatgcttccttgggcaagagctgtctgtcctccctgcaggaggctgagtgtgaagagtatcattcattgtttctctattaaattattttctgctaaaaaaaaaaaaaaaaaatttctgcggtccg

SEQ ID NO: 298 - DNA, 989 bp, Homo sapiens
  misc_feature (955)..(955): n equals a,t,g, or c
  misc_feature (979)..(979): n equals a,t,g, or c
acgcgtccgctctggatccctcgttccctggtgctggtggaaatgaccatcacctcgttttatgccgtgtgcttttacctgctgatgctggtcatggtggaaggctttggggggaaggaggcagtgctgaggacgctgagggacaccccgatgatggtccacacaggcccctgctgctgctgctgcccctgctgtccacggctgctgctcaccaggaagaagcttcagctgctgatgttgggccctttccaatacgccttcttgaagataacgctgaccctggtgggcctgtttctcatccccgacggcatctatgacccagcagacatttctgaggggagcacagctctatggatcaacactttcctcggcgtgtccacactgctggctctctggaccctgggcatcatttcccgtcaagccaggctacacctgggtgagcagaacatgggagccaaatttgctctgttccaggttctcctcatcctgactgccctacagccctccatcttctcagtcttggccaacggtgggcagattgcttgttcgcctccctattcctctaaaaccaggtctcaagtgatgaattgccacctcctcatactggagacttttctaatgactgtgctgacacgaatgtactaccgaaggaaagaccacaaggttgggtatgaaactttctcttctccagacctggacttgaactcaaagcctaaggtggatggcttggacaatgaaaggatgctgtactcattagaatacaagattcctttactgtccctcaaccttgaccaaatgggaagcattcccccttgtcaacacaagctggcagatacatttgactctacagatgaaggtgaacaatgttaggataaaattgctttggatcttgcctggaagttgttttaagttttgtaataaacaagatgatgtctgaaaaaaaaaaaaaaaaaanaaaaaaaaaaaaaaaaaaaaaaanaaaaaaaaaa

SEQ ID NO: 299 - DNA, 632 bp, Homo sapiens
aattcccgggtcgacccacgcgtccgcgacggtctcatgtaccagaaattccggaaccaattcctctccttttccatgtaccagagcttcgtgcagtttctccagtactactaccagagcggctgcctctaccgcctgcgggcgctgggcgagcggcacaccatggacctcactgtggagggcttccagtcctggatgtggcggggcctcaccttcctgctgccttttcttttctttggacacttctggcagctttttaacgcgctgacgttgttcaacctggcccaggaccctcagtgcaaggagtggcaggtgcttatgtgcggctttcccttcctcctccttttcctcggcaatttcttcaccaccctgagggttgtgcaccacaagtttcacagtcagcggcacgggagcaagaaggattgaggctgggccttcccctgccggcccagaggggcttctgtcctgtgtgttgtgggaggggatgggaggcgcccctcgagtgtgcgtgtatcagggggtctcttctattctcccttgggttttatgggcgctgtgggccctgaaggaagacctgggcccagtgccctcaataaagagaggcccagaggtggaaaaaaaaaaaaaaaaaa

SEQ ID NO: 300 - DNA, 2572 bp, Homo sapiens
  misc_feature (2527)..(2527): n equals a,t,g, or c
aattcggcacgagtctggaccttcttagmttgcttgatatcaggttgtttttgtagccattttgcttcacagtcacctggaatgccgggagcccctgctcatcccgatcctctccttgtacatgggcgcacttgtgcgctgcaccaccctgtgcctgggctactacaagaacattcacgacatcatccctgacagaagtggcccggagctggggggagatgcaacaataagaaagatgctgagcttctggtggcctttggctctaattctggccacacagagaatcagtcggcctattgtcaacctctttgtttcccgggaccttggtggcagttctgcagccacagaggcagtggcgattttgacagccacataccctgtggtcacatgccatacggctggttgacggaaatccgtgctgtgtatcctgctttcgacaagaataaccccagcaacaaactggtgagcacgagcaacacagtcacggcagcccacatcaagaagttcaccttcgtctgcatggctctgtcactcacgctctgtttcgtgatgttttggacacccaacgtgtctgagaaaatcttgatagacatcatcggagtggactttgcctttgcagaactctgtgttgttcctttgcggatcttctccttcttcccagttccagtcacagtgagggcgcatctcaccgggtggctgatgacactgaagaaaaccttcgtccttgcccccagctctgtgctgcggatcatcgtcctcatcgccagcctcgtggtcctaccctacctgggggtgcacggtgcgaccctgggcgtgggctccctcctggcgggctttgtgggagaatccaccatggtcgccatcgctgcgtgctatgtctaccggaagcagaaaaagaagatggagaatgagtcggccacggagggggaagactctgccatgacagacatgcctccgacagaggaggtgacagacatcgtggaaatgagagaggagaatgaataaggcacgggacgccatgggcactgcagggacagtcagtcaggatgacacttcggcatcatctcttccctctcccatcgtattttgttcccttttttttgttttgttttggtaatgaaagaggccttgatttaaaggtttcgtgtcaattctctagcatactgggtatgctcacactgacggggggacctagtgaatggtctttactgttgctatgtaaaaacaaacgaaacaactgacttcatacccctgcctcacgaaaacccaaaagacacagctgcctcacggttgacgttgtgtcctcctcccctggacaatctcctcttggaaccaaaggactgcagctgtgccatcgcgcctcggtcaccctgcacagcaggccacagactctcctgtcccccttcatcgctcttaagaatcaacaggttaaaactcggcttcctttgatttgcttcccagtcacatggccgtacaaagagatggagccccggtggcctcttaaatttcccttccgccacggagttcgaaaccatctactccacacatgcaggaggcgggtggcacgctgcagcccggagtccccgttcacactgaggaacggagacctgtgaccacagcaggctgacagatggacagaatctcccgtagaaaggtttggtttgaaatgccccgggggcagcaaactgacatggttgaatgatagcatttcactctgcgttctcctagatctgagcaagctgtcagttctcacccccaccgtgtatatacatgagctaacttttttaaattgtcacaaaagcgcatctccagattccagaccctgccgcatgacttttcctgaaggcttgcttttccctcgcctttcctgaaggtcgcattagagcgagtcacatggagcatcctaactttgcattttagtttttacagtgaactgaagctttaagtctcatccagcattctaatgccaggttgctgtagggtaacttttgaagtagatatattacctggttctgctatccttagtcataactctgcggtacaggtaattgagaatgtactacggtacttccctcccacaccatacgataaagcaagacattttataacgataccagagtcactatgtggtcctccctgaaataacgcattcgaaatccatgcagtgcagtatatttttctaagttttggaaagcaggttttttcctttaaaaaaattatagacacggttcactaaattgatttagtcagaattcctagactgaaagaacctaaacaaaaaaatattttaaagatataaatatatgctgtatatgttatgtaatttattttaggctataatacatttcctattttcgcattttcaataaaatgtctctaatacaatacggtgattgcttgtgtgctcaacatacctgcagttgaaacgtattgtatcaatgaacattgtaccttattggcagcagttttataaagtccgtcatttgcatttgaatgtaaggctcagtaaatgacagaactatttttncattatgggtaactgggggaataaatggggtcactgggagtaggg

SEQ ID NO: 301 - DNA, 1488 bp, Homo sapiens
cgccaagtttccggagggagagggtagaaactggagggggtggacctgtcactcacgggactgagggtccttttctcccgctcccaggaggaacgagaatgaatatgactcaagcccgggttctggtggctgcagtggtggggttggtggctgtcctgctctacgcctccatccacaagattgaggagggccatctggctgtgtactacaggggaggagctttactaactagccccagtggaccaggctatcatatcatgttgcctttcattactacgttcagatctgtgcagacaacactacaaactgatgaagttaaaaatgtgccttgtggaacaagtggtggggtcatgatctatattgaccgaatagaagtggttaatatgttggctccttatgcagtgtttgatatcgtgaggaactatactgcagattatgacaagaccttaatcttcaataaaatccaccatgagctgaaccagttctgcagtgcccacacacttcaggaagtttacattgaattgtttgatcaaatagatgaaaacctgaagcaagctctgcagaaagacttaaacctcatggccccaggtctcactatacaggctgtgcgtgttacaaaacccaaaatcccagaagccataagaagaaattttgagttaatggaggctgagaagacaaaactccttatagctgcacagaaacaaaaggttgtggaaaaagaagctgagacagagaggaaaaaggcagttatagaagcagagaagattgcacaagtggcaaaaattcggtttcagcagaaagtgatggaaaaagaaactgaaaagcgcatttctgaaatcgaagatgctgcattcctggcccgagagaaagcgaaagcagatgctgaatattatgctgcacacaaatatgccacctcaaacaagcacaagttgaccccggaatatctggagctcaaaaagtaccaggccattgcttctaacagtaagatctattttggcagcaacatccctaacatgttcgtggactcctcatgtgctttgaaatattcagatattaggactggaagagaaagctcactcccctctaaggaggctcttgaaccctctggagagaacgtcatccaaaacaaagagagcacaggttgatgcaagaggtggaaatgttctccatatcaagatgtggcccaaggggttaagtgggaacaatcattatacggactcttcagatttacagagaacttacacttcatctgttccacctctcctgcgatagtcctgggtgctccactgattggaggatagagccagctgtctgacacacaaatggtcttttcagccacagtcttatcaagtatcctatatgtattcctttctaaactgctactcatgaatgaggaaagtctgatgctaagatactgcctgcactggaatgttaaacactaaatatataacaagctgtgttttcctaagctgaaaaaaaaaaaaaaaa

SEQ ID NO: 302 - DNA, 609 bp, Homo sapiens
ccacgcgtccgcggaccccagacatgaggaggctcctcctggtcaccagcctggtggttgtgctgctgtgggaggcaggtgcagtcccagcacccaaggtccctatcaagatgcaagtcaaacactggccctcagagcaggacccagagaaggcctggggcgcccgtgtggtggagcctccggagaaggacgaccagctggtggtgctgttccctgtccagaagccgaaactcttgaccaccgaggagaagccacgaggtcagggcaggggccccatccttccaggcaccaaggcctggatggagaccgaggacaccctgggccgtgtcctgagtcccgagcccgaccatgacagcctgtaccaccctccgcctgaggaggaccagggcgaggagaggccccggttgtgggtgatgccaaatcaccaggtgctcctgggaccggaggaagaccaagaccacatctaccacccccagtagggctccaggggccatcactgcccccgccctgtcccaaggcccaggctgttgggactgggaccctccctaccctgccccagctagacaaataaaccccagcaggccgggaaaaaaaaaaaaaaaaaaaaaa

SEQ ID NO: 303 - DNA, 612 bp, Homo sapiens
ggtcgacccacgcgtccgagcatttgtctgtataattttagttattgaattaaaatcttttgggaccccaacaggatgagatcattggccagctggcttcctcccacctgcacctggactgaaattccccgtggcattagaggtgtttcgtaaggtgctccctgctgtctgtcctacagattgcagtggctctgctggaaaagaacggaattctatgcaagttgcgtgtgtcatgaaggtctctgcacagtgggtgtgtttctttgtcgtcttttctccactctgctcttctgtgaaatgtgccagcagtggacagaacaggggcagaggtgatcagtgaccattgcacagaatatcagtaagtgttgtaaggtatatagtcttggccaacaaattgtaagcaaaataccaggaacttcctaatctagtaggaaattttgtatgcttttgacaaacatctgatcctactgacactgaaagtccttagaaggagaattgcttgaacccggaaggtggcggttgcagtgagccaagatggcgctactgcactccagcctgggcaataggaatgaaactccgtcaccaaaaaaaaaaaaaaaaaagggcggccgc

SEQ ID NO: 304 - DNA, 613 bp, Homo sapiens
  misc_feature (25)..(25): n equals a,t,g, or c
gaattcggcacgagcgggacgcggntgaagatagcctgcggagtgtccgggcggaacacggttgcagcactcccagtagaccaggagctccgggaggcagggccggccccacgtcctctgcgcaccaccctgagttggatcctctgtgcgccacccctgagttggatccagggctagctgctgttgacctccccactcccacgctgccctcctgcctgcagccatgacgcccctgctcaccctgatcctggtggtcctcatgggcttacctctggcccaggccttggactgccacgtgtgtgcctacaacggagacaactgcttcaaccccatgcgctgcccggctatggttgcctactgcatgaccacgcgcacctactacacccccaccaggatgaaggtcagtaagtcctgcgtgccccgctgcttcgagactgtgtatgatggctactccaagcacgcgtccaccacctcctgctgccagtacgacctctgcaacggcaccggccttgccaccccggccaccctggccctggcccccatcctcctggccaccctctggggtctcctctaaagcccccgaggcagacccactcaagaacaaagctctcga

SEQ ID NO: 305 - DNA, 1015 bp, Homo sapiens
ggcacgagcaaaaggggcttctattgtattggtcatattttattttggtttaaaaaattttagagtaaatgtggcaaaatgttaatgcttgttaaatctgagtggagagtacattggtgttaagtgtgctgctatgcagggtgagtgaattactcaataactaaataattgtgacataatatatttatttatgcttccctgttatgatctacacataaaattactggagcattattgcttaacttcttgtaaaaaagttctgcaattgtagtgttattaagaaagtaatattgatttgtatagtgacagaggattttttcagtgtcactttgccagcagagatcttcatggtgggcattgcccctgcccatgtctcacttggccctgggcttgccccactaggtaccctgcccacctggccaggcaggctgtgcttggcttgagctctggcccagatcctgcacttgctctgcggctgagccaggcatgccatgacctacttccaccttgggagccggcgtctggatgaggggaatgctgtgacacttgaacagaggtgggcatgtgaccccaaagccccaaagggggtgttacagcatgctaacagttctttcagtctcacatccacagcccaacaaatggaggtgtgtggtgcccagaggtcccttctcccattgtttggcaagcaggaggggtgtgctacagggttacagctttgtttgcacttgccgtttggtgggtcctgagttcttttcccatgtccaagaataaggttgtgctgacagctagcggttgagtgaggcaaagagttttactcagtaacaaaacagctctcagcagagaaggaagcctgagttggacagcacccttacctgaagttgggtagtcttcccaccacctaaaagtgggtagcccaaagtgtggctgagcctggggcttttatatgctcagaatgggagtgtatgtgctaattggtttgtgagtatgcaaaaaaagctaaaaaaaaaaaaaaaaa

SEQ ID NO: 306 - DNA, 1022 bp, Homo sapiens
ttcccgggtcgacccacgcgtccgcccacgcgtccggcttggggccagcaccctgtctcaaagatggcaaaatgaggctagttctggatgagctagctggtgtgggttccaaccataggaacacactgatgctcaaatcctaaggtgccaagctctaggccctggaggctggtagaacaggatctatgcctggaatcctggcagggattcctgtcaaggacttgtgtttaagcctgcttcagggcttcaggctgcttctgctctgtgtctgcccaggctggctgagcgggtggatgggtggacagaagggctcaccaaggattgtggacatagggtaggccctggtaccacgggtttcaggctgttatcacttcccttgtaggaacatagccagaagcagatgagccagggtagagggctggcccctcctctcatcttcccttcagtcttaaattgtctccagcgatgggaagaggccagggactgtaacccttgtgctgtgtattctctgagcctctgctcactctcagggccaagcagctcccaagccggggccctctcttggccaaaatctgaggagcagtctaggttacaggctttttggtaggtaggttctggctgcctgttaatgcagttaggccccctgattaggtacagtgagaaacaagctagaacaaccctggcccagaagactgtgcactccagcaagatccagggatgatagccttgcagggccactgggagtttgtgcccaagcttctccctcttctctccccagggggcactgggactggtccctgccctcatccttagcctgggccttccccagaggtattaaagagaagtatgattcctctgtcttcagttcttttcaggggcatcctgcccatagtacccagttcccaaggggcccccagtcacgtggtgaagcctagcactcatgcagctcttagggaaccaaaaaccagcactgaaataaagctgaatgactgactgaaaaaaaaaaaaaaaaagggcggccg

SEQ ID NO: 307 - DNA, 1766 bp, Homo sapiens
  misc_feature (14)..(14): n equals a,t,g, or c
  misc_feature (36)..(36): n equals a,t,g, or c
  misc_feature (1750)..(1750): n equals a,t,g, or c
acgggggctttaangggaaacccttcccggaatttncgggtcgacccacgcgtccggttttgtttatggagggtccagtaagtgcaaacaaccattgcctggtcctaagggttcagagtccccgaattccttcttggaccaggaaagccggagacgaagattcaccattgcagactcggatcagttgcctgggtactcggtggaaaccaacattctgcccacaaaaatgagagagaaaacaccatcttatggcaagccacggcctttgtccatgcctgctgatgggaactggatggggattgtggacccttttgccagacctcgaggtcatggcaggaaaggggaggatgccctttgccggtatttcagtaacgagcggattcctccgatcattgaagagagctcctctcccccataccggttctccagacccacgaccgagcggcatctggtccggggtgcggactacatccgaggaagcaggtgctacatcaactcagatctccacagcagcgccacgattccattccaggaggaagggaccaaaaagaaatctggctcctcagctacgagtcctcgtccacagaaccgtccctcctggtcagctggtttacgcgcctcaaactgttgactcactgagagggaccctgctcaggccacctgcctggctcctgscccaagtgccttgcttttacagtggacagcctcttctcgtttcagcctcagtattatgtagggaccttatgcaatttctttttcttttgaaaagttatctactgcccttcttggaagtttgcaggattggatgggaacaaattcagaggatcttaggtgctggcttgtggagacaaaaggagggaaatgggtagagcctgtttgtcttgcttccccagagatagaatgtgaagacacgcgctagaaatcgcagtcctggccagagacgttatggtcattgtgagggactggtggcattgttcctttttgaggggctggggggactcaaattggtggctgttttcacacagatgtgttggtttgtggtccaacttctttatctgaaaaagccagtgagaaaacatttttgatttgatttttctaaactatctaccatattttaagtgtagcagctttgactttgcaataacgtggcaagtatctgatttctcctttgaggcagaggtttaagtgtaggcctgttacacttgtttgatacctttttcatgacagtctcagtatagatcagttggtacagaaatacatgaacacattttgatagggcttatttcacacaaagaagtttatggttatttgtgtggggtggtgttgttatatattattgtctttaagggaaaagaagctataagattcgctgacagccaaagtatcatttagaaaagtgaagcaacaagatttaggttgatgaaagatacatgagtttgcattttgacctgttcagtgtctgtcttccagcacggtgtgtacacttcttcaaaattgtacacagtttgctaattagaaatatcttggaaagcctcatggtcactaattttcaactagcatcaggtattttgaaaacgtgtgtctggatattaactcttgtttaaactgaatgtatgatattttgttagaatggaaaagtactatcttgttaatttaagtattttaaatatagttgtatatttttcttaaaaaaaaaaaaaaaaaaaaaaaaaagggcggccgctctagaggatcccgcgaggggccccanattacgcgtgagcgtt

SEQ ID NO: 308 - DNA, 815 bp, Homo sapiens
  misc_feature (406)..(406): n equals a,t,g, or c
  misc_feature (794)..(794): n equals a,t,g, or c
ggcacgagcggcacgagcggcacgagatggaatgttcattttatggcagttgttttaagttktaaawtacacagaggaaamtattgtggaaggacctctttgttgctttcccttctaagttgtcttcttcttcttcttcttcttcttcttcttcttctttggtccttaagtgaaataaagactctaaaactaatttgtatattatcagccagagatgcggatggcagtcgagccaaatcgcatggctttcagatcaggtattctgcacattcattccaaggtcatagatttttaaaaggacctggatttgaagagatggcaaatgrtgagccatcagaaaacttaatttggaaaacatgtatgtagccagtgtggatattgtggcctctctcaagacacattgacnactgtagacytcattcagtccagtgtgagtattttggagtaggttggatgtagattttgtttttatcgttgatttgtaccgacagaaatagacatttcatcatgtaaaattcctgttattctggaaaaacctattgttttgatccttcttgttttcctgacttggaagtatcctttcaaaaaaactcttaagatatctaggtctaaaaagcacttcatgagatgctaaagctgacccactggttgaaaatgttgaccctatcctgttatttaaatgtgaacatttattgtacattcagtgagttatagtgttaatagtcttgtgctatgcagcaggtgtaaaaattaataaatatattttttaataaaaaaaaaaaaaaaaaaaattnctgcggtccgcaagggaattc

SEQ ID NO: 309 - DNA, 633 bp, Homo sapiens
ggcagagtgtctctcaatggcttctttcttgaagggcatcacagccactgtacttatcaatgcctgtgtagccaacacagtagctcctctacattacaaggatatgattattcctaaacttgtcgatgatctaggaaaagtaaaaatcactaagtcaggatttctcacttttatggacacttggagcaatccactggaggaacacaatcaccaaagtcttgttccattggaaaaggcgcaggtgcccttcttgtttattgttggcatggatgatcaaagctggaagagtgaattctatgctcagatagcctctgaaaggctacaagctcatgggaaagaaagaccccagataatctgttacccagaaactggtcactgtattgacccaccttattttcctccttctagagcttctgtgcacgctgttttgggtgaggcaatattctatggaggtgagccaaaggctcactcaaaggcacaggtagatgcctggcagcaaattcaaactttcttccataaacatctcaatggtaaaaaatctgtcaagcacagcaaaatataacattgtagccacagaccagataccattaataaaaatcctattcataaaaaaaaaaaaaaaaaaaactcgta

SEQ ID NO: 310 - DNA, 989 bp, Homo sapiens
ggcacgagcatgccagtgcctactctgtgcctgctgtgggccctggcaatggtgacccggcctgcctcagcggcccccatgggcggcccagaactggcacagcatgaggagctgaccctgctcttccacgggaccctgcagctgggccaggccctcaacggtgtgtacaggaccacggagggacggctgacaaaggccaggaacagcctgggtctctatggccgcacaatagaactcctggggcaggaggtcagccggggccgggatgcagcccaggaacttcgggcaagcctgttggagactcagatggaggaggatattctgcagctgcaggcagaggccacagctgaggtgctgggggaggtggcccaggcacagaaggtgctacgggacagcgtgcagcggctagaagtccagctgaggagcgcctggctgggccctgcctaccgagaatttgaggtcttaaaggctcacgctgacaagcagagccacatcctatgggccctcacaggccacgtgcagcggcagaggcgggagatggtggcacagcagcatcggctgcgacagatccaggagaggtgagcctggcaggggtttggcaggcagggcagttggatggggggcgcacagggcagctggaaaggggccccctcacctgggctgagccacatctccctccccagactccacacagcggcgctcccagcctgaatctgcctggatggaactgaggaccaatcatgctgcaaggaacacttccacgccccgtgaggcccctgtgcagggaggagctgcctgttcactgggatcagccagggcgccgggccccacttctgagcacagagcagagacagacgcaggcggggacaaaggcagaggatgtagccccattggggaggggtggaggaaggacatgtaccctttcatgcctacacacccctcattaaagcagagtcgtggcatctcaaaaaaaaaaaaaaaaaaaaaaa

SEQ ID NO: 311 - DNA, 1524 bp, Homo sapiens
ggcacgagaaggagctgggggatgtgcagggccacggcagggtggtcaccagcagagccgcccctccacctgtggatgaagagccagagtcctctgaggtcgatgctgctggtcggtggcctggtgtctgtgttagcagaacatctccaacacccccagagtcggcaaccaccgttaagtcacttatcaagtcatttgacttgggacgcccaggtggagctggacagaatatttctgtccataagacccccagaagtcccctaagtgggataccagtgaggactgctccagcagctgctgtctctccaatgcagaggcattcgacttacagcagtgtgcggccagccagcagaggggtgactcaacgcttggaccttcctgaccttcccctctcagatattctaaagggaaggactgagaccctgaagccagacccccacctccgcaagagtccctcactagagtcactgagcagacccccgtctctgggctttggggacacaagactgctgagtgcttccacccgggcatggaaaccacaaagcaaactcagtgtggaaagaaaagaccctctggcggccttggcccgggaatacggtggttccaagcgcaatgctctactgaaatggtgccagaagaagacacaaggttatgcgaagaggaatctcttgttggcatttgaagcggctgaaagtgtaggcatcaaacccagcctggaactcagcgagatgctgtacacagaccggcccgactggcagagtgtgatgcagtacgtggcccaaatctacaagtactttgagacgtaaccctggagggcctggggcagccaccattgccacctactgcagcttttcctggaagcgcctgattactgtccactgaccctgctctgcccaccacccagctgcctagacttcaaagacaggctcaatccaagtggaccaacacccaaataagaaacagagtgggtcccacgatgtacctgtctgaaatgcaaatgcagctggactgtaaattggggactctttgatctcttgtgggatgcttctaaagagggcagcctccctccttccagaccaagaccccacacccaggcttgttttgctgattatattgggtggctgaacgaacacattatctgcagaaattcagacaaagaacatctccaaatcagtcttttggttgctgttgttaaaaatatcccggctttgcctttatgaaacctttgcccttggctgggtgtggtagctcgtggctgtaatcccagcactttaggaagccaaggcagtaggatcgtttgagcccaggagttcgaggctgcagtgagctatgagcataccactgcactccagcctgtgtgaaagagccagaccctgtctcaaaaaaatgataaaacccaaaactttgcccttgtgaaccctcccttcccccctccccccccccaaaaaaaaacaacaaaacacaaaaaataaacatttgttccagggcaacctggaaaaaaaaaaaaaaaaaaaaaaaaaaaaa

SEQ ID NO: 312 - DNA, 770 bp, Homo sapiens
gctaaaattcaacaaggtgagtggccggcagtggaaggctgttgctcattctgatttctgttggctctatttcatgctaamccagttttttttgtttgtttgtttccactttataacatatggatttctatgccacactacccgtaactttgaaaaataactttaggctgcagttttcagcaaacaggacagtccttagctgccacatagctcaacataaagtgcacaaaaaacttcacggtgggacagtgaatcataaattcccaaactgacgtgtgtctacagaacagatgagaactgttactcagtgtgtatcttaggagcttttctgcagtttcctcacactccgtcacatttaaaatgtggacacttgtttatttcattagggaggaggcgagggactaatgtccaccctgcccagagtatttcgaatatccttagtgaagaggaggaaagcaagaattctgttctaaaggccaccaggctaagcactagaatcgcattctcttcctgtttgtatgtttatgtcagcagttgccacagatgtgttaatattgttttcctggtagagaattaaggtgttcgttcatctcaaaacaaatcccgtaacctgcacacaaaactccagcttcctaatgcaaagagaagagaatattgattataagctgcttgatattctttttattcccagcccctcaaaataccagcctggaagtctggacattactaaaatttaccagtctcaaaaaaaaaaaaaaaaaaaactcgag

SEQ ID NO: 313 - DNA, 843 bp, Homo sapiens
  misc_feature (2)..(2): n equals a,t,g, or c
  misc_feature (19)..(19): n equals a,t,g, or c
  misc_feature (87)..(87): n equals a,t,g, or c
  misc_feature (89)..(89): n equals a,t,g, or c
  misc_feature (525)..(525): n equals a,t,g, or c
cnagggataaccccaaagntgggaaataaaccctcaattaaagggggaaccaaaaagctgggaagttcccccccgcggtggcggccngntctaggaactagtggaatcccccggggctgcagggaattcggcacggagtgggaatgttgtttgtatgatactatttccacaawatgcattgagacttggtktgtggcctaggacatggtcaattctttytaaatattccgtgaatttctttagtgcatattctccgatgggggctgtggggacagagttctaaatatgcccattagattaaatctcttcattctgttgctcacatcttctatatccttattaatctgtcaatctcttcaagagaggtgttattaaaatctctcactgtatgtgtcactttgcccttaaaattctgatgatttgctttataaatggttataaccattttccaggaagaacattaaagaactttccattggcattatccagtttccctcaaaatactggttttttttattttggctnctaagcagctatgaatccagtttctcagaagcccttgtctcaaggcatttgtttccagattaccttgttagcatccacactatgggctattttagaaaaacaaaaaaagtatcaaaatcatatagctatgattttcctgtgcttgaaggagccttaaagctcatctagtccagccagtatttgttcatccaaattctgccaagaaatctctattgtcaagatattctttaccatctttgggacattctcattattagaaacaaatcctaagaagaaattctgccatakacaacccatccgttctttaaaaaaaaaaaa

SEQ ID NO: 314 - DNA, 617 bp, Homo sapiens
  misc_feature (9)..(9): n equals a,t,g, or c
  misc_feature (513)..(513): n equals a,t,g, or c
  misc_feature (559)..(559): n equals a,t,g, or c
  misc_feature (587)..(587): n equals a,t,g, or c
  misc_feature (602)..(602): n equals a,t,g, or c
atggaaaancaggcaaatcctgaaatgggctggaaaaaagggagggacccagcactyccagggagaaaacttggcattycttgggaatctaacaggatgcagtgaacccaagccttttgaagagctcaccaatcagactgcccttgtctatccatgagcagatgtttgatagtattgcggaggccctctagtgggtatgctgccaagcaactggagtggcacttgggctctaatccagttgtctatccctttcaccctggcatttcatcagccaaacaaaaaccaactaactcagaaaaaaaggaaagcccctcaagggtcctttgaccccgatatctacatagatgctatcggggtcccctgaggggtaccaaacraattcaaagctcgaaatcaaatagctgctggattcaagtctgtccttttcttgtggtctactataaataaaaatgtagactggataaattacatatactataaaaaaaaaaaaaaaaaaaaaactcgagggggggnccggtacccaattcggcctatagtgagtcgtattacaatcatgggncgtcgttttacaaagtcgtgactggggnaaaacctggcgttanccaatttaatcggct

SEQ ID NO: 315 - DNA, 1130 bp, Homo sapiens
ggcacgaggccatttgtataattctttagtaaattgtattaatgggagaatctgtaagttatgtctgaactttcaggttgtcttataattgtctttttccttatgtcagatgttctatgtcataagaataaaatggttcacaccaatacaagtacttagttgtggaaagggagagtagaagataaaaatggagattttcctgtgctacaggcttagtcaagcttatggtctatttaatggttatcaaaggcaattaaatagtgttgaatgttctgcttttacctacatttcatttttcatgtacttagttacaaattgaaccctcttctatttttttcctgctcctgtttctgtttcattttagttttccttttccctgattatcatttaggcatgtaagtgacacccagtagcattgctttaattctgctggtgacagtgccaaagctttactatactctttttgttgtctgttgcttttctcttgctaatttgcttgactagataactaagaattcaggtaagcattagctctttgttcactgagaataatacaacttgcaagataattaatttggattgttctacatgtatttcgtttatttctctttaccttgttcatttattacgacattttgaattatttacatacccatatttcttctttcttttatggctcagctcactatgcttttttttaatactggtagcttcctcaaggttggaaaacaagatctgaatactatagaaaataataactatttttctgtggtcatattaaagatataatggctttggattttggggtgatttttctactgtcagtttaaaaaaaacttgtctatttgcatttgtgtgttattacttctagttaagagtatttccaaggaaagtttcatgttacttattttgtttccatgtctttttccaaaagaacttattttttatattataataaatatcagtggaaaagtaggtttcgttatatagaaattaactttaggctgggtgcagtggctcaagcctatatttgggaggccgaggcaggaggattgcttgaactcaggagttcgaaactagcgtgggcaatgtagcgagacctggtctctacaaaaaaaaaaaaaaaaaaa

SEQ ID NO: 316 - DNA, 3740 bp, Homo sapiens
  misc_feature (957)..(957): n equals a,t,g, or c
actctctaaggcttttttggactcaccaaacaggcttcttgcagtggagatgaatacagatcacttaaggttgactgtgccaaatggcataggggccctgaagctaagggaaatggaacactacttctcacagggcctgtcagttcagctgtttaatgatgggtccaagggcaaactcaatcatttatgtggagctgactttgtgaaaagtcatcagaaacctccacagggaatggaaattaagtccaatgaaagatgctgttcttttgatggagatgcagacagaattgtttattactaccatgatgcagatggccactttcatctcatagatggagacaagatagcaacgttaattagcagtttccttaaagagctcctggtggagattggagaaagtttgaatattggtgttgtacaaactgcatatgcaaatggaagttcaacacggtatcttgaagaagttatgaaggtacctgtctattgcactaagactggtgtaaaacatttgcaccacaaggctcaagagtttgacattggagtttattttgaagcaaatgggcatggcactgcactgtttagtacagctgttgaaatgaagataaaacaatcagcagaacaactggaagataagaaaagaaaagctgctaagatgcttgaaaacattattgacttgtttaaccaggcagctggtgatgctatttctgacatgctggtgattgaagcaatcttggctctgaagggcttgactgtacaacagtgggatgctctctatacagatcttccaaacagacaacttaaagttcaggttgcagacaggagagttattagcactaccratgctgaaagacaagcagttacacccccaggattacaggaggcaatcaatgacctggtgaagaagtacaagctttctcgagcttttgtccggccctctggtacagaagatgtcgtccngagtatatgcagaagcagactcacaagaaagtgcagatcaccttgcacatgaagtgagcttggcagtatttcagctggctggaggaattggagaaaggccccaaccaggtttctgaagataattttcatattcctgagaaactggactttttacaagtctttacaaaactgtcaataataatggcagtactaagagatttataatcataatgtttacaatgcagcctactggattgtctctagatctgtttttcttaaacactaacagaataattctttataaataggtaagccttacacttgttaaagaaatttacctctaatttcagtctcactaatgtaaaatactgggacttaagtatacaattcagtcactaactgtacagttttatgtggggaacaattcatgcaggctactggaaaattaaatcttattaccaactccttgtgatatctttgccatcaccatcacatgagcaagatgatgttttgcagcattccccattgctgatacaaatggagagggcagagaagactttatacaaccagtttttccattgcagagtcttaagaaagattattagatgacttacctatatgactaatgccatcaggaactcagaggtatgaatagggggttgtccatccctcttccatactgaggtggagatgctcatgcaatacttttaaggatgcatggtccagccttcagttattcttcactgctcttggtgaaggtatgtgggagaaaaactaattataatacgtttcccagcctctgatggagaaggaacaccattctgataccagaacatggttaataaggaaaagagaaaaatccccaaccaatcttaattgaaccaagtctgaaaccaatggaaaaaaaaaatgggtagtgtatattttgcaggtttaagacaactcaggacaataaaaacaatggactttacatgtgtatatatatagctctcttaggcaccataatcagtatgagccaacaatatttaaacttgattcaggccacattcagacatttgctcttatatacaaatatttaaattaaatacaatctgaaatgtgttctgttacatacaaaaaaggaaaaactatacaacgcagagcagtgtgtgtgttttaaataattacatttacatgtaagctaaatggaaccagcaatggtgctcaagtttttatcatcccttccagaaaatctttttctaccatctcttctattttttgcctggctttgctggaacatggtttgtggttctccagtttcatgtccttattagggaaggcatttgagtagaggataggactccctgagtgtcctccacatcggcttgtgactttgctgttgaagacttgactgagcacattgaagaacggcaggagctgctccatactgcgcacggtgcagatggtgagcagcaagtgccctggctcccaacccaatgttctccctgagttgtcttcctctggatttttctgcagaaaacaaaaagtgaactggtattaatacaacagacaatgtggtatgttagaaaaattaaaaatatataaactttggcaattggtcaagaaatgaatacaaatgacattaagtttctaactcctgacctgatcaaaacccttggtgcttctgagaccttttactgccatttattagttttacatggagcagtctaacattgtagtaatagttcccaactagaatgcgcagataagcttagttaacagaaatagctttgaacaggaatagagtcaaacataaaagttttatgttgtgctttgtatttactcaaaaagctcccaggtttctgaaccctcactactgtaaccaaggactaggtcacaaaattactacagaaaaaaggaacaaagtgctttatacatttcataatatatccccttttattataattagttaattcccttttatctaaatggcctaaatttgccatgatggtagcagtgtccaaagtgaataattactgtcagtactgcatcacagagaaaggaagggatccctcaggagacactgctgtctccttctgggttgtgctaaacaacatagggaggaaagctggacctggagtcaaaggaattgagttagtgtgctggctctgccatacttacggcacccttgggcaggatatacaaaggttcctcacttataaaatgggacagtctaaaactaccttttagtagagaagtcaaatgagaaggtatgtgaaaactctgtcaactaaatataaagactaataatttgggtattaagaggctagtttgagaagccacctgaattacacaaacacagctacagacatcattctgtctagagaaagataagagagaacaggttggttgaacttgggcagaatcacagatacaattccacactaaagaatgaaaataagcaatgaactagacagaaggaagaaatcatgaagacttaggaagcagaattacaatctgtcatattaacaaatggagtttgccttctaagatcagatgttgctcagaaactttcattgtttacctaataatttaatatcactagtttcctagtgggtcaagcagatgcaaaatccagcttattttcttctatgtgctctcaagcttattgcttattttaaagtaaaatcctgaaaaaggaaaatattaggttggtgcaaacgtaattgcggtttttgcattgttgaaatttgccgttttatattggagtacattcttaaataaatgtggttatgttatacaaaaaaaaaaaaaaaaaactcgag

SEQ ID NO: 317 - DNA, 997 bp, Homo sapiens
  misc_feature (963)..(963): n equals a,t,g, or c
cccgactctaggccggaagcgcgcggagaccatgtagtgagaccctcgcgaggtctgagagtcactggagctaccagaagcatcatggggccctggggagagccagagctcctggtgtggcgccccgaggcggtagcttcagagcctccagtgcctgtggggctggaggtgaagttgggggccctggtgctgctgctggtgctcaccctcctctgcagcctggtgcccatctgtgtgctgcgccggccaggagctaaccatgaaggctcagcttcccgccagaaagccctgagcctagtaagctgtttcgcggggggcgtctttttggccacttgtctcctggacctgctgcctgactacctggctgccatagatgaggccctggcagccttgcacgtgacgctccagttcccactgcaagagttcatcctggccatgggcttcttcctggtcctggtgatggagcagatcacactggcttacaaggagcagtcagggccgtcacctctggaggaaacaagggctctgctgggaacagtgaatggtgggccgcagcattggcatgatgggccaggggtcccacaggcgagtggagccccagcaaccccctcagccttgcgtgcctgtgtactggtgttctccctggccctccactccgtgttcgaggggctggcggtagggctgcagcgagaccgggctcgggccatggagctgtgcctggctttgctgctccacaagggcatcctggctgtcagcctgtccctgcggctgttgcagagccaccttagggcacaggtggtggctggctgtgggatcctcttctcatgcatgacacctctaggcatcgggctgggtgcagctctggcagagtcggcaggacctctgcaccagctggcccagtctgtgctagagggcatggcagctggcacctttytytatatcacctttytggaaatcctgctntttcatcccaaatttaagggggtttcaagaagaa

SEQ ID NO: 318 - DNA, 1770 bp, Homo sapiens
gctgagtgtgagctgagcctgccccaccaccaagatgatcctgagcttgctgttcagccttgggggccccctgggctgggggctgctgggggcatgggcccaggcttccagtactagcctctctgatctgcagagctccaggacacctggggtctggaaggcagaggctgaggacaccagcaaggaccccgttggacgtaactggtgcccctacccaatgtccaagctggtcaccttactagctctttgcaaaacagagaaattcctcatccactcgcagcagccgtgtccgcaggagctccagactgccagaaagtcaaagtcatgtaccgcatggcccacaagccagtgtaccaggtcaagcagaaggtgctgacctctttggcctggaggtgctgccctggctacacgggccccaactgcgagcaccacgattccatggcaatccctgagcctgcagatcctggtgacagccaccaggaacctcaggatggaccagtcagcttcaaacctggccaccttgctgcagtgatcaatgaggttgaggtgcaacaggaacagcaggaacatctgctgggagatctccagaatgatgtgcaccgggtggcagacagcctgccaggcctgtggaaagccctgcctggtaacctcacagctgcagtgatggaagcaaatcaaacagggcacgaagttccctgatagatccttggagcaggtgctgctaccccacgtggacaccttcctacaagtgcatttcagccccatctggaggagctttaaccaaagcctgcacagccttacccaggccataagaaacctgtctcttgacgtggaggccaaccgccaggccatctccagagtccaggacagtgccgtggccagggctgacttccaggagcttggtgccaaatttgaggccaaggtccaggagaacactcagagagtgggtcagctgcgacaggacgtggaggaacgcctgcacgcccagcactttaccctgcaccgctcgatctcagagctccaagccgatgtggacaccaaattgaagaggctgcacaaggctcaggaggccccagggaccaatggcagtctggtgttggcaacgcctggggctggggcaaggcctgagccggacagcctgcaggccaggctgggccagctgcagaggaacctctcagagctgcacatgaccacggcccgcagggaggaggagttgcagtacaccctggaggacatgagggccaccctgacccggcacgtggatgagatcaaggaactgtactccgaatcggacgagactttcgatcagattagcaaggtggagcggcaggtggaggagctgcaggtgaaccacacggcgctccgtgagctgcgcgtgatcctgatggagaagtctctgatcatggaggagaacaaggaggaggtggagcggcagctcctggagctcaacctcacgctgcagcacctgcagggtggccatgccgacctcatcaagtacgtgaaggactgcaattgccagaagctctatttagacctggacgtcatccgggagggccagagggacgccacgcgtgccctggaggagacccaggtgagcctggacgagcggcggcagctggacggctcctccctgcaggccctgcagaacgccgtggacgccgtgtcgctggccgtggacgcgcacaaagcggagggcgagcgggcgcgggcggccacgtcgcggctccggagccaagtgcaggcgctggatgacgaggtgggcgcgctgaa

SEQ ID NO: 319 - DNA, 1167 bp, Homo sapiens
  misc_feature (432)..(432): n equals a,t,g, or c
gggggtggggcaggcgacggtggggaagatggcgtaccagagcttgcggctggagtacctgcagatcccaccggtcagccgcgcctacaccactgcctgcgtcctcaccaccgccgccgtgcagttggaattgatcacaccttttcagttgtacttcaatcctgaattaatctttaaacactttcaaatatggagattaatcaccaacttcttattttttgggccagttggattcaattttttatttaacatgatttttctatatcgttactgtcgaatgctagaagaaggctctttccgaggtcggacagcagactttgtatttatgttcctttttggtggattcttaatgaccctttttggtctgtttgtgagcttagttttcttgggccaggcctttacaataatgctcgtctatgtgtggagccgaangaacccctatgtccgcatgaacttcttcggccttctcaacttccaggccccctttctgccctgggtgctcatgggattttccttgttgttggggaactcaatcattgtggaccttttgggtattgcagttggacacatatattttttcttggaagatgtatttcccaatcaacctggtggaataagaattctgaaaacaccatctattttgaaagctatttttgatacaccagatgaggatccaaattacaatccactacctgaggaacggccaggaggcttcgcctggggtgagggccagcggcttggaggttaaagcagcagtgccaataatgagacccagctgggaaggactcggtgatacccactgggatcttttatcctttgttgcaaaagtgtggacacttttgacagcttggcagattttaactccagaagcactttatgaaatggtacactgactaatccagaagacatttccaacagtttgccagtggttcctcactacactggtactgaaagtgtaatttcttagagccaraaaactggagaaacaaatatcctgccacctctaacaagtacatgagtacttgatttttatggtataagcagagccttttcttcctcttcttgatagatgaggccatggtgtaaatggaagtttcagagaggacaaaataaaacggaattccatttttctctcactgtaaaaaaaaaaaaaaaaagggcggccgc

SEQ ID NO: 320 - DNA, 1618 bp, Homo sapiens
ccacgcgtccgcaaggagccagaggccatgcagtggctcagggtccgtgagtcgcctggggaggccacaggacacagggtcaccatggggacagccgccctgggtcccgtctgggcagcgctcctgctctttctcctgatgtgtgagatccctatggtggagctcacctttgacagagctgtggccagcgactgccaacggtgctgtgactctgaggaccccctggatcctgcccatgtatcctcagcctcttcctccggccgcccccacgccctgcctgagatcagaccctacattaatatcaccatcctgaagggtgacaaaggggacccaggcccaatgggcctgccagggtacatgggcagggagggtccccaaggggagcctggccctcagggcagcaagggtgacaagggggagatgggcagccccggcgccccgtgccagaagcgcttcttcgccttctcagtgggccgcaagacggccctgcacagcggcgaggacttccagacgctgctcttcgaaagggtctttgtgaaccttgatgggtgctttgacatggcgaccggccagtttgctgctcccctgcgtggcatctacttcttcagcctcaatgtgcacagctggaattacaaggagacgtacgtgcacattatgcataaccagaaagaggctgtcatcctgtacgcgcagcccagcgagcgcagcatcatgcagagccagagtgtgatgctggacctggcctacggggaccgcgtctgggtgcggctcttcaagcgccagcgcgagaacgccatctacagcaacgacttcgacacctacatcaccttcagcggccacctcatcaaggccgaggacgactgagggcctctgggccaccctcccggctggagagctcagctgatacggcatcctgcgagaagacctgccctcctcactgggatccccttcctgcctcctcccagggctctgccagggccttgctcagtcccttccaccaaagtcatctgaacttccgtttcccagggcctccagctgccctcagacactgatgtctgtccccaggtgctctctgcccctcatgcccctctcaccggcccagtgccccgactctccaggctttatcaaggtgctaaggcccgggtgggcagctcctcgtctcagagccctcctccggcctggtgctgcctttacaaacacctgcaggagaagggccacggaagccccaggctttagagccctcagcaggtctggggagctagagcaaaggagggacctcaggccttccgtttcttcttccagggtggggtggcctggtgttcccctagccttccaaacccaggtggcctgcccttctccccagagggaggcggcctccgcccattggtgctcatgcagactctggggctgaggtgccccggggggtgatctctggtgctcacagtcgagggagccgtggctccatggccagatgacggaaacagggtctgaccaagtgccaggaagacctgtgctataaaccaccctgcctgatcctgcccctgcctgaccccgccacgccctgccgtccagcatgattaaagaatgctgtctcctcttggaaaaaaaaaaaaaaaaa

SEQ ID NO: 321 - DNA, 1338 bp, Homo sapiens
cccacgcgtccggttcccccatctgtctctcaggagcgagatctgatcgctgaatttgcccaagtcacaaattggtccagctgctgcttgcgtgtctttgcatggcacccccacaccaacaagtttgcagtggccctgctagatgactcagtccgtgtgtataatgccagcagcaccatagtcccctccctgaagcaccggctgcagcgaaatgtggcgtctctggcctggaagccccttagtgcctctgtcttggctgtggcctgccagagctgcattcttatctggaccctggaccctacctccttgtctacccgaccctcttctggctgtgcccaagtgctgtctcaccctgggcatacacctgttaccagcttggcctgggcccccagtggggggcggctgctctcagcttcaccgtggatgctgctatccgggtatgggatgtctcaacagagacctgtgtcccccttccctggtttcgaggaggtggggtgaccaactgctctggtccccagacggcagcaaaatcctggctaccactccttcagctgtctttcgagtctgggaggcccagatgtggacttgtgagaggtggcctactctatcagggcgctgtcagactggctgctggagcccagatggcagccgactgctgttcactgtattgggagagccactgatttactccctgtcttttccagaacgttgtggtgagggaaaggggtgcgttggaggtgcaaagtcagcaacgattgtggcagatctgtctgagacaacaatacagacaccagatggtgaggagaggcttgggggagaggctcactccatggtctgggaccccagtggggaacgtctggctgtgcttatgaaaggaaagccaagggtacaggatggtaaaccagtcatcctcctttttcgcactcgaaacagccctgtgtttgagctccttccctgtggcattatccagggggagccaggagcccagccccagctcatcactttccatcttccttcaacaaaggggccctgctcagtgtgggctggtccacaggccgaattgcccacatcccgctgtactttgtcaatgcccagtttccacgttttagcccagtgcttgggcgggcccaggaaccccctgctgggggtggaggctctattcatgacctgcccctctttactgagacatccccaacctctgccccttgggaccctctcccagggccaccacctgttctgccccactccccacattcccacctctaagaataaataagttttccttttgttttccaaaaaaaaaaaaaaaaaaaaaaaaaaaaaaaaaaaaaaaaaaaa

SEQ ID NO: 322 - DNA, 1892 bp, Homo sapiens
ccacgcgtccgcgggaccggacggatcttctccggccatgaggaagccagccgctggcttccttccctcactcctgaaggtgctgctcctgcctctggcacctgccgcagcccaggattcgactcaggcctccactccaggcagccctctctctcctaccgaatacgaacgcttcttcgcactgctgactccaacctggaaggcagagactacctgccgtctccgtgcaacccacggctgccggaatcccacactcgtccagctggaccaatatgaaaaccacggcttagtgcccgatggtgctgtctgctccaacctcccttatgcctcctggtttgagtctttctgccagttcactcactaccgttgctccaaccacgtctactatgccaagagagtcctgtgttcccagccagtctctattctctcacctaacactctcaaggagatagaagcttcagctgaagtctcacccaccacgatgacctcccccatctcaccccacttcacagtgacagaacgccagaccttccagccctggcctgagaggctcagcaacaacgtggaagagctcctacaatcctccttgtccctgggaagccaggagcaagcgccagagcacaagcaggagcaaggagtggagcacaggcaggagccgacacaagaacacaagcaggaagaggggcagaaacaggaagagcaagaagaggaacaggaagaggagggaaagcaggaagaaggacaggggactaaggagggacgggaggctgtgtctcagctgcagacagactcagagcccaagtttcactctgaatctctatcttctaacccttcctcttttgctccccgggtacgagaagtagagtctactcctatgataatggagaacatccaggagctcattcgatcagcccaggaaatagatgaaatgaatgaaatatatgatgagaactcctactggagaaaccaaaaccctggcagcctcctgcagctgccccacacagagccttgctggtgctgtgctattcgatcgtggagaatacctgcatcataacccccacagccaaggcctggaagtacatggaggaggagatccttggtttcgggaagtcggtctgtgacagccttgggcggcgacacatgtctacctgtgccctctgtgacttctgctccttgaagctggagcagtgccactcagaggccagcctgcagcggcaacaatgcgacacctcccacaagactccctttgcagccccttgcttgcctcccagagcctgtccatcggcaaccaggtagggtccccagaatcaggccgcttttacgggctggatttgtacggtgggctccacatggacttctggtgtgcccggcttgccacgaaaggctgtgaagatgtccgagtctctgggtggctccagactgagttccttagcttccaggatggggattccctaccaagatttgtgacacagactatatccagtacccaaactactgttccttcaaaagccagcagtgtctgatgagaaaccgcaatcggaaggtgtcccgcatgagatgtctgcagaatgagacttacagtgcgctgagccctggcaaaagtgaggacgttgtgcttcgatggagccaggagttcagcaccttgactctaggccagttcggatgagctggcgtctattctgcccacaccccagcccaacctgcccacgttctctattgttttgagaccccattgctttcaggctgccccttctgggtctgttactcggcccctactcacatttccttgggttggagcaacagtcccagagagggccatggtgggagtgcgccctccttaaaagatgactttacataaaatgttgatcttcaaaaaaaaaaaaaaaaaaaaa

SEQ ID NO: 323 - DNA, 813 bp, Homo sapiens
gaagaaggtacgctgcaggtaccggtccggaattcccgggtcgacccacgcgtccgccaaaagcagacatagcttcagatgcagcttgatccagggctcagatgccatgatcagaatccaattcttgcatctgtttctttgggttggcttcattttcaggcagcccccttcctcatatcctcaagatggcagagacagcccatggtctttcccttgcagagacagatcaccaggaaacaatacctctatccctagccatgaaacagtcttgaactttattctgacttgatcagccaagtccctgttggaaccatcactgcctagcttaggcctgagacagtgctgcacctctactaccaaaggccgggctggccttccctaaagtgtatgtgctgcgtgggggagaggtacggatctgaaccaaaacgagggctgtccagcgtcagcaaatatctcccgcagtcccagtgcctccagcaggaggcaaagcatcaacccctccgtctggctcctctactgaaaattccctcagcagcctcacaggccttaggcttgtcttagctacttcttcatctacttttttgctttcttaattatttttcttttcttttttcttattttattttattttattttagatggagtttcgctccgtcgcccaggctgaagtgcagtggcgtgatcttggctcgttgcaacctccacctcccgggttcaggagaatcgcttgagccccaggaggcggaggttgtgggaagccaagatcgcaccactgcactccagcctgggcaacaagagcagaacgccatctca

SEQ ID NO: 324 - DNA, 1038 bp, Homo sapiens
ccacgcgtccgagacatttaaactagattcccagtcctctccttcaaaagcttggtctttgtttttcctatagggaaaaaagtcaaaataagttccaaaaactatcctcaaagtagtattgtgcttgtagtaaatgaaggttggatggatggatactgacaatggtggcaggcatttcaagccttttaaattagtactttttgtcgtcttgcttattaaaattttgttaattttagcaaagaccaattgttgtgataaactggtgttttttggatgcttcaagcacacgttaaccaattttttaattccccttttggttcctcccattgttctaaaataggactttcatattattaaaacctcaaaagatgatccacccaggatgaacaaagatcaccaaggggaaagaaaacattttttatctttacagaaaacatgttaagattatatatagatgtattctttacattggatattgtattagagtcctccttacaagaaatgaaatagtttttagcactcttagcattagagttcctagattggtgttgatagctacagttttaaaatgtataacctgaaaatgaaggttaattttgcattgtaagagcacatttgatctatgtaaaaagtgtccatttggtgtatttttttaaaaaagagaaagcactttcatattaagtagcatgtgtatgaatttagattttcatatttgttgtgtctgtattcagtgaagtaaattgagcatttaaatgtttgttgatggcaacattaactattaaattaaagcaccttatactctgctgcttaacttgcttgtaattgcacctttgttacctgcacattttcatatagaatattgttgtaacattgcttcatgtgggtctggatggaagattagtgggcctacaggatcatttatttatattgtttatattacaataatatattgtagatcagttgtaagttcatttctttacaaataaaagcctcttccatttgaaaaaaaaaaaaaaaaaaaaaaaaaaaaaaaaaaaa

SEQ ID NO: 325 - DNA, 2383 bp, Homo sapiens
  misc_feature (538)..(538): n equals a,t,g, or c
gagcccacgagaggcagcgccatggcggagcagacctactcgtgggcctattccctggtggattccagtcaagtgtctacatttctgatttccattcttcttatagtctatggtagtttyaggtcccttaatatggactttgaaaatcaagataaggagaaagacagtaatagttcttctgggtctttcaatggcaacagcaccaataatagcatccaaacaattgactctacccaggctctgttccttccaattggagcatctgtctctcttttagtaatgttcttcttctttgactcagttcaagtagtttttacaatatgtacagcagttcttgcaacgatagcttttgcttttcttctcctcccgatgtgccagtatttaacaagaccctgctcacctcagaacaagatttcctttggttgctgtggacgtttcactgctgctgagttgctgtcattctctctgtctgtcatgctcgtcctcatctgggttctcactggccattggcttctcatggatgcactggccatgggcntctgtgtcgccatgatcgcctttgtccgcctgccgagcctcaaggtctcctgcctgcttctctcagggcttctcatctatgatgtcttttgggtatttttctcagcctacatcttcaatagcaacgtcatggtgaaggtggccactcagccggctgacaatccccttgacgttctatcccggaagctccacctggggcccaatgttgggcgtgatgttcctcgcctgtctctgcctggaaaactggtcttcccaagctccactggcagccacttctccatgttgggcatcggagacatcgttatgcctggtctcctactatgctttgtccttcgctatgacaactacaaaaagcaagccagtggggactcctgtggggcccctggacctgccaacatctccgggcgcatgcagaaggtctcctactttcactgcaccctcatcggatactttgtaggcctgctcactgctactgtggcgtctcgcattcaccgggccgcccagcccgcccttctctatttggtgccatttactttattgccactcctcacgatggcctatttaaagggcgacctccggcggatgtggtctgagcctttccactccaagtccagcagctcccgattcctggaagtatgatggatcacgtggaaagtgaccagatggccgtcatagtccttttctctcaactcatggtttgtttcctcttagagctggcctggtactcagaaatgtacctgtgtttaaggaactgccgtgtgactggatttggcatttaaagggagctcgtttgcaggagagaggtgctggagccctgtttggttccttctcttcctgcggatgtagaggtggggccccttccaagagggacaggcctctccccagcgcgccttcctcccacgtttttatggatctgcaccagactgttaccttctgggggagatggagatttgactgtttaaaaactgaaaacagcgaggagtctttctagaacttttgaacactaaaaggatgaaaaaaattagcaaaccgaagtttcttcaatgacccctcgagaactttgggaccagtttcctatrggggactcagtttcagagaactgagacagaagctcttctgtcgttatattcttctttcctttttttggatttattaaatattttctgtggtgtgaagtgacttattaaatccacagacattgagtgacttcttacaacatccacataagratttgttgtaatgagttcatgtccacccagatgttgtgttggcagtgaacaagggcacggtttttatacatacgtacatatatatatataaacacacacatagatatatatgaataaacaaaaatgaaatcctgctaagatcacgctgtgtagctgacaggggcttgctgtcgttttgagcatgtcgagcagtttactgtggcttccttgtatatggataagctgctgtccttccccttcacaactgaccccgcagttacaaactagtatagcatttgtgctgattgatgatagactcatggacttcaggagcccttacttggttttgatcagtgtagcaaattagggatgaagagttcaaaccttttggccctttctttcttttctaggcttctccctcgcagggtgttccgtagtttcttctcgagccaatgcatgtattatagcagcaggtgtctttgtgctttctcatcatagtaacgtactacttgtaaatacatttttctattttctatttttttgtatttttttttgacattttgtttcattggtgtgctgtatattttccatgccctcactcctttaagaaaaaaaaaaaaaaaggaaaaaagcaacac

SEQ ID NO: 326 - DNA, 2081 bp, Homo sapiens
  misc_feature (538)..(538): n equals a,t,g, or c
gggttctcaatggaaaaatattggtagacatcagcaacaacctcaaaatcaatcaatatccagaatctaatgcagagtaccttgctcatttggtgccaggagcccacgtggtaaaagcatttaacaccatctcagcctgggctctccagtcaggagcactggatgcaagtcggcaggtgtttgtgtgtggaaatgacagcaaagccaagcaaagagtgatggatattgttcgtaatcttggacttactccaatggatcaaggatcactcatggcagccaaagaaattgaaaagtaccccctgcagctatttccaatgtggaggttccccttctatttgtctgctgtgctgtgtgtcttcttgtttttctattgtgttataagagacgtaatctacccttatgtttatgaaaagaaagataatacatttcgtatggctatttccattccaaatcgtatctttccaataacagcacttacactgcttgctttggtttactccctggtgttattgctgccattctacaactgtaccgaggncacaaaataccgtcgattcccagactggcttgaccactggatgctttgccgaaagcagcttggcttggtagctctgggatttgccttccttcawgtcctctmcmcacttgtgattcctattcgatattatgtacgatgragattgggaaacttaaccgttacccagscaatactcaagaaggagaatccatttagcacytcytcagcctggctcagtgattcatatgtggctttgggaatacttgggttttttctgtttgtactcttgggaatcacttctttgccatctgttagcaatgcagtcaactggagagagttccgatttgtccagtccaaactgggttatttgaccctgatcttgtgtacagcccacaccctggtgtacggtgggaagagattcctcagcccttcaaatctcagatggtatcttcctgcagcctacgtgttagggcttatcattccttgcactgtgctggtgatcaagtttgtcctaatcatgccatgtgtagacaacacccttacaaggatccgcagggctgggaaaggaactcaaaacactagaaaaagcattgaatggaaaatcaatatttaaaacaaagttcaatttagctggatttctgaactatggttttgaatgtttaaagaagaatgatgggtacagttaggaaagtttttttcttacaccgtgactgagggaaacattgcttgtctttgagaaattgactgacatactggaagagaacaccattttatctcaggttagtgaagaatcagtgcaggtccctgactcttattttcccagaggccatggagctgagattgagactagccttgtggtttcacactaaagagtttccttgttatgggcaacatgcatgacctaatgtcttgcaaaatccaatagaagtattgcagcttccttctctggctcaagggctgagttaagtgaaaggaaaaacagcacaatggtgaccactgataaaggctttattaggtatatctgaggaagtgggtcacatgaaatgtaaaaagggaatgaggtttttgttgttttttggaagtaaaggcaaacataaatattaccatgatgaattctagtgaaatgaccccttgactttgcttttcttaatacagatatttactgagaggaactatttttataacacaagaaaaatttacaattgattaaaagtatccatgtcttggatacatacgtatctatagagctggcatgtaattcttcctctataaagaataggtataggaaagactgaataaaaatggagggatatccccttggatttcacttgcattgtgcaataagcaaagaagggttgataaaagttcttgatcaaaaagttcaaagaaaccagaattttagacagcaagctaaataaatattgtaaaattgcactatattaggttaagtattatttaggtattataatatgctttgtaaattttatattccaaatattgctcaatatttttcatctattaaattaatttctagtgtaaaaaaaaaaaaaaaaagggcggccgc

SEQ ID NO: 327 - DNA, 646 bp, Homo sapiens
tcgacccacgcgtccgataactttttcaagcaatatcagtgagtgggtcccatcgacagggttccaggacctggaacactttaacagaaggaaatgccgaagcagcttgcacagttgctttacagacttccaagaggctgattctggcttcaagatggagccttggagttggttttttttttttttttttttcttccctcaaagaacctgcggttgcgctttgtgtgttttgtttttgttttccatttgggggccccatgggaaagagcttctgaactctttcctttatgaactcccactgtgttcctataaaggcccttttctttcttagtgttgtaagttacattttcattatgccccatcacatcttctttactgtaaaaatattaaaaagctgtttccaagtgggacagctaatgaagctctaattattgcagacatatttttgagatgtaaaaaaaaaaatttaaagttaaatgataagtcttagaggcgagtgaggaataaaatggatgtaaacatttacatgggatgcattagaattctgctgtgtgtactgtcttttggttgaaacaaattatgaacagtgactaataataaaaagtcaatacccaawraaaaaaaaaaaaaaaaaaaaagggcggcc

SEQ ID NO: 328 - DNA, 312 bp, Homo sapiens
aattcccgggtcgacccacgcgtccgtgatgagtggatttgtactcttacccaggtcctgagggccagcccacccagcatccccacccctgatgacgctgtccctacaactggctgaactggtgcattttgtgtgtgccttccagagccagtggactggtgtgtatccaatgatgccacctctgaaacctacagaaccactatgctttgcatgtgtaccctgcagggtctgagggccaggctgtctggtagctctgctcctgggtgacagagcaagactctgtctcaaaaaaaaaaaaaaagggcggccgct

SEQ ID NO: 329 - DNA, 826 bp, Homo sapiens
  misc_feature (726)..(726): n equals a,t,g, or c
ggtcgacccacgcgtccggctccctttgttttggtggcagccttcttgtgctgtatacttgttccctagggtgtataataatatgtgcactagagtgctaggtaccctaccacattgctgggaccttgccacactgctgcagccttccagtaggatatgggggaatgtcagtgaggctccagggatgtagatatgtagggaatgttggaccccagggcaacatgcaatctggtaggagttgggctctcaaaatggtgctgctgtgtaacagctgcttgggtcttggggtagggagtgtaggacccagcatgagctccctctttggagcagtgctgtctgagactccaggcagctccgtgtattagtctcaggacctgcaaaggcctaggggctctttttgggtaggactgcaggagtctccatggtgggaatgtgaaccactggaaatctctcatttaccatttccctgtactggagatgctttctgggctcccagatgatactarctgggctggttgcctcamttccttctccctctgtgcataaggcattttctgtcacttctctgctgaactctagtgttctttcttagaggctgtactcaaagtttcattatccattcagtatttttattcttctttgtggaggtggcaagtgctaggtgcctctagtcaatcatcttgaagccccctgttatgttaaagtctttaatggaaaaagaagacnacatgcatgaccaggcagatactttgagcagagtcataggaactgctaaaaaaaaaaaaaaaaaaaaaaaaaaaaaaaaaaaaaaaaaaaaagggcggcc

SEQ ID NO: 330 - DNA, 770 bp, Homo sapiens
  misc_feature (770)..(770): n equals a,t,g, or c
atgtgctgggctcaggaaaagttcaacccatcaataggttatcacatatatatactctgggactgattggaccacattttctcactgaattgactgattgatgaattcagttggcagaattaactcttctatgtctacatgaagtgccatttagaaataatcaactcttaatcagcctgggatagtcagtactaaaagcaccttcatgagctgtgaaaaatttaatgcatttatttacatatttagttttaaattttagtatattgttagttgaggtatagtttccaaacaaagagccgtgaaatgtttagtaactgtctctgtacctctggatgaggacagctcagccgggaatggagggggactgggtgaggagaccagaatgtcagtgtggccacgcagcacacttttgttttgtcttctgtccttgagcactggcttgttcctggataaactaggcataataatacctatcctgctgtgtgggtggaaggttaaatgtgataatgatgtgtgtgagatgcctgcacagtgcctggaggtattgaagaattatttgctgccttttctttttctacctaccacttacccgctacccccgggtgctacatgttagaaaacactgtgtaaagtgtggatgcttctgaaaaatctccctgccagcagttagtgccaatagcgtgcagaaaataagatgcaatgatttggcttcttttctgtttggcaataagaagcttatttgcacatagcctgatttctttcaatctgcn

SEQ ID NO: 331 - DNA, 1276 bp, Homo sapiens
tcgacccacgcgtccgcccacgcgtccgcttaatatctgtattcccagttgcctacgggataaaagcccaaactccttagcagagaatataaggccctagctcccacattatttcagcagtcatcacccactatgttcctcaagactgcagccattaactttttagagttccctaaacatgctgtttactttcatgcctctatcccgttgtctgtggaatgacttccctccttgcccttttcagtgctacaaacccctattctttaagacatagtacaaatggcatctcctggttggcatctttcctgcaggcctacaggcctagtaagtatcttcctcctctgtgctcctgcatacctccattcctttgttatgacatctataactttaataagtactaaaatctgtagtcctacaaaactcaggcatagaactcatttcctttatggytctataatggaactttacccaactctcacgttccccatgaccacagatgtggaaaatttgaatcttgacagttcaaggtgaactcagtcattttcagagttttcatagtcccttcaagattgaaactcagttcctgcaatgtttgccccttttctcctcttttgtctatgctgggagaggcattgtggggagggttgtctggcttatggctcccattgtcctctgcttgataaaccacctgagctttggtcattagcagtctcctgtgcctttcacactcaggtagtgtctgcacaggccactctatgtcttttccatgctgaagaaattcctttccaggccatgtctgtgttcctcctgccacacaggaaatttttgagcatgttcatcctccaagctgaatgcagggtcttgggtagtggtcctcacctgctccagagacttctccagccattgccactctccactcaggtgatgaagctggatgagggactgcacccaccagagtcaggccagggtcctgtctgctctgtgagtccctccaattgttcttattccgagatttccattgttctgccccctcttgactcccagggctctcaagggagtgggggtagtgaagggagccctttcccaagctcccccaagagctctagtcacatcacttctgatacttcttttcccaccagctggaagaaagaactttcatttgtcttgaaatgagaaaaatgttcttagaatattttgtattactctctgctctgtcatttatggtaaacaaaataaaataataaaaaaaaaaaaaaaaaaaaaaaaaagggcggcc

SEQ ID NO: 332 - DNA, 1237 bp, Homo sapiens
  misc_feature (942)..(942): n equals a,t,g, or c
  misc_feature (949)..(1184): n equals a,t,g, or c
  misc_feature (1187)..(1187): n equals a,t,g, or c
  misc_feature (1194)..(1194): n equals a,t,g, or c
  misc_feature (1196)..(1196): n equals a,t,g, or c
  misc_feature (1218)..(1218): n equals a,t,g, or c
gcaacctgggcttttatacagaagaatacgaatcacaggtgtgtgagcatctacttaattaatttgcttacagccgatttcctgcttactctggcattaccagtgaaaattgttgttgacttgggtgtggcaccttggaagctgaagatattccactgccaagtaacagcctgcctcatctatatcaatatgtatttatcaattatcttcttagcatttgtcagcattgaccgctgtcttcagctgacacacagctgcaagatctaccgaatacaagaacccggatttgccaaaatgatatcaaccgttgtgtggctaatggtccttcttataatggtgccaaatatgatgattcccatcaaagacatcaaggaaaagtcaaatgtgggttgtatggagtttaaaaaggaatttggaagaaattggcatttgctgacaaatttcatatgtgtagcaatatttttaaatttctcagccatcattttaatatccaattgccttgtaattcgacagctctacagaaacaaagataatgaaaattacccaaatgtgaaaaaggctctcatcaacatacttttagtgaccacgggctacatcatatgctttgttccttaccacattgtccgaatcccgtataccctcagccagacagaagtcataactgattgctcaaccaggatttcactcttcaaagccaaagaggctacactgctcctggctgtgtcgaacctgtgctttgatcctatcctgtactatcacctctcaaaagcattccgctcaaaggtcactgagacttttgcctcacctaaagagaccaaggctcagaaagaaaaattaagatgtgaaaataatgcataaaagacaggattttttgtgctaccaattctgggctttattggaccataaagtctattatagcttggaaggttaaaaaaaaaaaanaaaaagnnnnnnnnnnnnnnnnnnnnnnnnnnnnnnnnnnnnnnnnnnnnnnnnnnnnnnnnnnnnnnnnnnnnnnnnnnnnnnnnnnnnnnnnnnnnnnnnnnnnnnnnnnnnnnnnnnnnnnnnnnnnnnnnnnnnnnnnnnnnnnnnnnnnnnnnnnnnnnnnnnnnnnnnnnnnnnnnnnnnnnnnnnnnnnnnnnnnnnnnnnnnnnnnnnnnnnnnnnnnnnnnnnnnnnnnnnnnccnaatgggncncgcccctggtttccgggccccntttaatccccgggcggggt

SEQ ID NO: 333 - DNA, 1045 bp, Homo sapiens
tcgacccacgcgtccgagatgcacgaactgattaattcatttgttctagggctctgaggagtcgtctacttaaccttttgggttgctggtcttacctatgttctcacgcctccattttctcacccactcactcagccttctccatttaccctcccaagtctttggcgaggtacactcatcctgcgtatcatcactgccatgtcctgataccccagctctgccatattgcccttcttttttgcggtatgatgaccacatagaggcccaacctcttaaacacatcaataccaatgatcacatttcaatctagacttctaagcaacggctgaaatctctccaggccaaaggagagtttgtatcaccttaccagaagcttctccggaacaattggccagaagcctagagttcagaaacccagacacatgcagtaagcaatttccagtttctctataatttagaagaggacaccatgatatgtaatgcggggtctggaggttggaatgcctccataaaacacctgccatattttttggtccaagccttagtgttataaatcaagaaggctgtaaataagacttcagcyttttgtgctggtgaagtttgtttcctttaacttatcctccaagagtaccgaggcaccgagatctaccatttgccacctcatccatttctatggcagaacaccgcctggggagaggaattcgattccccgaatcaggatgactgtgtggggcttctgcaaaggttgcatcacgagtcctatttctgagctatctgagatccccattaagaatttaaaagcaataaaataacggagatttttgactatcaacatgaatgctgtgtgggcttttacagttaatgattgcccttgagtgctgaataatctgtggcctgaaaaaagaaatgttcttatcttctaaatttggtaatcaagaacaagatagagtaatgaatgtaaaggaacactgttgcaagttgagtgtttccaaaaaaaaaaaaaaaaaaagggcggccgctctagtaggataccaagtctttacgt

SEQ ID NO: 334 - DNA, 1223 bp, Homo sapiens
gctgctccgtttttcccccatctttgtggttttatctacctttggtctttgatgatggtgatgtacagatggggttttggtgtggatgtcctttctgtttgttagttttccttctaacagtcaggacccgcagcttcargtctgttggagtttgctggaggtccactccagaccctctttgcctgggtatcagcagcagaagctgcagaacagcggatattggtgaacagcagatgttgctgcctgatcgttcctctggaagttttgtctcggagtacccagccatgtgaggtgtcagtctacccctactgggggatgcctcccagttaggctacttgggagtcagggacgcacttgaggaggcactctgtctgttctcagatgtccagctgtgtgctggtagaaccagtgctctyttcaaggctktcagacagggacgtttaagtctgcagaggattctgctgccttttgtttggctgtgccctgccccccagaggtggagtctacagaggcaggcaggcctccttgaattgcggtgggctccaccgagttcgagtttcctggccgctttgtttaccccctcaagcctcggcaatggtgggcgcccctcccccagcctcactgccgscttgcagtttgatctcagactgctgtgctagcaatgaktraggctctgtgggtgtagraccctctgagccaggcatgggatataatctcctggtgtgcgatttgctaagacccattggaaaagcgtagtattagggtgggaatgacccaattttccaggtgccgtctgtcacccctttctttgactaggaaagggaattccctgacccgttgtgcttcccgggtgaggcaatgcctcgccctgcttcagctcaagcttggtgcgctgcacccactgtcttgcacccactttccaacactccctagtgagatgaacccggtacctcagttggaaatgcagaaatcacacgtcttctgcgtcctcacgctgggagctgtagactggagctgttcctattcggccatcttggctccacctgtcgagatattttacattaactttctatgacatacttatagcaaaacttattttttcatgcagaatagtctatattctatatttattgtaaagcatataccgtacatggtgactagtcaccatgctgtacaataaattttctgaacttaataaaaaaaaaawaaaaaagggcggccgc

SEQ ID NO: 335 - DNA, 1267 bp, Homo sapiens
ggcacgagctgcaggggcggggcggcgccaagcgcagggagcccggctgagtggcagcccagattgaagatggatacgtgacaatcccagggaccgctgcactgacttcatttccttagacaagacacagtgtagggcccggcccgtgttggccccaggactcctttggaatatagctgtggacaatgaatcctgcgagcgatgggggcacatcagagagcatttttgacctggactatgcatcctgggggatccgctccacgctgatggtcgctggctttgtcttctacttgggcgtctttgtggtctgccaccagctgtcctcttccctgaatgccacttaccgttctttggtggccagagagaaggtcttctgggacctggcggccacgcgtgcagtctttggtgttcagagcacagccgcagctgtgggctctgctgggggaccctgtgctgcatgccgacaaggcgcgtggccagcagaactggtgctggtttcacatcacgacagcaacgggattcttttgctttgaaaatgttgcagtccacctgtccaacttgatcttccggacatttgacttgtttctggttatccaccatctctttgcctttcttgggtttcttggctgcttggtcaatctccaagctggccactatctagctatgaccacgttgctcctggagatgagcacgccctttacctgcgtttcctggatgctcttaaaggcgggctggtccgagtctctgttttggaagctcaaccagtggctgatgattcacatgtttcactgccgcatggttctaacctaccacatgtggtgggtgtgtttctggcactgggacggcctggtcagcagcctgtatctgcctcatttgacactgttccttgtcggactggctctgcttacgctaatcattaatccatattggacccataagaagactcagcagcttctcaatccggtggactggaacttcgcacagccagaagccaagagcaggccagaaggcaacgggcagctgctgcggaagaagaggccatagctgctccagccggggctccggggcggcagcagagctggcacaccgattctgggaagccccgcgaatgatggcttttgaattaatgaggcagtgaatgttttgtgtttacttctaagggaaatactaactttctttcgcattagtattaattttgaagtagctacaaagtatttttaagaaattataattttatgactgtcaaaaaaaaaaaaaaaaaaaaaaa

SEQ ID NO: 336 - DNA, 3194 bp, Homo sapiens
cacctcttcccctcccccgcttccctgtcgcgctccgctggctggacgcgctggaggagtggagcagcacccggccggccctgggggctgacagtcggcaaagtttggcccgaagaggaagtggtctcaaaccccggcaggtggcgaccaggccagaccaggggcgctcgctgcctgcgggcgggctgtaggcgagggcgcgccccagtgccgagacccggggcttcaggagccggccccgggagagaagagtgcggcggcggacggagaaaacaactccaaagttggcgaaaggcaccgcccctactcccgggctgccgccgcctccccgcccccagccctggcatccagagtacgggtcgagcccgggccatggagcccccctggggaggcggcaccagggagcctgggcgcccggggctccgccgcgaccccatcgggtagaccacagaagctccgggacccttccggcacctctggacagcccaggatgctgttggccaccctcctcctcctcctccttggaggcgctctggcccatccagaccggattatttttccaaatcatgcttgtgaggaccccccagcagtgctcttagaagtgcagggcaccttacagaggcccctggtccgggacagccgcacctcccctgccaactgcacctggctcatcctgggcagcaaggaacagactgtcaccatcaggttccagaagctacacctggcctgtggctcagagcgcttaaccctacgctcccctctccagccactgatctccctgtgtgaggcacctcccagccctctgcagctgcccgggggcaacgtcaccatcacttacagctatgctggggccagagcacccatgggccagggcttcctgctctcctacagccaagattggctgatgtgcctgcaggaagagtttcagtgcctgaaccaccgctgtgtatctgctgtccagcgctgtgatggggttgatgcctgtggcgatggctctgatgaagcaggttgcagctcagaccccttccctggcctgaccccaagacccgtcccctccctgccttgcaatgtcaccttggaggacttctatggggtcttctcctctcctggatatacacacctagcctcagtctcccacccccagtcctgccattggctgctggacccccatgatggccggcggctggccgtgcgcttcacagccctggacttgggctttggagatgcagtgcatgtgtatgacggccctgggccccctgagagctcccgactactgcgtagtctcacccacttcagcaatggcaaggctgtcactgtggagacactgtctggccaggctgttgtgtcctaccacacagttgcttggagcaatggtcgtggcttcaatgccacctaccatgtgcggggctattgcttgccttgggacagaccctgtggcttaggctctggcctgggagctggcgaaggcctaggtgagcgctgctacagtgaggcacagcgctgtgacggctcatgggactgtgctgacggcacagatgaggaggactgcccaggctgcccacctggacacttcccctgtggggctgctggcacctctggtgccacagcctgctacctgcctgctgaccgctgcaactaccagactttctgtgctgatggagcagatgagagacgctgtcggcattgccagcctggcaatttccgatgccgggacgagaagtgcgtgtatgagacgtgggtgtgcgatgggcagccagactgtgcggacggcagtgatgagtgggactgctcctatgttctgccccgcaaggtcattacagctgcagtcattggcagcctagtgtgcggcctgctcctggtcatcgccctgggctgcacctgcaagctctatgccattcgcacccaggagtacagcatctttgcccccctctcccggatggaggctgagattgtgcagcagcaggcacccccttcctacgggcagctcattgcccagggtgccatcccacctgtagaagactttcctacagagaatcctaatgataactcagtgctgggcaacctgcgttctctgctacagatcttacgccaggatatgactccaggaggtggcccaggtgcccgccgtcgtcagcggggccgcttgatgcgacgcctggtacgccgtctccgccgctggggcttgctccctcgaaccaacaccccggctcgggcctctgaggccagatcccaggtcacaccttctgctgctccccttgaggccctagatggtggcacaggtccagcccgtgagggcggggcagtgggtgggcaagatggggagcaggcacccccactgcccatcaaggctcccctcccatctgctagcacgtctccagcccccactactgtccctgaagccccagggccactgccctcactgcccctagagccatcactattgtctggagtggtgcaggccctgcgaggccgcctgttgcccagcctggggcccccaggaccaacccggagcccccctggaccccacacagcagtcctggccctggaagatgaggacgatgtgctactggtgccactggctgagccgggggtgtgggtagctgaggcagaggatgagccactgcttacctgaggggacctgggggctctactgaggcctctcccctgggggctctactcatagtggcacaaccttttagaggtgggtcagcctcccctccaccacttccttccctgtccctggatttcagggacttggtgggcctcccgttgaccctatgtagctgctataaagttaagtgtccctcaggcagggagagggctcacagagtctcctctgtacgtggccatggccagacaccccagtcccttcaccaccacctgctccccacgccaccaccatttgggtggctgtttttaaaaagtaaagttcttagaggatcataggtctggacactccatccttgccaaacctctacccaaaagtggccttaagcaccggaatgccaattaactagagaccctccagcccccaaggggaggatttgggcagaacctgaggttttgccatccacaatccctcctacagggcctggctcacaaaaagagtgcaacaaatgcttctattccatagctacggcattgctcagtaagttgaggtcaaaaataaaggaatcatacatctcacctcgtgc

SEQ ID NO: 337 - DNA, 1258 bp, Homo sapiens
  misc_feature (1)..(1): n equals a,t,g, or c
  misc_feature (1196)..(1196): n equals a,t,g, or c
  misc_feature (1200)..(1200): n equals a,t,g, or c
  misc_feature (1237)..(1237): n equals a,t,g, or c
nagatggcgctacgtctgctgcggagggcggcgcgcggagctgcggcggcggcgctgctgaggctgaaagcgtctctagcagctgatatccccagacttggatatagttcctcatcccatcacaagtacatcccccggagggcagtgctttatgtacctggaaatgatgaaaagaaaataaagaagattccatccctgaatgtagattgtgcagtgctcgactgtgaggatggagtggctgcaaacaaaaagaatgaagctcgactgagaattgtaaaaactcttgaagacattgatctgggccctactgaaaaatgtgtgagagtcaactcagtttccagtggtctggcggaagaagacctagagacccttttgcaatcccgggtccttccttccagcctgatgctaccaaaggtggaaagtcctgaagaaatccagtggtttgcagacaaattttcattccacttaaaaggccgaaaacttgaacaaccaatgaatttaatcccttttgtggaaactgcaatgggtttgctcaattttaaggcagtgtgtgaagaaaccctgaaggtcgggcctcaagtaggtctctttctagatgcagtcgtttttggaggagaagactttcgagccagcataggtgcaacaagtagtaaagaaaccctggatattctctacgcccggcaaaagattgttgtcatagcgaaagcctttggtctccaagccgtagatctggtgtacattgactttcgagatggagctgggctgcttagacagtcacgagaaggagccgccatgggcttcactggtaagcaggtgattcaccctaaccaaattgccgtggtccaggagcagttttctccttcccctgaaaaaattaagtgggctgaagaactgattgctgcctttaaagaacatcaacaattaggaaagggggcctttactttccaagggagtatgatcgacatgccattactgaagcaggcccagaacactgttacgcttgccacctccatcaaggaaaaatgatctgttaaatgaagctgtcatcaggctaaagggtattgaagctgcagagggatcaacttgtgcttgccagaggacgccaatgaagtttgaaacaccaacaatcagagattttgtttctgttcctcattaaatcatgagcttttgtgcccgagactctggacggactgttncttnaggaatttaaccggatgggaagttttttaaacttttncaaccaacttttttaaggccc

SEQ ID NO: 338 - DNA, 698 bp, Homo sapiens
gtctagtttatgtttttccactggacagggagctccttgaggaccttgtcttgctcgctgcccccaccctaaaacttgctgtaaagcagttcctggaacagagcaggtgctcagtagtactggttgcatgaatgaatgaatgaatgaataggttttcctcttttagacacattgggagatgggcctatggtttcctatgctcattttgacccagagatttgtgtcctgtgactcacatccagacccaaaacacacacatacacacgcacacataaatacacacacacacagacacgtgcacacacagacacacatgcacacacacatacacacaccttggtttgaagagaagagggatgggaacagacattctacgcatgcctacagtgcaccactgtgcataggtaactgatgctgtataagcactcaaggattatctccatttttagccagagaaactgaggcttgctttctgctgtgtctccagtgcctagcactgtgcctggcataaacatctgctgaactgaattgcactagattcaagaggctcagaaaacagttcaaggtcacccaactagcaagttgtggagccagaatctgtgctcagggctgttcagtccccagccagtgccgggtagcagccataggcacctgcacaaactccagcgacctcgttaacttccaaacacggtctcgta

SEQ ID NO: 339 - DNA, 996 bp, Homo sapiens
  misc_feature (834)..(834): n equals a,t,g, or c
  misc_feature (996)..(996): n equals a,t,g, or c
gaattcggcagagggaatctgggctctgtggaagaatagcacttatctggattctggccttgtgccatgaacctaaagcacatccgtttggtctgccagtaggctggtatggcatgctgtaacccctataaatattatttctatttatcctgctcagtgtgtttcctgtaacaaatcgttcaagaaactctggtcccttcatgaacatatcaagatcgtccatggatatgcagaaaagaaattttcctgtgaaatttgtgagaagaaattctataccatggctcatgtgcggaaacacatggttgcacacacaaaagacatgccattacatgcgaaacctgtggaaaatcattcaaacgcatatgtcactcaaggtgcactccktgcagcattctrgagagaagccctttagatgcgagaactgtgacgaaaggtttcagtacaagtaccagctacgctcccacatgagcattcatattgggcacaaacagttcatgtgccagtggtgtggcaaggatttcaacatgaagcagtacttcgacgaacacatgaaaacacacactggagagaaaccctttatctgtgaaatctgtggcaaaagcttcaccagccgccccaacatgaagagacaccgcagaactcacacaggcgagaagccctatccatgtgatgtgtgtggccagcggttccgcttctcgaacatgcttaaggcccacaaggagaagtgctttcgggtgaccagccccgtggaatgtgccacctgctgtccagatcccacttacaacttccccagccaccccagttccttctgtggtgaacacagccacaaccccnaccctccaatcaatatgaatcctgtaagcactcttcccctcgggccatcccccaccccttctcacaccgcacatccacccacaccctcaccacccacaccamcttcccatccctccaktccctcacctcccgccacctccagctctctttaagagtgagccn

SEQ ID NO: 340 - DNA, 974 bp, Homo sapiens
caggagtaaagaactttatgagttcatgagaacctaaggctcagtatttgaaaattactgacttatgagaaagcaggcatgtaaataaaaaataaaaaatgttggccctagattttgatatgtgtgtggtgtgtggtgtaggagaggccctgatatttacctgtaagtgttagagttgtatgaaaaaggtggcaagattgagtagcttagggcatgtggtgtggaggctgtatgctagagttttggcattaataacttgtattttctgggttttggcattaataatttgtattttcactccccaaatatttttcaagcatctacttcatgccagaccttgttctagataccggagatacaacagcaaaaatacagatcttgcccttatgaagcttaaattgttgaggcaggcagacagtgataaataaatacatagaatgttgggaaagaaaataagaggatttgagagggtggaatggggaagaaaggattcactgataagatgccattcgagctaagacctgaaaaggtgatctctaaggtgaggaaagagctttctacacagaaggaacagctgggggaagggagcacgcttggaatatttaaggaatatcaaggagggaaaagtggctagagtagaggaagagaatggaagaagtcatgtcaaacaggtactaatggaagaagtcatgtcagacagggtcttgcccattgtaaggactttggccttatacctcagcaagctgagcagccgtcggaatgttttaagcaaaagagtgacaccatctttaaaagggaccccttgtaaggattcagaacagacttggagggaaaacaagtagaagcagcagggggactagttaggaggctgaggtgggaggattgcttgggcctgggaggttgaagctgcagtgagtcatgatcactccactgcactccagcctgggcgacagaaggagaccctgtctcagaaa

SEQ ID NO: 341 - DNA, 413 bp, Homo sapiens
  misc_feature (1)..(1): n equals a,t,g, or c
  misc_feature (248)..(248): n equals a,t,g, or c
  misc_feature (328)..(328): n equals a,t,g, or c
  misc_feature (357)..(357): n equals a,t,g, or c
  misc_feature (372)..(372): n equals a,t,g, or c
nggcccattcgctgttgggtcttctgctagggaggatgtcgggttcgtcgctgcccagggccctggccctctcgctgttgctggtctctggctccctcctcccagggccaggcgccgctcagaacgtgaagagtacaatctggacaggatcagaagtagagaatgaagttgtaaagagaaaggggaaagacagaagaaaggctgcagtagtacaaggagaaaagcaggatgcaagattgaaggaatgnaatctttgtttgaggagcattccggaaaattataagctgttcagaaagggttaattagaccagggaccttttaagttaanttcacactcaaagttaaaataatgttggngattcactcctgtgnaaaattgggttagttttcatttgcccttttaaacaaaactt

SEQ ID NO: 342 - DNA, 1010 bp, Homo sapiens
  misc_feature (607)..(607): n equals a,t,g, or c
ggttacttccaagttctgccaactgtgaataaagttgctataaacatctatgtacaggttttttttgtgtgtggacctaagttttcaactcctttgggtgataccaaggagcacagtcactgggacatatggtaaggatatatttagtttggcaggaaaccaccatactgtcttccaaagtagctgtaccattttgcatacccaccagcactgaatgagagttcctgttgctccacattcttgtcagcatttgatgttgtcagtgttctgaatttaggtagtcatgataggtgtgtaatggtatctcactattattttaatttgcctttctctgatgatgtatgatgttgcagatcttctcatatgcttatgtgacatctgtatatctggtgaaatgtctgctaaggtcttascctattttttaatarggatggttgttttcccattgttgagttttaagagttccttatatattttggatatttaaatatactacaaataaacagtcctttaacagataaatgttttgcaaatattttctcttagtctgtggcttctgtctttattcccttgaaggtgtctgtcacaaagcagtttatcttttttnctttttttttttttttgagacgtagtcttgctccagcctgggtggcagagcgarctacgtctcaagaaacaaaacaaaacaaaaaaacacctcagttgcgcggcaaggtkgctcacgcctgtgatcccatcactttgggaggtcggaggtgggaggtgggagaatcgcttgaggccaggagtccatcctaggtctagcttgaccctatctcaacaacaaaaaaataacaattagcccaccgtggtagtgcatgtctgtagtcctagctactggggaggctgaggtgagaggattgcttgagcccatgagtttgaggttacagtgggctataattacaccactgcactccagtctgagtgacagagcaagaccgtgtctcaaaaaaaaaaaaaaaaaactcgag

SEQ ID NO: 343 - DNA, 1337 bp, Homo sapiens
  misc_feature (22)..(22): n equals a,t,g, or c
  misc_feature (1318)..(1318): n equals a,t,g, or c
cggggcttcggcgccaggccangcgctagtcggtctggtaaggatttacaaaaggtgcaggtatgagcaggtctgaagactaacattttgtgaagttgtaaaacagaaaacctgttagaaatgtggtggtttcagcaaggcctcagtttccttccttcagcccttgtaatttggacatctgctgctttcatattttcatacattactgcagtaacactccaccatatagacccggctttaccttatatcagtgacactggtacagtagctccagaaaaatgcttatttggggcaatgctaaatattgcggcagttttatgcattgctaccatttatgttcgttataagcaagttcatgctctgagtcctgaagagaacgttatcatcaaattaaacaaggctggccttgtacttggaatactgagttgtttaggactttctattgtggcaaacttccagaaaacaaccctttttgctgcacatgtaagtggagctgtgcttacctttggtatgggctcattatatatgtttgttcagaccatcctttcctaccaaatgcagcccaaaatccatggcaaacaagtcttctggatcagactgttgttggttatctggtgtggagtaagtgcacttagcatgctgacttgctcatcagttttgcacagtggcaattttgggactgatttagaacagaaactccattggaaccccgaggacaaaggttatgtgcttcacatgatcactactgcagcagaatggtctatgtcattttccttctttggttttttcctgacttacattcgtgattttcagaaaatttctttacgggtggaagccaatttacatggattaaccctctatgacactgcaccttgccctattaacaatgaacgaacacggctactttccagagatatttgatgaaaggataaaatatttctgtaatgattatgattctcagggattggggaaaggttcacagaagttgcttattcttctctgaaattttcaaccacttaatcaaggctgacagtaacactgatgaatgctgataatcaggaaacatgaaagaagccatttgatagattattctaaaggatatcatcaagaagactattaaaaacacctatgcctatacttttttatctcagaaaataaagtcraaagactatgawawmawagttttttataccttatttaagagaaacaacctgacgtgcaccawtcagtctgcacatcccaacccttcacattttataaattattgtagatcatgttttgttaggagcccttttatggagaggacattttcccatgncttaagtaatccagccttt

SEQ ID NO: 344 - DNA, 1420 bp, Homo sapiens
ggcacgagcacaagctcaagaggccgcttgcacgcatgtggacactccatgattctgcttctatctctctttcagggcgtgcgaggcagcctgggctcccctggaaatcgggaaaacaaggagaagaaggtcttcatcagcctggtaggctcccgaggccttggctgcagcatttccagcggccccatccagaagcctggcatctttatcagccatgtgaaacctggctccctgtctgctgaggtgggattggagataggggaccagattgtcgaagtcaatggcgtcgacttctctaacctggatcacaaggagctgcagctggccgggagctgttcatgacagaccgggagcggctggcagaggcgcggcagcgtgagctgcagcggcaggagcttctcatgcagaagcggctggcgatggagtccaacaagatcctccaggagcagcaggagatggagcggcaaaggagaaaagaaattgcccagaaggcagcagaggaaaatgagagataccggaaggagatggaacagattgtagaggaggaagagaagtttaagaagcaatgggaagaagactggggctcaaaggaacagctactcttgcctaaaaccatcactgctgaggtacacccagtaccccttcgcaagccaaagtatgatcagggagtggaacctgagctcgagcccgcagatgacctggatggaggcacggaggagcagggagagcaggatttccggaaatatgaggaaggctttgacccctactctatgttcaccccagagcagatcatggggaaggatgtccggctcctacgcatcaagaaggagggatccttagacctggccctggaaggcggtgtggactcccccattgggaaggtggttgtttctgctgtgtatgagcggggagctgctgagcggcatggtggcattgtgaaaggggacgagatcatggcaatcaacggcaagattgtgacagactacaccctggctgaggctgacgctgccctgcagaaggcctggaatcagggcggggactggatcgaccttgtggttgccgtctgccccccaaaggagtatgacgatgagctgaccttcttctgaagtccaaaaggggaaaccaaattcaccgttaggaaacagtgagctccggccccacctcgtgaacacaaagcctcggaccagccttgagagaggccacactattcctttcctctggcccagtgaatttggtctctcccagctctgggggactccttccttgaaccctaataagaccccactggagtctctctctctccatccctctcctctgccctctgctctaattgctgccaggattgtcactccaaaccttactctgagctcattaataaaataaacagatttattttccagcttaaaaaaaaaaaaaaaaa

SEQ ID NO: 345 - DNA, 1674 bp, Homo sapiens
  misc_feature (1663)..(1663): n equals a,t,g, or c
cccgagcagctgagtcccttccctgtctttcactcttctggcatcggtggttttacttcttcgattgaaccctgcttcctcgacccccctgggaggccgccttcttcaggcgcctcccttctctccacgagctcgctctgacagctgaggaactggcaagatcctgctacccagagggtgaatgggtatctttcccggaataatcctaatttttctaagggtgaagtttgcaacggcggccgtgattgtaagcggagtaagcaaacacctccattgtattagtcaccagaaaagtaccactgtaagtcatgagatgtctggtctgaattggaaaccctttgtatatggcggccttgcctctatcgtggctgagtttgggactttccctgtggaccttaccaaaacacgacttcaggttcaaggccaaagcattgatgcccgtttcaaagagataaaatatagagggatgttccatgcgctgtttcgcatctgtaaagaggaaggtgtattggctctctattcaggaattgctcctgcgttgctaagacaagcatcatatggcaccattaaaattgggatttaccaaagcttgaagcgcttattcgtagaacgtttagaagatgaaactcttttaattaatatgatctgtggggtagtgtcaggagtgatatcttccactatagccaatcccaccgatgttctaaagattcgaatgcaggctcaaggaagcttgttccaagggagcatgattggaagctttatcgatatataccaacaagaaggcaccaggggtctgtggaggggtgtggttccaactgctcagcgtgctgccatcgttgtaggagtagagctaccagtctatgatattactaagaagcatttaatattgtcaggaatgatgggcgatacaattttaactcacttcgtttccagctttacatgtggtttggctggggctctggcctccaacccggttgatgtggttcgaactcgcatgatgaaccagagggcaatcgtgggacatgtggatctctataagggcactgttgatggtattttaaagatgtggaaacatgagggcttttttgcactctataaaggattttggccaaactggcttcggcttggaccctggaacatcattttttttattacatacgagcagctaaagaggcttcaaatctaagaactgaattatatgtgagcccagccctgccagcctttctactcctttgcccttttcccgtgttctaatgtattttgacaatgttgtaagtgtttaccaagccgttggtctcctaagggcctcctgatggaagaacagtggggtggttcaaagttatttctatgtttgtgttaccatgttaacttttccccgagagaaagtgttaacattgagactctggccccagattggtatcttctatgaagatggatactgatgggtgacattgaaaacggcctgctttccaaatgtggttaaatgtaattggttagccccagacttgggctagagcagaaggcataggccagggtggttattgctatatgtgttacagacctcggttctcattaaagtatttattggcagaatcaaaaaaaaaaaaaaaaaaaaaaaaaaaactcgagggggggcccggtacccaattcgccctatggtgantcgaatgggct

SEQ ID NO: 346 - DNA, 921 bp, Homo sapiens
ggaactgctgctcatggaactggctcctctcctcttgccacttgagtctgttcgagaagtccagggaagaacttgaagagcaaaatacactcttgagtttgttgggttttgggagaggtgacagtagagaagggggttgtgtttaaaataaacacagtggcttgagcaggggcagaggttgtgatgctatttctgttgactcctagcagccatcaccagcatgaatgtgttcgtagggcctttgagtgtggcgattgtcatattctgttggataacaatgtattgggtgtcgattgtcatggggcaggggagagggcagtacacctggaggaccattttgtccacatcgacaccatcagtctgctcttagaggatgccctggagtattcggcgttgattgcggggcacccgaaatcagacttgccacctggactgtcgaggtgcagaccctgggagcaccactggcccatctcttacacaggctgaccgatttctcctggtgttcagagtctgtttttgtctagcaccatttgaaatcggttatgatgtagggggaaaagcagcagcctcgaagcctcatgccaactctgggcagcagcagcctgtggtttcctggaagatggatgggcagagaatagggaaggaagatcatgcttttccctactaacttctgtaactgcatgtatgatacattattgcagaggtaagagatagtttaatggatttttaaaaacaaattactataatttatctgatgttctctagttgcattttgctgaaatgtagtgctgttctaaattctgtaaattgattgctgttgaattatctttctgttgagaagagtctattcatgcatcctgaccttaataaatactatgttcagttaaaaaaaaaaaaaaaaaaaaaaaaaagggcggccgc

SEQ ID NO: 347 - DNA, 822 bp, Homo sapiens
ccgggttgacccacgcgtccgcggacgcgtgggcaaatattggtaatgctgggaaaagggagttcagaatgccaaaacgtttctggttttatttgtcttgggtgaggacccagaggggtgggagatggaggtgtgagcagcatggtctgttgtggttttttcttgttgtggagtagagttagatcatacatgaagctctctgggcataggtggagtagcagctgtccacaccattgctattcaaagtgtggtttgcacaccagtaatggaaaatcatctgtgcacactgtttagtttaactgatactttttttttcatagcaagatttcttaatgaaggaagtaatgtattgatttacattctgactcattgtctttatcttgtctttgatcagtttgtagactggcactggtccacactttgaataacactattcttcattctactttccatgtacccggatgccaggcaaacagggagttttacgctgggtggagaacggaacattctgctgactccttgaaagggcttatctcaccaggcatggtagctcacgactgtaatcccagctctttgggaggctgaggtgggaggattgcttgagctcaggagtttgagaccagcctgggtaacatagggataccttgtccctacttaaaaaaaaaaaaaaaaaaattagctgggtgtggttgtgcacacctgtagttccagctattccaraggctgaggcaggaggataggttgagcatgggargttgaggctgcartgtgccttgatggcgccactgcactccatcctggttgacaaaaaaaaaaaaaaaa

SEQ ID NO: 348 - DNA, 706 bp, Homo sapiens
ggcagaggtgacaagccccgccaagacagacctgcaagtcttcgtctcaagggacctccctcatgccaggcccctgcctctcacagcagcaccctttcctctcattgtccctgttccctttttgcctgtggatctgtttggccagggtccctggggtcaggaatatttgcaagactcagccagctccttcccagcccagcctcttggggctgggactttctcaccctgcggcaggcacaacagatgctgggacccagtctctgcccaggtcacagcacaagtgcacatcagcactatggggcctatgtcctgcccagagacctctgctccttcctgctcacatccacagttcagggcacggcgcccctcaagaactccagagtcacctgtctcatcggctcccagcaagtgcctctttgtctatgatgtcccccttctctgaggcctggacccacccatctttgtccctggggcctgctcccagccactgaggcccgctctggccaggggagaaggagctgccgtgcgtcttccctgtgccccgtctccctgcttggttctcccctcccttccctggccggctgccatggccaggagctaagtgcctttttgtgtgcaaccacttaccctttctctgaaaaacctgttctcaggaaggatctgataaactcatttactctyaaaaaaaaaaaaaaaaaaaaaaaaa

SEQ ID NO: 349 - DNA, 1726 bp, Homo sapiens
cgtctgattaaggtaccttttgggaaattaaggttctatagaaattactgggctcaatctagtgatacaaatatgtgttgtttgatttatcaacacattacaaaccttaactttggagttttaatatctggttatctttaatatctggttatcttctttctgaagtgtatgtacacaaaattgatgctaaataaggtcttgttgttttggcaaatagtgaaatgcaaggtattggtagatcagtactgttataactttggtgcaaagttgctgcatgcagattggctgtgggaccttgttcattttttgagaactaatgtagagtttgaaaaaacaccgtaagcctgcattccagaagttctggtatggatagtgtgagcccagggaatgtgcttagataaaagatcatttaacaaataggttttgcatttttttagcaatcaggctttgtgctgaatattagagtggttgtttcagagagtttgcagcaattaggctttattggtgcactaaggagaagcagagaggagaagcaattcttggtaacttccttggaagttgcagctaactctgaaaagtctgggttgaactaggtaagtaactaattcctagaatcaataaactttgcaggagtccgtttgattgtacatgtagctccctggaattgctattggtccctaaatcatcagtttgtaatgctggttttcaaacttgagtgcacatcaagttttggaggacttgttagaatacagattgctgggctcacccccagagtttctgatctggtaggtctggagcgggacctggtagattgcatttctaaaaagcatccaggtaatactgctgctgtttgggaaagtacctttgagatcactggcttacagcaatctcaaggtgtttggattttgggcaggggtgctgtgcaggcgttgctgggatctcttcacagcactccactgcatagaggtgagcctccagatgttttcattcattcaacaaatatatgtacctattgtgtgctgggcactgcttaagttgcgaggggatattgtgaagaaagtaagcaaaacccctttgtttgtagaatttcagtgagcatagtcctgggttaacctgacaacagtcctactgtttattgatgcttataggtgagcctatttctctttctagctttcttccacttaatttactttcttttggaattcttgaatttaataataataatattgatgttattagtcatcactataactttttattgagtatgtattttatgtcagacacagtgtggctaagtgctttacatacattatctcatctaatccttagaaaaaaccctggtgtattagtcttaatttaaaagatgtactttggaaaggttagtagtttacccaagattatgcagctagttaaaagtggtgctggggctgggcttggtggctcacacctgtaatcgcagtgctttgggagtctgaggcaggaggatcgcttgacaccaggagtttgagactaacctgggaaacatagcaagaccccatctttacaaaaaataaaaaaattagccaggagtgggggtgcacacctgtggtcccagctacttgggaggctgaggcaggaggattgcttgagccccagaggttgaggctgcagtgagccatgattatgccactgcacatctgtctgggtgacagagcaagatcctgtctccaaaaaaaaaaaaaaaaaa

SEQ ID NO: 350 - DNA, 1283 bp, Homo sapiens
  misc_feature (341)..(341): n equals a,t,g, or c
gaattcaaagtttaccaaatgtgcaaaatgagcagttttaccttaggattattatttttatttatatttactactgcagaaaattatttgattctttttcagagaaaatactgtttggttatattttggggggagttttgaatttcacatacgaaagaaataacacagccctttcaaactgcctgtgtttcaacctgcaaagttttttttgtgctaaagatttgagctttgtgaaggattccctttttgttccttcttctccagcaatctcagctacctgggcgctcctgctaatgatttctggggttccgtgccaggggtcggcaggacaagtgtttcanttgaagcttcatttggtttggagtctcttcctcytctgagccwacaaagctcgggtccacgggtactctgscaaaattcatcatcttagttaggcatttggcagaataggtgaggcagggatgaatctttaacaaatgttaatgttgctttgctgggaatgtgcagaggggcatccaagatgagcacacatttaaaagtaaacacatgaataagtggcagtagaatttattttgcaactctgagtgctacagtgtctactgaattcagtgtattccacgttcttattacaactaaagactgggtagaacggacttctcttaactatgcaaagggaaaatccaagacaagattccgcaggctgctggtgaaaaggggtgttatcatgcagatgtcatcctaacagattagcagagggaagtggaaatgttcgaggatgttcaatgccmcgttgttggttwtrgcaaamccactggaaacamcacaggagtctaaaaatagaggcctggtagggaaaatggtacagctacggaatgcaatactattgaagcattagaamcaatgagcttctgacagccccagagagttattcataatgtgtagttaatttaaaaaagaaagtcgagagtcagactctacaagggcataatacgccattttggtaaagaaaatgtgtatgtagatatgtaaatagatttggatacgaattattgtatatacgaaggaagagtgccaaagcctacataccacgcttttaatagtttttaatcttcgttattaaagaaagattgagggagatgggatttctgtttttattttatacaaatctgcattgtttgaattttttttttttttacgacaagctgttatttctctggggagtttaaaaaaaatacaaaaaaaagggaattcgatatcaagcttatcgataccgtcgacctcga

SEQ ID NO: 351 - DNA, 1552 bp, Homo sapiens
  misc_feature (1035)..(1035): n equals a,t,g, or c
ttgcctaaggcccactgtgccaaattagataatacaagaagttcatttacactgtagaccagtgacgtcaatgactgtttgctctgtgataccgtttcaaaaatccaaaatgcagacttttctctgtgccatgcaggatgcagctgtgtgtgatatggtttacagtaatatttctttctcaaagtagcaggcttgttaaggaaaagataagcaacacatctggggaaaagggcaggtggccagcaatcgatgtggtagctctttgcccctctcggacagcaggaattagcttccccaggcattttctgtatgtgagttgtattgtgggatgtacaaatatcatctgttcctttgggtttccaggccagtagctctctattttgggttcaaacatgggttctcaggccgggcgcggtggctcacgcgtgtaatcccggcactttgggaggccaaggcgggcggatcacgaggtcgggagatggagaccatcctggctaacatggtgaaaccccaactctactaaaaatacaaaaaattaggcaggcatggtggcgggtgcctgtgktcccggctactcaggaggctgaggcaggagaatggtgtggacccgggaggttggaggttgcagtaagccgagattgcaccactgcmctccagcctgggcaacagagcgagactccatctcaaaaaacaaacaaacaaacaaacaaaaacatgggttctcaaaaggcatgcccactgtctcccatggagcttgacagcccatgccattagctctcactgttaggtttctggggaaggttcttctacttgattggaaaatttccaaataaatctttccagaagatactatgcacacagctaagtggcctgtctgtggagtaacccttttgtaaacaaacagaaacctaaagcttgatgttttggggggctgcctgtcatctataggttcatttaggtgtatttaggaagaggatccatgaaaccactggtttcctgttacataataatcattaataatgatttaaaatgtgnacattgatttttttraattccraaatacaagcgtatatggtawattaagtcaaatggtatgttcagtgagcgagatggggcttggggcaaaacaatactttgcttccaaagaggatacaactctcaaggagattctttcatcttgcctttaaggtcatttaaactaattcacataatcttcagaaaactaattcacatcatctattcatgtgtaaaatcaaaaggaagactgttttcttagtctctcgttgcctaactggccatttatactactaggttgattaagggatttgcctttttctgctgatatgggaacaaaaagtcttaagcatttttaaaggcaatggaaaattcagccacatgggggaaaattgatattgtcaccattgagttgctctgtttcttggtgaagagtgaatctaatctgatttccttcttcatcagatatgcctctttaacaacaaaaaaaaaaaaaaaggaattcgatatcaagcttatcgataccgtcgacctcgta

SEQ ID NO: 352 - DNA, 1563 bp, Homo sapiens
  misc_feature (14)..(14): n equals a,t,g, or c
aattcggcacgagncagaaacctgcggaaaatggtagcgatggcggctgggccgagtgggtgtctggtgccggcgtttgggctacggttgttgttggcgactgtgcttcaagcggtgtctgcttttggggcagagttttcatcggaggcatgcagagagttaggcttttctagcaacttgctttgcagctcttgtgatcttctcggacagttcaacctgcttcagctggatcctgattgcagaggatgctgtcaggaggaagcacaatttgaaaccaaaaagctgtatgcaggagctattcttgaagtttgtggatgaaaattgggaaggttccctcaagtccaagcttttgttaggagtgataaacccaaactgttcagaggactgcaaatcaagtatgtccgtggttcagaccctgtattaaagcttttggacgacaatgggaacattgctgaagaactgagcattctcaaatggaacacagacagtgtagaagaattcctgagtgaaaagttggaacgcatataaatcttgcttaaattttgtcctatccttttgttaccttatcaaatgaaatattacagcacctagaaaataatttagttttgcttgcttccattgatcagtcttttacttgaggcattaaatatctaattaaatcgtgaaatggcagtatagtccatgatatctaaggagttggcaagcttaacaaaacccattttttataaatgtccatcctcctgcatttgttgataccactaacaaaatgctttgtaacagacttgcggttaattatgcaaatgatagtttgtgataattggtccagttttacgaacaacagatttctaaattagagaggttaacaagacagatgattactatgcctcatgtgctgtgtgctctttgaaaggaatgacagcagactacaaagcaaataagatatactgagcctcaacagattgcctgctcctcagagtctctcctatttttgtattacccagctttctttttaatacaaatgttatttatagtttacaatgaatgcactgcataaaaactttgtagcttcattattgtaaaacatattcaagatcctacagtaagagtgaaacattcacaaagatttgcgttaatgaagactacacagaaaacctttctagggatttgtgtggatcagatacatacttggcaaatttttgagttttacattcttacagaaaagtccatttaaaagtgatcatttgtaagaccaaaatataaataaaaagtttcaaaaatctatctgaatttggaattcttctggtttgttctttcatgtttaaaaatgatgtttttcaatgcatttttttcatgtaagccctttttttagccaaaatgtaaaaatggctgtaatatttaaaacttataacatcttattgttggtaatagtgctttatatttgtctgattttatttttcaaagttttttcatttatgaacacattttcattggtatattatttaaggaatatctcttgatatagaatttttatattaaaaatgatttttctttgcttaaaaaaaa

SEQ ID NO: 353 - DNA, 756 bp, Homo sapiens
  misc_feature (230)..(230): n equals a,t,g, or c
  misc_feature (755)..(755): n equals a,t,g, or c
gaattccaatgtccacaggtgatgggagagatgctgagaaagggtggccagtgagtgaggaggaaaaccagaggagtgtgtatcctgggtaccctgaatgtgatgagcgacaagctgtcccccagcactgtgccattgcttctcccagttctcttcaaagtcaccatcctgcttcagcgtgtgtgcccagaagatagcccttcctcttctgtgcttccagaatccgtagncagggaataggaatacatggacaagtagcatgcagtgcagtgagaatgtataacaacagatgactctggggaccaaaatcaaatggggccagctacaaagagggcaggaaatccccacaggtgattttactgtgaggaattttatgaggttcagcatcatatattgttaggagaaaatgctgttttgataagcagagatatgagaaaagtaaacgggaactatgatttagagatctcatctgrttactttgtcctattcycagtttwattactaaagagcagtaaagccaaggagaaagtagtaaagattagatgaatggttagcatgtgaaacctgaaaggaaccagagtgatttccctcgaggaacaaatgcacttctcttacatatgaaagatgatgtgttctgtgttcccatagaatctagggaaagaaaaagtgagcagatactctgatatgagcaatataacttaggtgtaaaaaaaaaaggaattcgatatcaagcttatcgataccgtcgacctcgna

SEQ ID NO: 354 - DNA, 1402 bp, Homo sapiens
ccagtgtcggtctatccaaaaaatgtactaacagatatgtaaaccctgatgaatacagtatgtgttatgagaagtggcccaacgaagcagctcatccaagtgagattctgaagttgggctggcgagtacacgaatggctttcttactagagagaagtgggaccctgctaatctgtagcatgtggtggcatcatggttactcaaatatcactggaacagaaggtgaaagaagaaatctgaagagaaataaaacaaattttcggcggttccaagatggccgaataggaacagctccagtctacagctcccagtgtgagagatgcagaagatgggtgatttctgcatttccaactgagcaaacggcacaccagaagattatatcccatgcctggctgggagggtcccatgcccacggagcctcgctcattgctagcacagcagtctgagatccatctgcaaggtggcagtgaggctgggggaggggcacccaccattgctgaggcttgagtaggtaaacgaagcagccaggaagctcgaactgggtggagcccaccgcagctcaaggaggcctgcctacctctgtagactccacctctcggggcagggcatagccaaacaaaaggcagcagaaacctctgcagacttaaatgtccctgtctgacagctttgaagtgagtagtggatctcccagcacggagtttgagatctgagaacggacagactgccccctcaagtgggtccctgacccctgagtagcctaactgggaggcaccctccagtaggggcagactgacacctcacacagctgggtacccctctgagatgaagcttccagaggaacaatcaggcagcaacatttgctgttcagcaatatttgctgttctgcagcctctgctgctgatacccaggcaaacagggtctgcagtggacctccagcaaactccaacagactggcagctaagggtcctgactgttagaagaaaactaacaaacagaaaggacatccacaccaaaaccccatctgtaagtcaccatcatcaaagaccaaaggtagataaaaccacaaagatggggaaaaaacagagcagaaaagctgaaaactctaaaaatcagagcacctctccccctccaaaggaacacagctcctcgccagcaacggaacaaagctggatggagaatgactttgacgagttgagagaagaaggcttcagaagatcaaacttctccaagctaaaggaggaagttcgaacccatcgcaaagaagctaaaaaccctgaaaaaagattagacgaatggctaactagaataaccaatatagagaagtccttaaatgacctgatggagctgaaaaacatggcgcgagaactacatgacaaatgcacaagcttatcgataccgtcgac

SEQ ID NO: 355 - DNA, 2270 bp, Homo sapiens
ttttttttttaactttttaaacaatccattttaatcatctaaattatttacaatacaataacatggattcatcctttttaagacatgggattgtaaaaatcaacaagtgaatgatgcttcaaataatacatttaaatacattaatcaaattttttcagtgcttaaaactttttctccatgggacagcaggctctggacaaaagtgcctagcatacaagttttcccaatttccttctatcataccagctgcacataaaaaggttcatcacctcctgtctccaaagtgtctccctactgagtgttcccaggcagacaatagttcctgggatagtgctgtttggtaacagaaaagcccaagcgtagaggacggattaaaaggcagggaccagaccgccatggatacaaatcccaagacagaggatgccccatgccttccccatgaagcttatctgtctgcctgtgtctccatgattgcaggcatagagctacttgggacctccaggatgatttacttagcgatatgctttttacattctaagaatcaaaatggtcctgtaattcccaatagagaaaatagagccaattcattgttctcccctctcccctctgaagccagtttttaaagatgagccttacccagaaaataagccccaaagaactctcatctaaatgatcagacccttcctaaattacctttggcaacctaggtaattcttttttattacacacctccaacctgaccctttctacagtttcaactataaatgttcatgcccctcrtcaaataacgttgctaggatgaatttgccacaggtttgagtacagagagaacaagcaagaaaaatgtcagtgtttattttaaggagagtggccaggatgtcagtcctcataattggtcccttctctctctctatcctccaaggtaagttctttgttgacttgataagctttagtccttctgtacaacttctagaagatgcacttaatggtgcttctttgcacttccagaactcaccttctattctacctgtaaggctgtaggggagcatcccaatcaacataaggcctacccctttagccacgaaaatcagccaggcatcatgtttctgcaccaccacctgccttcctgacggacactggtgctgatgacaaaaatgggacagtaccgcagctggtttctctttttcgagtgtgtagataagaaataaaaaacattttcattccctcacaagcttaatctagtaatataactgcctaaaaaaaatcaaaccataaataaacctatgtgctaaacaaatcacatgacttgatgacttctctaaaattaatgtcaaggaaaaaaggaaaagttgatcccaagtaaaatcccttgaccacagctgtctgaaattagccaggggaatgggagacaccaccaagaacctcagctctttcctgccctgtatttcaaggggagtgttgtggccttcacaaatgaaaattatgaatcacaaagataaacgtcctcacttctaacctggtgaatcctcaggaatgtcatgaggatgacaacacagggttaattcattttttctcagtctcccccctgactccacaaaagctttgccttcccaacacaaggggctgggaggtccagtctagacagagcatgctgttggggtaaacagtaaccatgtgatcccatgattcccagagctctgagcacaaagcttttcatcccagtggcaactggaatgtgggtaattctgtaaactcatggccacacctttaatgcttggggacagtgggtggagtcagccagagctcttttccaacttcatctagggtcttctctctggaaaagcttagtgacgttctccgaaggtttatttggttaaggagtattgctaaaacactttttaaaaatccactttgaacacatgtgtaagctgaaaagaaaatgacatatatacctccattgaagctgggaaagtgaaaaggctgacgaaatgtctgaaatcctgagcctttcctggttctattttaatacagcgtacaggtaacagatgatctcatttaccttctgaatgacccagcactcaatttccctaaaactgctcagctccacttggaaatcaccaggggacttgagaatcttccccttagactcagggagacacccagaccaggaagaagggcactgatgttttcagggacccaaaagcccacttttttttttttttttttttttggaattcgatatcaagcttatcgataccgtcgacctcgag

SEQ ID NO: 356 - DNA, 1123 bp, Homo sapiens
  misc_feature (213)..(213): n equals a,t,g, or c
caaaaataataatagtcatcacatttgtatagcactgggtcatttttcccaagaccatttagttacttgacctcagctgttgtccagcttccagtcttggggtaatggcagcttaataatctgaaaattgccaagagaaagatgtggaaggatgaaatggaggcaacatgaatttctgtcaccttgtcatatgttctcatttccakgccttgngagcaagagagttaggtatatcttctgtaactcagacaattttcttcctctttgcagaatggcccctaggaatcaaggtagcttttcttttggaaacttcatgctgtttttagtgttgatagaaaggaggtatctgccatttctgtcacctattttattttgttgtagcacccataatagatcagctgtcacagccacaaatctctgaggagactggaatcattcccagataaatcagaaagtcagaatcactttatggttatagtcctggcttcttgagagcttgtctggaggttgtagcaggggagcacagctagtcatataccctwgactarsgaccggtctwcctctattggggatggttgtcctcttctactgagcttgcagctttgggagggacgcacatggagtggtgagggaggaaggggacacccgcctagccagccagatcagctgaatcaaccctggcaatcaatggggtgacagatgttgcagccagatcgccctcacatccagtcctaccttcttggtaacaaaacaattggttttgctggtctagaaactgtagggctagacatgtattataggactggcttagggagagttactttatattagcactcatgttttcactcatttatttcttgtagctcattaaaagaaaaaccataattgagcatctactatatgccatgcattgtgctgagtatccatgatgctcaggtgaacgggacatggtcctgtaaaaagtgtaaagtctgctgggaaagttagtgctcaaaagtgtaactaaatacttgaggcaagtgctttactagggaataaactaaatatcaagagaacaaagataagcaattccttcacgatgttttacatggtaaatccatacaattttaaaaaaaaaaaaaaa

SEQ ID NO: 357 - DNA, 1417 bp, Homo sapiens
tttttttttgattaaaaaaatttaaaaaattataaaatgatgtcctatatgagtttaatacatgacgttggaggagcatagagatagacctagactaggcatgtgtatgtgtgtgtgtgcatgtgtgtatgcatgcatgcttatgcatgtgtgtgtgcatgcatgcttgtgtgtgtgtgtgtgtgtgtgtgtagagccttggtcatcccgacagagcaaagacacaggagggtggcacatggaagaacaagtgactccaccctcccttgcacagttaaaatctggccaagtgagaggggagatgggagaggggagaggggagaaaggagaagaggcactgactggaggggctgaagctttgtccctcctgggcaggcgttctccatccacacccctcttcttggatagagaggataagcaggccaaagatgcacgaaacctgagttccactgtagctccagacttctagaaaagtcaacagcccctgtatctctagctgatcctctgttgttcaatgtctgcattaccgcactgggagacacttgacagattgggcctgccgcaggccatagcagacattgggcagccctagaacgaagctgactgtccttggaatgtgccacaggggtgtgacgccccggccaactccagtgctgcctaaaatggcctcttgcaacattcccctctcttcatcttaaatcagggacttgaagccacaaaatggcaaatacacagttctggcagtcgttttgagtattggagaaatcgctctggccatctgttttgtctccagcatgtttctcacggaatatccacggatatatccatggatataacagacatcctgccaaggcagagcttggctcttgagaactcggcaagctcagtgcttgcctggattcctgcctcatgtcccatccagtgtttggagaaaagctctgagagaaagatgaatgtctgaggccacacagcctagaagtagtcaagagcacaggctctagaactagccccacgtgggctgaaatcccagcaccagcgcctgccggctgtgtgatgtaggagagcttcttaccagctctgtgcctcacttgtctcacttgtaaaatgagaataagaattggccgggctcggtggctcacgcttgtaattccagcacttcgggaggctgaggtgggcggatcacttgaagtcaggagttcaagaccagtctggccaacgtggtggaaaccccgtctctgccaaaaatacaaaaattagccaggcgtggtggcgggcacctgcagtctcagctactcaaaaggctgaagcaggagaatcgcttgaacctgggaggtggaggctgtcagtgagccaagatcacaccactgcactgcagcctgggtgacagagcaagactctgtctcaaaaaaaaaaaagg

SEQ ID NO: 358 - DNA, 3388 bp, Homo sapiens
cccacgcgtccgcaggtacagccaaccatgtcccagttcgaaatggacacgtatgctaagagccacgaccttatgtcaggtttctggaatgcctgctatgacatgcttatgagcagtgggcagcggcgccagtgggagcgcgcccagagtcgtcgggccttccaggagctggtgctggaacctgcgcagaggcgggcgcgcctggaggggctacgctacacggcagtgctgaagcagcaggcaacgcagcactccatggccctgctgcactggggggcgctgtggcgccagctcgccagcccatgtggggcctgggcgctgagggacactcccatcccccgctggaaactgtccagcgccgagacatattcacgcatgcgtctgaagctggtgcccaaccatcacttcgaccctcacctggaagccagcgctctccgagacaatctgggtgaggttcccctgacacccaccgaggaggcctcactgcctctggcagtgaccaaagaggccaaagtgagcaccccacccgagttgctgcaggaggaccagctcggcgaggacgagctggctgagctggagaccccgatggaggcagcagaactggatgagcagcgtgagaagctggtgctgtcggccgagtgccagctggtgacggtagtggccgtggtcccagggctgctggaggtcaccacacagaatgtatacttctacgatggcagcactgagcgcgtggaaaccgaggagggcatcggctatgatttccggcgcccactggcccagctgcgtgaggtccacctgcggcgtttcaacctgcgccgttcagcacttgagctcttctttatcgatcaggccaactacttcctcaacttcccatgcaaggtgggcacgaccccagtctcatctcctagccagactccgagaccccagcctggccccatcccaccccatacccaggtacggaaccaggtgtactcgtggctcctgcgcctacggcccccctctcaaggctacctaagcagccgctccccccaggagatgctgcgtgcctcaggccttacccagaaatgggtacagcgtgagatatccaacttcgagtacttgatgcaactcaacaccattgcggggcggacctacaatgacctgtctcagtaccctgtgttcccctgggtcctgcaggactacgtgtccccaaccctggacctcagcaacccagccgtcttccgggacctgtctaagcccatcggtgtggtgaaccccaagcatgcccagctcgtgagggagaagtatgaaagctttgaggacccagcagggaccattgacaagttccactatggcacccactactccaatgcagcaggcgtgatgcactacctcatccgcgtggagcccttcacctccctgcacgtccagctgcaaagtggccgctttgactgctccgaccggcagttccactcggtggcggcagcctggcaggcacgcctggagagccctgccgatgtgaaggagctcatcccggaattcttctactttcctgacttcctggagaaccagaacggttttgacctgggctgtctccagctgaccaacgagaaggtaggcgatgtggtgctacccccgtgggccagctctcctgaggacttcatccagcagcaccgccaggctctggagtcggagtatgtgtctgcacacctacacgagtggatcgacctcatctttggctacaagcagcgggggccagccgccgaggaggccctcaatgtcttctattactgcacctatgagggggctgtagacctggaccatgtgacagatgagcgggaacggaaggctctggagggcattatcagcaactttgggcagactccctgtcagctgctgaaggagccacatccaactcggctctcagctgaggaagcagcccatcgccttgcacgcctggacactaactcacctagcatcttccagcacctggacgaactcaaggcattcttcgcagaggttgtcagtgatggtgtacccctggtgctagccctggtcccccaccggcagccccactccttcatcacccagggttccccagacctgttggtgactgtgagtgccagtgggctgctgggcacccacagctggttgccctatgaccgcaacataagcaactacttcagcttcagcaaagaccccaccatgggcagccacaagacgcagcgactgctgagtggcccgtgggtgccaggcagtggtgtgagtggacaagcactggcagtggccccggatggaaagctgctattcagcggtggccactgggatggcagcctgcgggtgactgcactaccccgtggcaagctgttgagccagctcagctgccaccttgatgtagtaacctgccttgcactggacacctgtggcatctacctcatctcaggctcccgggacaccacgtgcatggtgtggcggctcctgcatcagggtggtctgtcagtaggcctggcaccaaagcctgtgcaggtcctgtatgggcatggggctgcagtgagctgtgtggccatcagcactgaacttgacatggctgtgtctggatctgaggatggaactgtgatcatacacactgtacgccgcggacagtttgtagcggcactacggcctctgggtgccacattccctggacctattttccacctggcattggggtccgaaggccagattgtggtacagagctcagcgtgggaacgtcctggggcccaggtcacctactccttgcacctgtattcagtcaatgggaagttgcgggcttcactgcccctggcagagcagcctacagccctgacggtgacagaggactttgtgttgctgggcaccgcccagtgcgccctgcacatcctccaactaaacacactgctcccggccgcgcctcccttgcccatgaaggtggccatccgcagcgtggccgtgaccaaggagcgcagccacgtgctggtgggcctggaggatggcaagctcatcgtggtggtcgcggggcagccctctgaggtgcgcagcagccagttcgcgcggaagctgtggcggtcctcgcggcgcatctcccaggtgtcctcgggagagacggaatacaaccctactgaggcgcgctgaacctggccagtccggctgctcgggccccgcccccggcaggcctggcccgggaggccccgcccagaagtcggcgggaacaccccggggtgggcagcccagggggtgagcggggcccaccctgcccagctcagggattggcgggcgatgttaccccctcagggattggcgggcggaagtcccgcccctcgccggctgaggggccgccctgagggccagcactggcgtctgcggccgctctagaggatccctcgaggggccc

SEQ ID NO: 359 - DNA, 1965 bp, Homo sapiens
  misc_feature (333)..(333): n equals a,t,g, or c
  misc_feature (1961)..(1961): n equals a,t,g, or c
ggatcctcgcggcggcggcggtgcttacagcctgagaagagcgtctcgcccgggagcggcggcggccatcgagacccacccaaggcgcgtccccctcggcctcccagcgctcccaagccgcagcggccgcgccccttcagctagctcgctcgctcgctctgcttccctgctgccggctgcgcatggcgttggcgttggcggcgctggcggcggtcgagccggcctgcggcagccggtaccagcagttgcagaatgaagaagagtctggagaacctgaacaggctgcaggtgatgctcctccaccttacagcagcatttctgcagagagcgcancatattttgactacaaggatgagtctgggtttccaaagcccccatcttacaatgtagctacaacactgcccagttatgatgaagcggagaggaccaaggctgaagctactatccctttggttcctgggagagatgaggattttgtgggtcgggatgattttgatgatgctgaccagctgaggataggaaatgatgggattttcatgttaacttttttcatggcattcctctttaactggattgggtttttcctgtctttttgcctgaccacttcagctgcaggaaggtatggggccatttcaggatttggtctctctctaattaaatggatcctgattgtcaggttttccacctatttccctggatattttgatggtcagtactggctctggtgggtgttccttgttttaggctttctcctgtttctcagaggatttatcaattatgcaaaagttcggaagatgccagaaactttctcaaatctccccaggaccagagttctctttatttattaaagatgttttctggcaaaggccttcctgcatttatgaattctctctcaagaagcaagagaacacctgcaggaagtgaatcaagatgcagaacacagaggaataatcacctgctttaaaaaaataaagtactgttgaaaagatcatttctctctatttgttcctaggtgtaaaattttaatagttaatgcagaattctgtaatcattgaatcattagtggttaatgtttgaaaaagctcttgcaatcaagtctgtgatgtattaataatgccttatatattgtttgtagtcattttaagtagcatgagccatgtccctgtagtcggtagggggcagtcttgctttattcatcctccatctcaaaatgaacttggaattaaatattgtaagatatgtataatgctggccattttaaaggggttttctcaaaagttaaacttttgttatgactgtgtttttgcacataatccatatttgctgttcaagttaatctagaaatttattcaattctgtatgaacacctggaagcaaaatcatagtgcaaaaatacatttaaggtgtggtcaaaaataagtctttaattggtaaataataagcattaattttttatagcctgtattcacaattctgcggtaccttattgtacctaagggattctaaaggtgttgtcactgtataaaacagaaagcactaggatacaaatgaagcttaattactaaaatgtaattcttgacactctttctataattagcgttcttcacccccacccccacccccaccccccttattttccttttgtctcctggtgattaggccaaagtctgggagtaaggagaggattaggtacttaggagcaaagaaagaagtagcttggaacttttgagatgatccctaacatactgtactacttgcttttacaatgtgttagcagaaaccagtgggttataatgtagaatgatgtgctttctgcccaagtggtaattcatcttggtttgctatgttaaaactgtaaatacaacagaacattaataaatatctcttgtgtagcacctttaaaaaaaaaaaaaaaaaaaaaaaaaaaaaaaaaaaaaaaaaaaaaaaaaaaaaaaaaaaanaaaa

SEQ ID NO: 360 - DNA, 1382 bp, Homo sapiens
  misc_feature (1339)..(1339): n equals a,t,g, or c
gctttgttgatgtgccattttagtgctctgtcgttcacattttgtgttttgccactggctttttcgtttctccagaaacattgttacttcactcacaaatttggtcaaaatgtgcaatactcacatttcagagttagttttcaatggaagaaatgagcaaaggtttttattttagttaatatagaaatttgaataattcagagtacagaaaggaacacatttcatgaacatggtgggaatttttcacttaatgtattatattccaccaatatacaaatatttgtatyattttagggcagttagaatagaaaatacattttcagtagaatcgttaataaatgaatagaaaaatgagaactcattggtgaggtagagagcaaacacacactaagggagtgacttgtaattgagcagaaatttcctttgagtttcctaatagccaaagcaaaagaaaaaaaaaaaaggaaggaaacaaacttacaaactcttaccatctaaaaaagaaatcataccattttttaggtggtacaaacatttttctattatcaaactagaggtggcttttaccatgtgaatatttttataaaggctgtggaatgataatgtgaaaattccaggggggaaagtaagcaagaaagtaaagctgcagagctgcatgttgggagtcaggtgacagaggtgaggagttggataggttggtgtctcaggtacttgaatytctggggtggttttcttctgcctagaaaggcttttgggaaagtaaatgtgaagtcacaagtagagaaaggaaacatcagaagagagacagcctgagagtttgcagagctaagatctcaggttaatggttatctgccccagggacaaaggatgttgtacccttttccttaggatttttcttaggcatttaactaatgttcccttgttttacctagccttgtgtcctaccaaactgacatttcaaagagcagcaagtgcctcttggagaacactgggtggcttaaacaggatgcaataataatactcttaaacggtgtacattttttaaaatgtctttttgtatataakwwaaatataagagctgtagcttagctcactaattgccttcctttttgcagaaaatgtgttggtgtattcagaagcagatctttcttacaaggacagattgtttaaagctaactagtattgtagtcaacgcttacccaagggcagaatagagctgatcagaagcaaatcttgaattcaattcgtatttatattttcaggaactctaaaattaattgatctttctgttctgcccttctgtcgtaactgccacagctccagctctgggcgacagagncaagactccgtctcaaaaaaaaaaaaaaaaaaagggcggccgc

SEQ ID NO: 361 - DNA, 1755 bp, Homo sapiens
ggcacgagcctcacagcgcctctgctggagttcctgctggccttgtacttcctctttgctgatgccatgcagctgaatgacaagtggcagggcttgtgctggcccatgatggacttcctgcgctgtgtcaccgcggccctcatctactttgctatctccatcacggccatcgccaagtactcggatggggcttccaaagccgctggggggtctgtgcctgacactcgggctgtttgtccaagcagatctgaaatgggccgtgagctgggggcagcagcctcccgggagcagggagtcagccctgtgatgcatcccatccaccctgtccacaggtgtttggcttctttgctaccatcgtgtttgcaactgrtttctacctgatctttaacgacgtggccaaattcctcaaacaaggggactctgcagatgagaccacagcccacaagacagaagaagagaattccgactcggactctgactgaaggcctgcgggtgccttggcaacctgagccacacaggcctccacccctgcgcctcacaggggtcgctggcgttggagcggaggcctggacttctgagttgcagagggggctgcggacacagcaggccccctacagcctcaggttctgcctgagcccagcctaccaggcttgcccctcagctcagcactgttgaccacgctgcgtatgagggcatcttgggtatcccactccttctccccatttctgtcccacaggccttcagccctttaacgtctctgccaaaaaccagcacaaggagacaaagcagagccttgtctgtatctgggcagcaggtgttccatgctgctaggtggcgggggtcgggggtcttctgtttcactaacaggaacaaagacagaaaccatgacagggctgccccgccaggccccggtgggtttgtctgcacttggtgctcctgcccacaccagccactttggtgacaatgacccttccaagaatctttggttcaaggagcaccagttccctcttcattcttgaagcagggagaaattgacctttgccttgtcgcccaggaagtggggctcggcacccataactaacacctcccacccttggaaaccatgtcttctgggggtgagatgaccattctgggtctaagactgtttcaaagaagagctcatagactgactggtccagaagacagagggtacaacagtggcatcacagtgacagtgtcatggggagctgggcgggcccagccaaaccctccttcttcctagagcccagccagcaggcaggagttcctggaccctcaggacagtgaacttccagacctcagggcaggtctatgggccactgcaggagatgagaccagccttctgtgttcacctaacgatttatactgtgtatctgtctttgatggaattttgtaactttttatatttttttatgcaaaagcagcttcttaacagatggcattttctgtgactctaggcctcacaaaagagccagagttctggacccatgtttggagcatttgtagccttattctcttgcgtgtgaatctcttaccctgaaaaaaagccataatgaattaagccagactgaccacttgcttggagtgtgtgcttgaaaaaaccagagcaatactgttgggtattgtatcaggcttcagtacaaactggtaacaccaatgtggatcctgacagctttcagttttagcaaaaatacacgtgaaatctgactaccatttaaaaaaaaaaaaaaaaaaaaa

SEQ ID NO: 362 - DNA, 547 bp, Homo sapiens
  misc_feature (1)..(1): n equals a,t,g, or c
  misc_feature (547)..(547): n equals a,t,g, or c
ncgaaaatgagaaaggtaacaatttcgaaaaagcatgcccttctgctgtgtttccagttgtttagatgtctgctctccatgtatatatggatcacattcgtgttagatggaagttgtgaatccactgttctctcaaaccggtctctttcccttgtacctatcatagtgtacatagctcaacttcctgagtttgattctagtgttcaaagataggtatttttcatataagatgtcctgtcaaagcaagtcattgaacttacctggtatttaactgaaaacaaacaaaaatcagcaatctcttccattgcttgtagaaatactgacttaggccaggcacagtggctcacgtctaatcccagcactttgagaggccaaggcaggagtatcacttgagcccaggagttcgagaccagcctggcaacatagtgagaccttgtctctgtaaaaaggaaggaaggaagggaaggagggaggggtggagggagaggaggggaggggacactctgttatacttatcgaaaggtgctatccaggtgtggtagtgcan

SEQ ID NO: 363 - DNA, 1974 bp, Homo sapiens
ggcacgagttgggagcagctctgcgtgcggggcctcagagaatgaggccggcgttcgccctgtgcctcctctggcaggcgctctggcccgggccgggcggcggcgaacaccccactgccgaccgtgctggctgctcggcctcgggggcctgctacagcctgcaccacgctaccatgaagcggcaggcggccgaggaggcctgcatcctgcgaggtggggcgctcagcaccgtgcgtgcgggcgccgagctgcgcgctgtgctcgcgctcctgcgggcaggcccagggcccggagggggctccaaagacctgctgttctgggtcgcactggagcgcaggcgttcccactgcaccctggagaacgagcctttgcggggtttctcctggctgtcctccgaccccggcggtctcgaaagcgacacgctgcagtgggtggaggagccccaacgctcctgcaccgcgcggagatgcgcggtactccaggccaccggtggggtcgagcccgcaggctggaaggagatgcgatgccacctgcgcgccaacggctacctgtgcaagtaccagtttgaggtcttgtgtcctgcgccgcgccccggggccgcctctaacttgagctatcgcgcgcccttccagctgcacagcgccgctctggacttcagtccacctgggaccgaggtgagtgcgctctgccggggacagctcccgatctcagttacttgcatcgcggacgaaatcggcgctcgctgggacaaactctcgggcgatgtgttgtgtccctgccccgggaggtacctccgtgctggcaaatgcgcagagctccctaactgcctagacgacttgggaggctttgcctgcgaatgtgctacgggcttcgagctggggaaggacggccgctcttgtgtgaccagtggggaaggacagccgacccttggggggaccggggtgcccaccaggcgcccgccggccactgcaaccagccccgtgccgcagagaacatggccaatcagggtcgacgagaagctgggagagacaccacttgtccctgaacaagacaattcagtaacatctattcctgagattcctcgatggggatcacagagcacgatgtctacccttcaaatgtcccttcaagccgagtcaaaggccactatcaccccatcagggagcgtgatttccaagtttaattctacgacttcctctgccactcctcaggctttcgactcctcctctgccgtggtcttcatatttgtgagcacagcagtagtagtgttggtgatcttgaccatgacagtactggggcttgtcaagctctgctttcacgaaagcccctcttcccagccaaggaaggagtctatgggcccgccgggcctggagagtgatcctgagcccgctgctttgggctccagttctgcacattgcacaaacaatggggtgaaagtcggggactgtgatctgcgggacagagcagagggtgccttgctggcggagtcccctcttggctctagtgatgcatagggaaacaggggacatgggcactcctgtgaacagtttttcacttttgatgaaacggggaaccaagaggaacttacttgtgtaactgacaatttctgcagaaatcccccttcctctaaattccctttactccactgaggagctaaatcagaactgcacactccttccctgatgatagaggaagtggaagtgcctttaggatggtgatactgggggaccgggtagtgctggggagagatattttcttatgtttattcggagaatttggagaagtgattgaacttttcaagacattggaaacaaatagaacacaatataatttacattaaaaaataatttctaccaaaatggaaaggaaatgttctatgttgttcaggctaggagtatattggttcgaaatcccagggaaaaaaataaaaataaaaaattaaaggattgttgataaaaaaaaaaaaaaaaaaaa

SEQ ID NO: 364 - DNA, 890 bp, Homo sapiens
aattcggcacgagattcactaaacactgcaatacaagcttggcaacagaacaaatgccctgaggtagaggagttggtcttcagccattttgtgatctgtaatgacacacaggagacactgcggtttggccaggtggatactgatgaaaatattctgctggcgagtctccacagtcaccagtacagctggcgctctcacaaatccccacagctgttacacatctgtattgaaggttggggcaactggcgttggtcagagcctttcagtgtggaccatgccgggacttttattagaacaattcagtacaggggtcgaactgcttctctcatcatcaaggttcagcaactcaatggagtacaaaaacagattatcatctgtggaagacagatcatctgtagttacttgtctcaaagcatagaactaaaagtcgttcagcattacattggtcaagatggacaagctgtagttcgggaacattttgactgcctcacagccaaacagaaattgccttcgtacatactagaaaacaatgaactgacggagctgtgtgtgaaggccaaaggagatgaagactggtcaagagatgtgtgcctggaatccaaagcccctgagtacagcattgtcattcaggtgccatcttcaaacagttccattatttatgtctggtgcacagttttgactttagaacccaactctcaagtgcaacaacgaatgattgtgttcagccctctttttatcatgaggagtcatcttccagaccccattatcatacatttggagaaaaggagtctgggattgagtgaaacacaaattattccaggaaaagggcaggaaaaaccactgcaaaacatagaacctgaccttgtacatcacctgacattccaagcaag

SEQ ID NO: 365 - DNA, 1043 bp, Homo sapiens
  misc_feature (987)..(987): n equals a,t,g, or c
gaagctggagctccaccgcggtggcggccgctctagaactagtggatcccccgggctgaggaattcggcacgagctttcccctaagttttcttatcttcaggctacagaattattgagattactctcaaccattcctcatgttagaaactctttctcaatttatttccatcctctttgtccttctctggataatctcagatttgatactgtgttttcttaaatgtggtaatcccggaactctagatatggttcttcctatttggactaatcagtatacacattccagtagatccattttgtcctttatctagatacagtatttctagtagcttgaaactcatttgccttttaaaagttgttttaggattaaaaatcacaaaccaaatatccactgtcctcaagagaatcacctaacacccataaggattcttgtagactcatggtaaaggggtagctattgttttatatcagatagcaggagtagctattcttttatatcagataaaacacattaaagcaacatgaataggcatttgttaaaagaagatatacaaatagtcaacacatataaagaaattctcaacatcactaatgatcagggaaatacaaattaaaaccacgatgacatacaccttatcccagccagaatggccattatgaaaaagtaaaaacaaaacaaaaaaaacagatgttggcgtggatatggtaaaaagggaattgcttatacactgctggtgagaatgtaaattagtacaagctgtgtggaaaacagtatggagagttcaagtagatctaccactttatctggcgttctcactactggctatctattaaaaggaaaataagtccctatgtcaaaaaagacacctacatgtctatgtttattgcagcacaattcacaattgcaaagatatggaaccagcctaagtccacatttaactgatgagtggataaaggaaatgtgtgtgtatsmtcaccatggttgncaaaaagagacccgttgcctcctgtaaccagacactcaggctttccaggagcccag

SEQ ID NO: 366 - DNA, 2103 bp, Homo sapiens
  misc_feature (2101)..(2102): n equals a,t,g, or c
ttcctcgtagcgagcctagtggcgggtgtttgcattgaaacgtgagcgcgacccgaccttaaagagtggggagcaaagggaggacagagccctttaaaacgaggcgggtggtgcctgcccctttaagggcggggcgtccggacgactgtatctgagccccagactgccccgagtttctgtcgcaggctgcgaggaaaggcccctaggctgggtctgggtgcttggcggcggcggcttcctccccgctcgtcctccccgggcccagaggcacctcggcttcagtcatgctgagcagagtatggaagcacctgactacgaatgctatccgtgcgagaacagctattccacgagaggatccgcgagtgtattatatcaacacttctgtttgcaacactgtacatcctctgccacatcttcctgacccgcttcaagaagcctgctgagttcaccacagggtgtcctgggccgggtctmtgagacagtggtgatgttgatgctcctcactctgctggtgctaggtatggtgtgggtggcatcagccattgtggacaagaacaaggccaacagagagtcactctatgacttttgggagtactatctcccctacctctactcatgcatctccttccttggggttctgctgctcctggctgctggaagacctggaggagcagctgtactgctcagcctttgaggaggcagccctgacccgcaggatctgtaatcctacttcctgctggctgcctttagacatggagctgctacacagacaggtcctggctctgcagacacagagggtcctgctgggtatgtggcttcgtagggcttgggatacctgggtttccccaaggagagtagcccctggttccaggtgcttgctgacagcctcccatccctgcacagagaagaggcggaaggcttcagcctgkcaacggaacctgggctaccccctggctatgctgtgcttgctggtgctgacgggcctgtctgtgctcattgtggccatccacatcctggagctgctcatcgatgaggctgccatgccccgaggcatgcagggtacctccttaggccaggtctccttctccaagctgggctcctttggtgccgtcattcaggttgtactcatcttttacctaatggtgtcctcagttgtgggcttctatagctctccactcttccggagcctgcggcccagatggcacgacactgccatgacgcagataattgggaactgtgtctgtctcctggtcctaagctcagcacttcctgtcttctctcgaaccctggggctcactcgctttgacctgctgggtgactttggacgcttcaactggctgggcaatttctacattgtgttcctctacaacgcagcctttgcaggcctcaccacactctgtctggtgaagaccttcactgcagctgtgcgggcagagctgatccgggcctttgggctggacagactgccgctgcccgtctccggtttcccccaggcatctaggaagacccagcaccagtgacctccagctgggggtgggaaggaaaaaactggacactgccatctgctgcctaggcctggagggaagcccaaggctacttggacctcaggacctggaatctgagagggtgggtggcagaggggagcagagccatctgcactattgcataatctgagccagagtttgggaccaggacctcctgcttttccatacttaactgtggcctcagcatggggtagggctgggtgactgggtctagcccctgatcccaaatctgtttacacatcaatctgcctcactgctgttctgggccatccccatagccatgtttacatgatttgatgtgcaatagggtggggtaggggcagggaaaggactgggccagggcaggctcgggagatagattgtctcccttgcctctggcccagcagagcctaagcactgtgctatcctggaggggctttggaccacctgaaagaccaaggggatagggaggaggaggcttcagccatcagcaataaagttgatcccagggtttgctttgtttttttaaaaaaaaaaaaaaaaaaaaaaaaaaaaaaaaaaaaaaaaaaaaaaaaaanna

SEQ ID NO: 367 - DNA, 456 bp, Homo sapiens
  misc_feature (456)..(456): n equals a,t,g, or c
gaattcggcatgagctttctttctcctgcaggcattggaaatacagtcccagctggcaacaccagccagcagcacagcccggaatcctgctcctgacctgcaccatccccaccagcccacgatagaacgtttttgtaggcattcctcctcatgggagaggatagagtacatgcgagtttttgctctcctcccaccctttcacaagagcactgtgctttcttttcttctctttttcctttctttttttttttttaggcagggtcttgctgtgtcasccaggctggaatgcagtggtgcaatcatagctcactgcagccttgacctcctggactcaagcaatcctcctgccttaacctcccagctactcaggagaccgagacaggaggaccacttgagcccaggaggttgaggctgcagtgagccgagattgcaccactgsamtccagcctggggaan

SEQ ID NO: 368 - DNA, 616 bp, Homo sapiens
  misc_feature (17)..(17): n equals a,t,g, or c
  misc_feature (580)..(580): n equals a,t,g, or c
cmgctrctragcaactnagtgggatsccccgggctgcaggaattcggcacgaggagaacggctgcacgtgggagatgctccgtggatgtttgtagaacgctggcttccgtgtttcctcgttgtggctgtggtggtgtgggtctttgcctgtggacccgtggaagacaaagaagacagttttggatggtcaagctattttcttgcttcagggctccctcccctgctttttgaagcctcacaaaccaggactgtgagggcaggaaggcttggggtctttgtgtgctgagcctcattagggttttaagaacctccctcctttcatctctagcttacgagagggatgattcattatcttccctcctcaggctgcagtagaagcagacagtctctgcctccctgcttgcctttcctccctcccattcactgttgattattgccctcaagaataacaggttgcccagctactcgagargcttaagtgggaggattgcttgaccccaggagttcgaggctgcagtgagctatgatcgcttcactgcgctatagcctggcagacacagagagaccctatctcaagcanacagacaaacaaaaaaaaaaaaaaaaaaaactcgag

SEQ ID NO: 369 - DNA, 575 bp, Homo sapiens
atcctctggaatctaggtggaagccaccaagccttcttcacacttgcgttctgagcatctgcagacttaaccccatgtggcaatcaccaaggcttatggcttgtgtcctccagaactgtggccagagctgtacctgggcccctttgagctgaggctgaagccagagtctgaagctcagcagggcagtarggccctgggcctggcccctgaaaccattcttttctcctaagcctctgggcctttgatgggargggctgtcctcaagatttttgaaatgcctttggagggtttttgccttgtcttggatattggcttccttttagttatgctcatctctctagcaagtgaatgtttcacaacctgcttggattctttctctaccacagarccaggctgcaaattttacaaacttttacactctgtttcccttttaaatataaatttcaatgttaagtcacttctttgctcccatatctgatttaggttgctggaagtagccaagtcacctcttgaatgctttgctgcttagaaatttcctctactaggtagcctgggtcatcacacttaagttcaaa

SEQ ID NO: 370 - DNA, 1144 bp, Homo sapiens
gcacacatacgtatgcatataaggattatcatatataaatttatataacaatttttatgcatgagtgtgaataaatatatgcatatatatgtctgtatatgtaaacataatgcatatagtaatttacatatatctgtgtgtatatatgtgtgtggcacagtcacacacacacacacaaatatgtatacagatgcttcctggcttacaataggatttcatcctgataaattcatcgtaaatcaaaagtattgcaagttgaaaatgcatttcataccccagtaagttcatcatttgktcaaaagtattgtaagtcagaatacatttgacatctggataagtccattataaagtcaaaacattttaagtctaatcattgtaatttgggtaccgtctatgtagatacgtaaatcatacattaagggtgactaggtgccaggttgaatgttatgaaaatgaatttcaagtctcacaggcacattcacccattacaaatatgtaccacattcacctattacaaatatgtacacatgtatgtgttcatgttcatactacaatggcagagttgcataattgtgacagaaatcaaatggcttacaataactaaggcatttctacatagccttttaaagtaaaaagtttattcattgttggtctacataacgtggaggaatttgtagcggacaggctattacagtcagtgaattgaaaggaagggagaagttgggggagactagtagctttttgaaggtattattttagagatttatgaakttttggagaacaagggatgaggaaaaagtattgaagaatttgggagagcaggatatcaattagtttctgactttattgggaatgcagatcagagaaaggctgggatagaaaactgaaataataattatagccttcggtgaatatcagcaggactgatgggactatagggagggtagactaggtgatagagcccattgtggcagtttcggtaggacatcattggtgtatacgtatatgttatttgtgattttgtttatctttttttaataagcaaaaggaaaagtgtcctgatatgttttggctttgtgaccccatccgaatctcaccttgaattgtaacaaagttttaccatgttaaacaggctagtctcgta

SEQ ID NO: 371 - DNA, 703 bp, Homo sapiens
gcttggttacgtttatagcttcaacacgcctctcattktaggtttatacatgtgtttgcttgctcatttattttgtcatcatttgctcattttattaccagttattgagwgcctactgtgtaccaggcactgggcaaggggcattctgtgagagagggtatggtacctgcgggcttaagtagtccgtgggcttgtgaggaaaacgctagattagatcttgattactgtaaatgtcaartatggccaagtgtgggatttcgtggcaggagtgagctttcctggaatttgtctttcttgcctcaatttgcctgatagtcatttcatgctagggatgttttaaagtctctggggaggccctgcagtgtagaggaaaatgctgatccacaccagaaatgcgaacctggctctctgcccttgggcaagtcacttaaccctcctgagcctcagtttccatctgtcacttagagctgattatacctacttaacacccaggctttttgtgaggggcattatctcattagagataatgtttttaaaagctctttgtaaattgtgtagcattcaaatggaagttattgttatttttattattgagtgccttctaattcaacactgggatagtaacaaaagaagagaggggttattatcacccctcttccctgtcacgtttagattggggcaaggaaaggttctcaccctgcga

SEQ ID NO: 372 - DNA, 1649 bp, Homo sapiens
  misc_feature (1249)..(1249): n equals a,t,g, or c
agctccaccgcggtggcggccgctctagaactagtggatcccccgggctgcaggaattcggcacgagggatctgtgtggcatggtatgtgtgtttatgtgtattgtgggtgtctgtgtggcatgctgtgcgtgtgtgtattgtggatgtttactgtcccgggcagtagaaaggacgtcggggaagcagccccagcatcagggacaggccaggagtgcagaatgcatggaagctggtcaggtcggagcctgggatgaaggaagcacagagatgcaagggtgccagggcccatggaaccaagagccgatgatcaaggccacagtgcacacagccctggaggcaaaggacatattcatttcacaaggattaaaaagcatgggccaaggctgggccccaggccaggactggggatacagagtggatcagtccccatccctgcccccaggtgcttacccacacccattcacctcacaggtttccccaccccagccccttggcgagctcctcctcattcctcaaarcgtcgctkaggtcacgctccttcccgaggcctctccccatcctctaaaacaccctctccctgctgcccacttgcagcacagtcagagagctccgtggcctgtttccactggactgagtcttctggggggtgctggtgcagagcagarccctgggctgggagtcccggcacctcgttccactccctcacccacagcctcgctgtttaacctcaggcaggccgtgtmcctcctcagcctcactttccccttgtgtaaaatgagggaagggactgcgccttctaagccatctttcagcttaaaacctctttgaccttctatctggctaatggaggtgctgaccaggggcaagaagggatttgaaaaacgctttgaaaaattcatagcaggaggcaaaggagaaagagtctttattttcgtagagcgggaggcaggaggagttatggacagaggctgtcgatgaaaaggacagcatctcagagcactttgtggcatttaatgtctaatgcctcctcccattaaagcagtggcatcaaatatttaccaaagcagcattaaaaattaacctttaccatggggatgtataaaggccctaagttccctgagaagtgaccgaacatcaggagggtaaagtgacaggaaggaaggctacaagcgggttgtgaataatggaagcccccaaaggtcccccaacacagctccctgttgaccccactcccaaagccagggcancctccggccgtgtctctgcagaggctcccagcccttcggagactcccagagggcctgcaggataaggacaggccctcagctgggcatccacagccttccatggcctggccctgcctctctgggcagctgggatctgtaggatggaaaggaatgagtctgtcggagttggaagagaccaggggaggaagtggggagtggtccgggcactggaaatagcacgtgcagaggcactgaggcagagacagctgcacatcaatccatcagaagagcagccaggtggcatgagtgtgggggaggaaggaagcgcaggaggggacaggtgggagatgcaggtaggtctgactgtgcagggccatggtaagatgtgggcttctcggtccagggacaggggtgccctcga

SEQ ID NO: 373 - DNA, 639 bp, Homo sapiens
  misc_feature (62)..(62): n equals a,t,g, or c
  misc_feature (126)..(126): n equals a,t,g, or c
tcctttcatcttaagcaccacccgacagggcaggtactattaccatctccgtttgacagatnaggaacctggcacaggaagcatttaagtggattccccaggatcgccccactgtcaggagcagantcagaatgggcctcagcatcaggctcccaatcctggcttctaactgctgcgctctgcccttcyctcwccccacctccccactccagtgcctttggtcatgccactgcagctttcaggccaatactggattagcctcttagtgttcttgtccctgcagccatttccccaggcagcaattccatgtgccctcactgatgtaggtggctcttgtgtcatttgtcacatcctattgaattgtttatgcatcttgttcacactcacagcaccctccctctcacacgtcctccttataaaaatgtccctcagtgtctgctatgagccaggtgcagacttaagtgacagggctgctacgggaaataaaaaattaacaaggagcacctgcctcttaatgcacagtaacaaactatgttaagtgtcaggaaggaaaggttaaggatgccaggaaggcttttaataaataacctgacttagatgggcaggtggtgctgargattaagaacgtgttcttctcga

SEQ ID NO: 374 - DNA, 520 bp, Homo sapiens
gagaaggactttatgcagggaagtgacgcaggacacggagggactcatatttaccgagctttggtgcagtggcccctggcctgggtattctatttaagccatgcaaaaacccattggggagaagagttaaggttttccttccgcaggaaaaacttgaggctcagagaggctatgagacatgagacatgccaggtcacacagctggtagctggcaaagctgactccaacctgtgtctgagggactctgaaacctggttctggcccccactctgggcagcctgctcctctctacaagccactgcctgcagattaagcagtcctagcaaaggcctgggagcatccagagagtgcccctggctggcgagtggtagagcagccttggtttccttcctttgaccctcaaggatcacaggagtgtcacccagaagtaacttaacttatgagtgttttatgaacaggaaaagcaggaaaaggggtaaagtcacatgatttcacaaccaaacagcctgtaaactcgtgc

SEQ ID NO: 375 - DNA, 524 bp, Homo sapiens
gcacagagggcttgggtgcaggtggtttatttgggaagtcatcctggaaaatccaaaaggaagggatggagaagagatagaagacaagaaagaatgcattgctcgtgggtcatgggtatagaaagtttctaggaagcttctgcagaaccctatgcaatgtgcctcgaattgtccaaggaattgaatggggagctggtgcatttgtacactacttctgttgctcactgatgggcaacagggcttttatccccagcctttccaggctgccccggggagacagcagctatggggaggcaccaacccatgggctgtactcattccagaatccttcctcccctacacgctgacagtcaattattcaccaagttgtaacttcgaattctacttacctaaaatgcgtttggcatacatctgcatgtcacactcacactgtccctatcttggtcgagacattataatcactctcctgaactactgcagcagcttcctagctgaactcctggctcatctggtctatattgctg

SEQ ID NO: 376 - DNA, 1035 bp, Homo sapiens
  misc_feature (55)..(55): n equals a,t,g, or c
  misc_feature (110)..(110): n equals a,t,g, or c
gagcggataacaaatttcacacaggaaacagctatgaccatgattacgcccaagntcgaaattaaccttcactaaagggaacaaaagctggagctccaccgcggtggcgnccgctctagaactagtggatcccccgggctgcaggaattcggcacgaggttacctcctctctttcagaaaaaagtgtttaaatttaataaaaaaatacagacttcctctctctctgacctgtttctgcacttctaattttgtcccattgttatatctcaattctgaaacaagtcccaaacctttttgtacactcaggcttttattatttataggtgtctttaatgtggtttcgctgttttttgcttatttttgtgagcagtgtgactttgacaggtgactttagaaacatgaagaagccaagcagcctgtgcctctttagacagggcttgatgtctgcttctgaagttagtggcagcggaagtggagaaggggattgaaaggtatctttaaattcgraattatagaaagtaaaaactggtagatgtgaggacagtggggaaactaagatcatagtcgcctaaggttctgttaatacttgagttgaccaggggggctggttatgacattgatcatgctaaaggaaaagatgccaggaatgagctggggcagagtgaattgggcagccttccatcttgacagcacaccaaaatgtataaattagcaaaagcccatctttccctaatgccactaagctgtcagtttctggaattatcatcattattarattcataatggttttaatraaggtgtcatccaaactgacactttgaaaataaagtgagatgatgcctaaattggaggcttggaatgaccttagaaaactgctccaggaaacttgagaatgtcccaattacttaaagaactctgagtcagctacatggctcattccattcatttgctttgcattggagagatttatttggattgacacaggttcatgcctcccagaaggctccacctaaaccatcactctgctttctcgag

SEQ ID NO: 377 - DNA, 491 bp, Homo sapiens
ggcacgaggcaaaagcttgtgctgttagctttaaagtgtatttaaaataaatctgaaatcatttaaacagcatgaaccttggtggccaaatagatcaatgacaaagaggagaaaacctagatacaggttcatttttgccttatatgctttgagattagtgtttctatttagagctgtgactaatacagatgcatcacggctgagagcaaagcgaggtgaatgtccctattaattgccaccatggtgcgaggctggaatgagggtgtggccagctaagaggggatttgctcttcttgccctagaagttcctcattgtttcctgtcctgtcttgtgtccagctgcttagcacacttccttttggtatttaatgctttttatagctggaaccctgaggttcctcagaaatctgcacatgcttactagatggtgctctggattttctttaaagataggaagaaaaaggcaaaggcaggtctgtgacgcttcttac

SEQ ID NO: 378 - DNA, 1042 bp, Homo sapiens
  misc_feature (222)..(222): n equals a,t,g, or c
gaatcggcacgaggaaatattactgaattttcttttattatcaaatacaaatttagcatatcctatgtaaaatgctgattgcccttttctgcatattatttcagatcttgttttctatacccacaaggattttctatatatttctcataaacaagagagtccacatatttactacttaccttatgagtgaacaaaaaaatcacgattgggttcgcagaactncaaagttgcaccgtgtgtggctcattagtggaaaaatgctgctggttgcagatataaaggctctgatcaggtggctgtggggccctaatccagaatgagcacagttattttgatcaatggagtctaacctagtcctcccccaaggttcaaaatgtcctctggtgcttgcaattttcttacagtatttttttctaattgataccaagctgggactctcctggtatatcatatttggaaatgaaaagtgaaacaaatgagaattttccttttgcgttggtgaatgcatacagtgatttaagtttgggtgcatttctttcagtctgttgattgttctaggaatcgatgctcacagatcaatgagtcatgtccaatttcataaacaactgcctggggtgagtgtggcctcataaatgtgaacaaatagtaatggagtggcaatcaaacctaaagtgttactgcaaatcatgccatgctgaaagaagaaacatctcaaaaagagaataaacatttttagggtcgggtgtggtggttcatgcctataatatcagcactttgggaggccaaggcagaaggattgcttgaggctaggagttggagaccagcctgagtaacatagtgagaccccagtccttacaaaaaaaaaaaaaaattaacaaaggattgtggtgcatgcctgtagtcttagctactcgggaggctgaggagggaagacaactttaacccgggagttcaaggttrcagtgctatgattgcaccatcgcgttccagccttggtgacagagcaagactctgtctcaaaaaaaaaaaaaaaaaactcgaa

SEQ ID NO: 379 - DNA, 1095 bp, Homo sapiens
  misc_feature (616)..(616): n equals a,t,g, or c
gatggtatgtgtgtggtgtgtatagggtgaatgtgtggtgtgtgaggtgggcatggtgtgtgtgaggtgtgtgtggtatgtgtggcatgtgtttggtgtgtatgggaatatactatggattaggacatgtgggttattcaaagatctatccttttgtgctttgaaatctgaaatgtagaaactgtggcctcactgaggaggagttttagaatatgcaagggagatgatcaggactggatcttgtatttgggtaccacatccagtcccagacagcatgctaaggcaaggagctcataaaagccccaagctctagctgttggctacttatctcctggagcatcaggtgagcgcgttcaggctggggagtcctgatggctgcctggttgttacaggatgttacagcttaggcctggggacatagcccagcaccctccagargttgtgtctgttctttactcttcaggttccctggaggcaggagaggarctggcctcatttctggcaggcaccccactactgttattgagcaatcctccaggctgcagagatgtcagaggaggaccctaatgtctcckgattttgattattttgttctttttccctaggtgttttactngcagataccttgagtaccttgtttgtatattcactttgaaagcacacatttaaatgtttataaggaaaaggttctaaagacatccattgatccattcattcatcattcagcaaatacctgttgaatacctgctgtgtgctaggcactgcggtgggcgagccagarggctttgttgctccaaggarcttgcattctagtattctagttattttcacgcatctgcactatctgggacagggaccattgcgttttgtcgtatataaagcagcatgtgtctgcactacagtttgtgtccgtygcagatgggcaaggattgagtgcaaaaacttctgggccaaaaggggttggcttgggtcaggctgctaagtagctgaggtgaaagcatgtgccacccctcctgatacagggatccttgctgattgtgtgtgacaccagggccttcccatctgtcagctgggtttgtcctcacagtagctcga

SEQ ID NO: 380 - DNA, 427 bp, Homo sapiens
ggcacgagaaaggagccacatttcttctcctttcacctgcatgtcataaggtggtcatggatatattctttcatattcttgctaaaatactcattgctggaagtaacacaagggtatcaaatttgtataaacaacagtatgatttagttctctaatataataatgcaatataacaaaatgagtccattcaactgttgtccattcaactataccttaatatatattattttattgatgcttatctatgtatacattagttctgtgcacagtctagtggatagtgatctgttaaatggataaatgaatgaatggctgaagttttatccttctgaatggatgagtggcctctctagttcattttcaagcctcyagggcyatgatacakgtttcctatttccagatttttctttatgttctctctttattt

SEQ ID NO: 381 - DNA, 796 bp, Homo sapiens
ggcacgaggtgacgtgtttctgcatctgttgccatgacaagctccctgcttcacccattgctgtatccccagcacctctctcactgcctggcaagggaaagcactcagaagacgctgaatgaccargtagagtgatgggttgtacagcactgttactccttttccatctctgtgtcccatgtgaaccttatggcacccatgagaaggagcttgtaccaggtttatactttctagtttacagatgagaaaacaggatcagagtggtacagatattggtctaagtcacagagaaagtgaattgtaaaagcagaaacagagcacaggctgcctgacttctagtccagtgctttttgctcaaattgcctcttatttctcaggttattcttgaaatggcagatggggattctgtttaatgaaacaaaagtgacaattctttctttcttggagagaaggtggagacagggtctcactctatcacacaggctggagtgcagtggctcaatcatggctcactgcagcctcaatctcctgggctcaagtgattcttccaccttagcctccttgactcactgggactacaggtgcacaccaccatacctggctaatttttaaagttttttgtagagacagggtctcactatattgtgcattctggtcttgaactcctggtcccaagtgatcttcctgcctcggctttccaaagtgctggaattacaggcatcacccccatgcctagcctgaaaattctttctatgtccttaacatcttctttcccagtatttctccatccactcga

SEQ ID NO: 382 - DNA, 527 bp, Homo sapiens
  misc_feature (492)..(492): n equals a,t,g, or c
  misc_feature (494)..(494): n equals a,t,g, or c
  misc_feature (522)..(522): n equals a,t,g, or c
  misc_feature (526)..(526): n equals a,t,g, or c
ggcacgagaaaaattctcaagacccatgtgaaagtcagagaggggtgtggtggcctggctggcctgaagacaggtgttctgatgattctggcaggggcccccatttgcctggcactgaaattatattagtatctttactgtatgagcaccgtgcccatcagggcaagctgtgactcctgtcaccaaacactcaggaaccattgcttttggggcctccaggatggtttcatttgtaggcatctgccttctgttggggtcctttttttctccttctctacaggggacaatatggcaccacccagcaaaacctgatgggagtggacatggactaccctcatttgcagtaatcatgggcaagcaggtggtacccacagtgtactggagaatgccctaccctcgwagggggggtcccggtaccyaattcgccctatagtgatcgtattacaattcactggccgtcgtttacaaacgtcgtgactgggaaaacctggngntacccaacttaatcgccttgcagaaatncccnt

SEQ ID NO: 383 - DNA, 1037 bp, Homo sapiens
ggcacgagctcgtgccraattcggcacgagggtcatagtccacagaggtaaaagttaacaattctgatgctcttgtatgtgcataccagaggctctagggaagaattccctctttctttcttccaccttcttgtggctgctggcattctttggcttgtggtcacatcactcctatcttgaaggccagcatcttcaaatctgtttcttcttcacatagccttctgtgtgtgcagtgccctctacctctctcttataaagacatttgtgattaaatggagggtttaggataatctcgtcaagatccttaacttaatcacaactgcaaaaacctctttcccaaataaggtaacattcacaggttccagggattaggacctattatctttggtaagtattattcagcctaccacaatagctaaaacaattctgaaaaagaagaataaagtgagagaaatcagtttatctgatttcgatacttattgtatagctatggtaaataaggctgcatggtattaaagaaaggacatatatgaatgaaacagaatagaggacccagaaatagacccacacaaaggagcccaaattatttttaaccaaggtagaagacaatttattggaggaaagacagccttttcaacaaatggtactataacaattagatatccataggcaaaaaaaaaaaaaagaatcttgatctaaggctcacaccttatataaaataatattaaactcatggccaggcacagtgactcatgcctataatcccaatacactgggaggctgaggcaagagtatcacttgaggccaggggttcaagactagcctgggcaacacagtgaaactctatctctacaaaaaaattataaactagctgggcatggtggcacatgcctgtagtcacaactactcacgaggctgagaagatcacttaagctgagttgttcaaggttctaatgagctacaatcgtgccactgcactccagcctaggtgacagacaaagaccccatctcaaaaaaaaaaaaaaaaaaaactcgta

SEQ ID NO: 384 - DNA, 828 bp, Homo sapiens
acgagaacaccatgctagtgagttcattcctaacagaggagaacttgcatcttgactaagcattagtgatctcaaatcctctgcttatgatttttaaacttctgatcttcagaatatttttccatgagctagctctggctttgtgcatctcaaaccttgtttctctcccatggctgtcatacttctggtgccctgagatgcagaatttatttctacttgatacacacatttgggtattgatgtagggttagtacagcaggtaggttgagaatttctggagcctccctccctccctttgttctgacctttccttagtcatatcatcctagaaagatcttccctggcttcgtctaaaacatggcctctcatttcattctctccctgacaaccctgatgtagttttcatttcaggactcatcaccccaacatcctttcctgtttacagcccatctcccctgctagaacacaagctctgagaggtggaaggcctctattgtgggttttggcgaatccccaatctctagatggtgtctggcatgtgatagagattcaacaaacacttcaacaaataatgaataaagttaaatttttcagagtgcaatcatgcctctcccttcctctgccagggcggaggctgtgcctggtttgcgcggcttctgcagctccagctccttgtactgagtctggagaatgatggagctcagtccattttaatcccatgaacattaaatgcgtggatgtgtggatgctgggatggatggatgacgctcctagcacggcagcttgcaggggattggcgatttccagtaaggtgtgctaagactcgag

SEQ ID NO: 385 - DNA, 985 bp, Homo sapiens
gtcggcacgagtaataaaatctaacacctgcttagagaccattcttgtagtggacacaaagtgccagcctctaatactccttccttactcttcatggaaaccttgaagagtgattaaaaatagtactgtttatgtctctgaccacagagccagtcattttcagcacttaactgaaattgctcatgatagtgtttctaacaatggccacataagtggcaaatcccttaagaattttgccctctcagcaggtggcaatctgccacctttatctgatcatttctctcctcctttggcattgtagacaccattttttcctggttatgaccctacttctctttatcttctttgtcgattgcttttccactccagggagttctgtgtttgacacacaggaggtgtgggtagttgtttactctgtaaataagttgttagccgtgcagcactgccaaggaattgcaccaaatgtgtatgcattagcagttaagaagagcgtgtgcaatgttagtgaatggagtctggtcatttgtcatccaatgcctatttagcacctgttatgtgacagataacaggccggcactcggatcataacccggagcaacatagtcagaaacaaacacaatttctctccttggtaagcctggtctgttgggaggtttgataagtaaaaagaagactgagargccgggagcggtgctcasgcctgtaatcccagtactttgggaggccgargtgggtggawcacctgaggtcaggarttcaagaccagcctggccaacatgataaaaccccgtctctactaaaaatmcaaaacctagccargcatggtggcaggcgcctataatcccagctactcgggggctgaggcagaagaatcgcttgaacccgggaggcagaggttgcagtaagccgagatagcaccatcgcactccagcctaggggacaagagcaagacttcatctcaaaaaaaaaaaaaaaaaaactcgag

SEQ ID NO: 386 - DNA, 1110 bp, Homo sapiens
gaattcggcacgagcttggttcgggggggagcaaaatccagaatctgctaaacaccaatgctgtcactcagagtttgtgtatctgctgtctgtggagctctggaccaggcttgagggacgcctggggtttccacccacatctggggcaaaccagacccccaagtcactgacatgtcggtttttctactaatcacgttggctttggcaattctgtatataataagaagtattgtgttctcacttgcacttkggcagaacggttcactccaaggctgaatgactgccacggaccatcccccagcaggggtcctggggtttagtggtttgattctgagcacctctamgcamagagccccttagtgggttccctaactggacggctaaccctgstgtggaatctgactkkwtctggaccgaagaggacaggctgctctggagaaatccttgggccttgtgcctgatgctggctcgggccaccctggccaccctcccttcatgccccatgggaccaggcagcagcatgggagggggcagcttccagaacacccttctgctaggggctkctggcctccctgctggcacggccacatccatggtctgagtgtgtggttggaatgttttatcaacaccagtcctcacagcttccccagatgagcgaaggggaaggggatggtgtgtggggggattgcctcccttgaggccccccagctcccaggatacttgctggcggagctctgcctgcggtggaggccctatgacttgacctccatcttctccctgggcccctcgctggccctcactggcaggggctcctgcacgcctgcaaggccagagcctcccgccaggtgcaggagaagtaaatgcaggccagagataaatcgtatttccctctaactcggatgtggagtgagaggaaggaagcaggagtggagctgagtgttagtgagaggtggctgagaaggcggggtcccgcttcttgcttccttgggcatttgctgtaggtgctgggtttcagcctggaagggtgcagcctctgcactaagtctggtttggtgaacgttcatggcccccaatataaacagtgttctgggcgttctttgtgactctcga

SEQ ID NO: 387 - DNA, 925 bp, Homo sapiens
ggaaatagtaggaaagtggagcctccagaaccaagagagacaggagtgggaggcaggctccagcacgtacacatggaagagaggtatgaactctcattgccatgggcagagccacccagaccactgctgagcattctgggaagctcccagggccctatcagtgcatggcatggaagctggaatcactttatttgaatagtgaagtctacaacaacctctgaagtctgaagacgagaatccttcaaggtgacaggccttggcccatccctgaaccctttccctcatcctcccaacagtccttccccaatgcctcattttcttctacttgtagcaaaaaccattctkatcaactcagaaatgaacatgtctccagagtatagccaaacatgtctccagaatacagccattcaacatccagtaatcaaggagaaggatatgcagccttgggctggcttgtgccctctgcttgttttgtggatatctggtcatctccattgtatatcagcactgctgcaggagagaggtgtgggagtgtcattatcttctagatcagatgcctgtaaagctgcacacagaattgggaccagctccagctaaacagtgggttgtagcatctactgaggattgcaaattaggacaaatcattatcttctccctctttctctcttcctcagctctttctcaatctttactacccttttacacacacacacacacacacacacacaaacacacacacttagactagaagagtcatttaacatgagaacatgaacatctagagatatggtttggctatatccccacccaaatctcatcttgaattgtagctccaataattcccatatattgtaggagggacttggtgggagataattgaataataggggcagtttcccacatgtgttctcatggtagtgaataa

SEQ ID NO: 388 - DNA, 956 bp, Homo sapiens
gggctgcaggaattcggcacgagcagagacccccaccccccagctgtcctgatgccccaagccaaaacataattcctggcagctcccccactccccctccccctcactcttctgccacccagagcttggcccgcctccaacagcccatgttctaattctgcagtttccagaagcccaccctcaaacccaggtcacttccccagcccctccagcttctagtccccgggtcgtgcccatcctcaccttcctgggctgaaacaccacattaggcacccagatgcctctgcatctgaaaatctcacaagcctggatgtccctgacgccacccactccggttctctttctctttctcagcctcctgtgggctcggttttttctgtccaggcttaaatgcccaggtggctgtctctgctggcccttacttctctcacggggatcctcagcggcaccctgggcttcagtccccatggatggagcagcccacgccgccatctcagccccaggcctgagtgtccagctgcttcccagacaacttgcaagtccctcggccaacactgagctcagagtcctcctcctccctgccagggtgcgccactaccttccctccagttttcaccaggtcttgggttcatcctgactccctccttcttctctccccgtccctgccacacctcactgctcacaagaaagacatcactgtgtccgttctccttttttcttttcttttcttttttttttttttttttgagacagggtttcgctctgtcttccaggctggagtacagtggtgcgatcttggctcactgcctcccaggttcaaaaaattctcatgcctcagccttccaagtagctgggactacaggcacgcgctaccacacccagttacatttttttgtgtatttttagtagagatggcttttgccatgttggccatggctggtctcaaactcctggcc

SEQ ID NO: 389 - DNA, 742 bp, Homo sapiens
gaaacctcaggcaagttcctggccatccccaggcctcattttcccatcaggaagaaggaaataagcacacctgtctccccagtctccctgcctggctcactgggcaggcaaatgtgtgggaggtgattgcaaaggtaccagatttgccaaatatacgcttgcaattaaatccaaaggcctgtcccacagttgcttgactttttttaaaggccaatttatcctcctttcttaaagactaaacaatttttccacttcatttattaaaataaagctctttaacttgcacgcttttagacaaaagcaacagtactctgaaatgaccccatcacttctcagtgagaagctgtgctccctgttctttgtgcttcttgggattgcaagtgcggcctttgtgagtgctctgtgggcctggagcagccacacggaaaggctcacagctgaacccagcagtagcatcacctgcctttccccaccctggttttttttccctttctaatttggggtcctcttatagctcctcaaatacaatgtactcgtgtccctcagagccactgcacagactgtcccctctccctaaagagaccccgctcttatcctccccctcccctacccmacccagtcagccagctgaactctggttcatcttctgcatccgggtgaaaggtcaccttccttgccagtcaacccccaccctcccactgcagtcatcagagatgagcagcctctaaaacctgccctcgag

SEQ ID NO: 390 - DNA, 1298 bp, Homo sapiens
ggcacgagctgagcccagcccggcctgccatcctggcaagccagggcagcatggaggtagcacagagtggcacccagccagcgtgaatgcataagaatctgcacgtgacacagaagaaagtctcttcatgaagtaggtttcactggtcccagccaaaccctgtggcatgtggccctttctgcacctgctgaacatgccattcaccttgacccaggtagtggcctcaccctcctcttgctcaaactggaaacctcagcatcctgaaatgcctcctccccaaatccattgcacacatgtgtgcctgtgtatgcgtgtgtgtgcacgtgtatgaacccagcccccagctgcccactccattgcccctaaacaggcccctccttggtgtcacctggcacatctccactggaagccaaatggatatttctaaactgaaatctggtcccacctcagaaccccttccacagttcccttaaagttcctttcctcatttacatcaggatcttcacaatggggacccctggtcacctcccaacccaacaaacgctccaaatgagccgccactgcagaaactcattatggcccgggcaggactggcacatccaagtatctgaccaggctgttccatctgccaggcaggtcctgccctctctccacccacctgtctaacccctgcatcctcaagaccctacttagctatggccctgtgtgaaaggtccctccccatgtacccacagccatttgttctctctcatgtggccctaacaggctggggttcctggagactccatggggagccaggcatgaagatggcatatacccatgtgtcactccccagaacgtgagctgcctgccctggcaccatacacaaagggactgacagccccagaatcccaaggggtgcacctatgcatatgggaaaggcatgtttacgggtgagaatggtccatcgttgggcttcaggaggcatctgacctgacgcacgcctttgtcactttgtccttgtggcctgttgaaatgccactcctgctttacaaattcaccaactgttgcatgagtcatttccacctcaatgagtaccaggtccttgaggatggggaaaagtaagccaccactgtgggggtcctgggctcctaggtgcagaagaggctccagaaacaggccaggtcgtgggccatgaccccacactagccctctggtccctcacacgggtggattggggggctgtgtcacgggatcttaggatcttcaagacaaagacccaggacaagaacacaagcccactcccattcttcacaggc

SEQ ID NO: 391 - DNA, 905 bp, Homo sapiens
gaattcggcacgaggtgatgaataaataaatcaacagagattttaccatgtttttttttaaactgatctagtttatcactctcttatctctacaatttatctttcactcaaagaactaaagttatcttccaaaaacacagaatgaatcagctcactctcctcaagactcttaaatggtccttcattacttgttgagaaaagcccagacttgtttagtggagcaattaaactccccacaatttatctgccagaagactttctggaaccatgtatggtttttttgccctccaacttacagtcttattggtccattatttttttctcatcatgccacacatttttgtgtcaggtaattttagtcttttggccttgttcttactatcagccaacttcatagttgaagtccagagttggttgttgttgttgttgttttttatckatttaggtaggagttacaatttttatttgctttgtgacagcattattttctgacacattttcttcatattcttttaaagagtttcttttttaaacccatgttattcaaggttaaacaaataacgagtttctttgtttggatgttatgcttacacttacttgaatatgttgttttttttccagactagccattagcaagattcctgtggagtgagggagtgcccagggtagttctccagattattctgctcaaattcttcctcttctcatgctgcagtgatgaattatttcttcaaaactatgaccccactgtgtagctccacctttccttgttctcacaagagtgtacaaaatcgttgagtcttctgagccatggctaacaagaatcctagctactgccttccactatatctttccctttttaaaaggagcattttctgagtttagtcatctcaggccttcctcga

SEQ ID NO: 392 - DNA, 762 bp, Homo sapiens
gtttttctccttcttagtatcttttgcatatagaaaataattactatgaaattatagatttgacgtgcaaaggctatttcttgaattttattaaaatgcaaaaagatgcatccatgtcttctctaaaaggactgcgtattcctccacacttggggaaatgcagcttgtgctatttcacaggctcatcatgccccttttttttgccaggacgctggttgattaatgccatgcttggggagtgctccagccagaaatgagggctatcgcctgtggccaataacagagcagattctcaataaacatccccttggtgttacacttaatggggcttgcttttccaaactgctccctttcctgggctctgagcagctgagccgagagctcgtaagctctgctgccccagaacattgtgcattcyttgattttgaaaartctttcctgaagsctcctcttgggtcattggatcagcccaagagcaaaggatttaaaagggccaatttgatagggacagctcatagccctgtgtaagaccactgggcatttttcctgtttggggaaatggttactggattagcattttgctgtacagggcggtctgcaagaatgtgtgctcttgcctgtcctcaaagcaggcttgtgaggagctttctgttcccagccctgccatttcctcccaattggctgggccagatgctccagacacagttaatgagatgctgagtgaaacagagccgctggctcacatggcctcagcctcctcga

SEQ ID NO: 393 - DNA, 725 bp, Homo sapiens
aggttctaagcattttgcttgacctgactcatttaatcctcacaaaactctacaagataagtatattctcactactttacaggctaaaaatctgaggcacagaaaagttactgaagctccaaggtcacactgtgtaccataagtggaagagctaggatgcaaacccaggcagccgggttccagagcagtgttctaactactaccctctgttgcctctcattcatcccatgaccttcttttgtcttacctacactgggatgtgtttgggacatgcattttgcttgttgctatctcattcttgcagaatgcattgtacttgctatttgtgtctattcacagttcaggttttgccaggcaagtacaatgaaggaggagaggggcaaaggaattgagggtgcctacaagggagtagttagagagatggatgtgaaatctaagctgggcaaattgagaagtaaggacatgatataggtgatgggcagtaaaaatatgtaatgtcagcagtttaaaggactggatggggcagatattaattggagttgcaggactaaaggagttcaaaatataggaaatgaataccagagacagagagagggctgaagtcaaaatgttggaggtggtacttattattaacaacaaggtctagaggatgaccgcagaattggggtccaaggtgacacatggctgacagctgtcattgaccacactgtaatgcagaactcgta

SEQ ID NO: 394 - DNA, 606 bp, Homo sapiens
tggtcccccgggctgcagattcggccgagaattacacgaattaawttattcatgaggctacatttcatttcatatgcatgtttccaggttgtattctcttgtgcaatctgtgtatgttctttgtcttatctttttctatgggaatatttgctttttattcacttataagagcaatgcatgtatcaaggttagattttaattttgcaacatattttgtggcataatcaggtttaaaatgcttgaagttaccatatatgtaaattttttcttcatgttctttgcatttaagtgactggaagagttcattccttccactgaaatcactgaataactaccttggctacttggtgccaatgatgaaggcatcatatttatacccctcaaaggattcacagtccaggaagaagcagacaaacgaagactttcataagtgctatggagagccaaggaaccatctcgatctgctgggaattcctggggcaggaaactgaggatgggactgtggtccaaggaggcagactctgaccaggctgggacagggaaggggagcgttcaggtcaaggtggtcggccttctgtcagagcatactgcattacagtactcgta

SEQ ID NO: 395 - DNA, 793 bp, Homo sapiens
tacgagactagttctctctcgtgccgctggaaagtaagcaggccaaatctagtagggccttgggtcatcgtaagtagtttagatatgaagtgcgtagaaatccttggggaatctgaagcagaagagtggcgtgttctgatttaaggtttaaaaagaacacttggctttttgagttgagaaagtattgaagtgggaagcccagttaggagtttttgcagcaagaggtaaggatggtggtagttagatggagaggccagggaagcttcagagtctgtgtgtgtgtgagtgtgcgtatgtgtgtgcgtgtgtataaggaacagctaaacaacttgctgttggagtgggtgctactgagagctaagtactgctagctgctgcagaggccgtgtagagcagaacagagctgatctttgccttcacaggtgtttgacagttctgttcgtttctgaggtgtgtaccaaaataaagtaggctaagagcatttgactttaagatttgtggagctcgggggtgttgarggggatgcagcwaaaaacagagtctgttaataacccttgttttatattgcttaataacctgtagtctctgttagtgggtcaaaggagaggcagcagcagatgatctttaaggtacctgtctttgagttagaaawacatagcttgaggaagttatgtagcttccctacagattacagctaatagtagaaccagacttttaggtgagctcatgcacacatcaagtcttagcacactgcctagtatatgtctagagctcaataaatggtactcgtgcc

SEQ ID NO: 396 - DNA, 426 bp, Homo sapiens
ggcacagggcaggagagacttggtccatggggagaagcctgcagtatagatgggacctccaggagcccaagtagcatagaccctgctgatccggggccattgagccagaggatttgggctgaatgtccccagagacaaaagggaaaggtagatcctttcccttaaagatgaaagccatcgcccgggcttgcttattgctctctctcctggtccttccacatgttgtttctgaacatttgttctggcatcacaatccccgtcatcctgtcatctggcccttcccacctttccaccttatctcttgcagtgtctccgcgtcgacctggcacctgggtgaargcttgctcttgctggtgcccatagcccccagtgtatggtcttgamctccccagccatatggaracccacctcaggagggcccctcga

SEQ ID NO: 397 - DNA, 843 bp, Homo sapiens
  misc_feature (1)..(1): n equals a,t,g, or c
  misc_feature (486)..(486): n equals a,t,g, or c
  misc_feature (489)..(489): n equals a,t,g, or c
  misc_feature (492)..(493): n equals a,t,g, or c
  misc_feature (529)..(529): n equals a,t,g, or c
  misc_feature (572)..(572): n equals a,t,g, or c
  misc_feature (681)..(681): n equals a,t,g, or c
  misc_feature (731)..(731): n equals a,t,g, or c
  misc_feature (771)..(771): n equals a,t,g, or c
  misc_feature (788)..(788): n equals a,t,g, or c
  misc_feature (797)..(797): n equals a,t,g, or c
  misc_feature (809)..(809): n equals a,t,g, or c
ncgaatatgtgtagctcagctgttttgaaaatgatctgtttgtagaaggccacaaagcaaatattattatcttaatcttattctgaattttcaccactaaaaccacattctattgaaggaatatataataaaagtgcattatcatatagtgtcacaatgagggattcaggtgcgaagggaagactcattcctgtgaaaacatagcccatccccagcagttggtagaaggatttgctggagttcctcctctttgtgtggcctataaaacattccatgaggcatgtggcaatagtcacaatgatagtggtcttatctcctccagtcttagcatcctcactcaagccacctcttttcatagacacatactttatgtttgggaagaggtgctctaggtgggacaccctgcctgctccaaataattcctactgacatccatggccgcttcattctatctgagctggagatttgggatttaggtgggcacgnagnaannaggggtttggggccagtgtcgtttggatgattttgnacagatcttcctgggggtaagagagataggtgggtctaatcanccagggaataaaatgccaaggtgtgtgtatatggaaaatccaagggagaggaaattaaaattatcccagattgcttatttaatagtcaggaaactcaactttcccatgnaaggtaagattcccccactgtgtcctttttctttttccctgagaaattgnaccaatttcctgcagtcagatgcaaaaaatcacaggtggnctgggtcgcaagtgagncttcatgtnctgtcaaacctnagtcactttgggcaggcccaaggtcaggtggcat

SEQ ID NO: 398 - DNA, 2642 bp, Homo sapiens
cccccgggctgcaggattcggcacgaggtgacgtttacatagcgtgcagggatggctggccaccccaccctaatcttattatgcaaatgggctttccacctgactggcgcaatctgtgagccctacctaaatcaaacactgcctactcaagcctgcctataaaatccagagaactccaccagccgctctttccttttggaagcccctctttccttttggaagcccctctctctcactagagagagaacggttctcctttctctttcttttgcctattaacgtcctctcctaaattcctcatgtgtgtccgtgtcctaaatttttttggcgctagacgacgaagcccgggcacttaccccagacaacaccaccacttcaatagaatgtacaggccccgcaatcccaatcttccccaggatgtagaaacccagagcagagtgctttgggggtcccctggcggtggtaggatgtagggcatgcacagacaaatcccatccgccacacgcagctttccctttaccttgggagatgcgcttgccaggaatcctaggcttcttttgtgtcttgtttgtctgtattacagttgctccacttaatttgttgtgcatgtgttccatcttaccagactggtgcaagtgttggaaacttcagattggtaactggtgcacaccaagcctgcttcacagtagtgggtgccaaggagctgctaggcctatcctgtttcatccgagaggaaaacctcactaatccttttcctatttctaacttttttcttgcttcagtccagagaccaaaattaaaatgtaaaaggtaggattctacaagacaaatgctgttttttgtttctttgttatcatttttattattattgtcattattgttatcctataacttgtcattttcaagacaacctttggagagaagggggaaaaaacacatgggctctgatcccatctcaaactggaaccacactttttgattctcagtgtagagctcattagtgctgcctgggttacttccatcagcaaaaacaactctggtctaggacttcctaaaataacagaggccagaaactcttttcctgagcttgccaaacttgtgcgtttccatgactttgaaaatacctgtgctttagcctggaacactcttcctactactcttgcctacttaaaaaattctaacttatccctcaagtctcagatgaagaagtacttgttctatgcagctcccacggattcactcagacagcaagtaccacagagtcagtatttttcaaaataatgcctgagagttccttagatcagtgagtcatgtccttccctgcacaccagctaccaccaaagccaagccaataaagcctcgtgccgaattcggcacgaggaaaaaaaccctcaaaaaatgactgaaaacttctttaaatgtgtgtttgaaagagacaaggaagctcttcgtaaaatttgttcagttaatctaactgaggcccatttaaaaatgtaccaatcagcttatatgttaaatatctaagaaactgcatttaggkttttctcaacctgaatctgcagactcaagctatccacatacaatttgtatgagcacaagattagcaagccatactgctctgattcatctgattttaatggaacccttggggattgactcaatgcagctgactggttttttcctatattaaattgtccctaatgtgactggctacatcataatattatagactatggactatttgtcatagatgtttctatgtttgcttctctgcaaatttaagaaagttaactattttcttaaagttttgatttctaatttctcgatttgggcatacgaccaccactagcaaatgtcatcagagtacaaaaaatggaaacagaggctatcattaataatacattacttcactattgacgggatgaccgtgggttttgaagcttatgagttcaaaagtcctctttaaagtatttttcaattctgctcccgaagtgggtgagtgtgtgtgtgcacacatatgtgtctgtgtgcatttgtacagaggtttcagcctggcttacatttagcacagtagcttcctttacaggagactttttgcgagcatcagtgtttcatttcacaactcaccatgtgtactaatgctaaagatacagattacagtgtaagaactggagtaattatagccttccaaatcctaaactctcaaacttccttatttcacagggcaccattagtttacttccccaaagctgatttcagcattttagcagatgttttgtgaatgttgtaaatgggtacaaaatggaggacatcctaatgttgagagtagtaaatatcattgtcatgagcctaaggcttctctatacacattagaagaaagtactctctaaagagaatggttagaagttaacagggaatacatcactattgtaataatcataaaaaagcaattgcacgccagtgttagacagtctctgggtaaccaggtgctaataattttactatattaatgaagacttcaagtcatactggtctactcatttggacagtatttgcttcagcactaggaaggctgatgtcttccttttaaactcgaggggggggcccggtacccaattcgccctatcagtgagtcgtattac

SEQ ID NO: 399 - DNA, 699 bp, Homo sapiens
gattcggcacgagaaacttttaaatctttagttatttcttaatacttagaacacttaaacaaaactttacaaaacaaaagagcagaataattagatcctttcaggagaatatgacttttttttcctaagcacactggaccatagaggaagaccaaaggaatgtacagttgcctgctccttcctgacttgctgtatttgactctgtccccactggtggtggcaatgctattaaccccacactttaacgtggcaaatccccagaatctgttggctggtctctggctagagaatgagcacagtttcacccttatggctccagaaagagcaagaacacaccactgccagccagaagagagaaaagtcttgttctgtctctttcccattgtcccaaatagccaagcacaggttcaaccaccccaaatgccacccttctgctgtgcagcagccaaggaaaagacccaggaggagcagctccaagaacctctgggcagtcagtgcccagatacttgccccaattctttgtgtccaagccacactcagctgacaaaagccaacactttgtctctctttttttttttttctttttttttgagcagagtttcactcttgtcacccaggctggagtgcaatggcaggatcttggctcattgcaacctccacctcccgggttcaagcaattctcctgtctcagcctctcga

SEQ ID NO: 400 - DNA, 1681 bp, Homo sapiens
gaattcggcacgagtcgagttttttattcctccactgagaatcacacaaaaagttagaagcacaaaaagtatgatgggtaatgatttgctccacctcgtgttcttgcaactaagtttaggtgtagcatcagggggatggattttgtggccactgaggagattgggtggtgcccatacgagtaaggatmcaaataaaaatggmcacsytgtgcattgcttggtcattaccaatgagcctctagtttccamcaagaagattgggctctcttctcctcacacttgtccatcaactctccaacagttttgatccccactgtaattaaactagtatcttctaaacacaaaatcttcactctacctcagtagcgcttggcagctgaaatcttttctatttagaatatcccacctttctatcttgaaattttgtccaagctaaatgcctcctactaatctctgcgtacctgcgggaacacaatgtggctaccacattggctaccagggctgtagggaggattgtctcaaaatcctctccatttatcacaraaagggaggcgggaaraggaaraaagtaggttatgccctgaggctcaaggctactggatggccaatctgtgctaggtttgctggtcagaaagtaggatgatatgagctgatatagsagagaaatatagggtacagtttctaccctgaggggctgtattttagttggggagatacatgcaatgactggacaccaccaccaaggataaggaagtcctgggattgtgtgaaagccacagcagttcagagaggagaaggaaaaagactccatggaaatgatgggaattgaaccaggcctgggttttccccctctcaggcacactggaggctgtttgcctaccctgttgcatctcttggcttttccaagtttctgtcttgttacagactctttcctctcttcctcctcctagaaatattggcaagcttctttagtcatttgtgtttctttacattacaggccagaggtgtatcttctctgatagataatggccctcagttaagactagggaaagctattttgcttgctgtattagcgccctattttagaataatcctattcccttgattctttagtatttacaatttttctaagtaccgattatattttctaagtcaaagtggggtaaaattagtgcattgtatcctgttgttgccgctttctggagtagtcagtcttacatatttgaacaataccaccctggtgtaattttaaaaagtaagagcttgattctttaaaaaacacttagccaggcagtgtgagctctctctgaggatcctcacattaggagtgttttacatacatcacacaaaaggaaaatgcgttctgaggggatcggggctcctccgagctgagagctggacctgatgaattgtgacaaatgggcctgtttctgccagctgcacgttctcagccaggtgacgtctgaggctgcctgccagtaatggtttgtggtttggggagcaagagggaggccctggacatactcactggtggggaacaggaaaaagtcaggcccaatcagaaatagtaactctcctcagtgttccccagctaagtaagactatgcatttaccatacagtccccatcctaaaactcatgaaatgaagaattagtgacacactgggggagtagtggctcga

SEQ ID NO: 401 - DNA, 607 bp, Homo sapiens
ggcacgagtttcaacttgagatttggaggggacagacatccaaaccgtatcattaaatttaatagttttatgcagtttttttggctctagatctgtttagactcctgcagtcaggtgtctgtaactagcctctggtcctttttgagagttcacagtttggtgcaaaccctttggatgtattatttgggaaaatgggatatctggcagcctgtgtccctgctttacattatcctttttgctgcctgccccagcctcctcattagcatccctgccaaggccagtggagaaggatggagatgcggtgacattcagctgacagttgtcacagattgataatagctaacagcacatctctcccccggctccttccctagtgcaccaattagcccagcctcatctgcacctgggactcaagttgcctaaacatatttcatttcccatagcagaagatgccatccatctagagtgagactgaaaatacaaacaattcagaagttgtgactttccatgctctgcacacagaggctaccaaatgctaagggcgcttcctccccagcaccaggcttatggttctaagctccagaaaaatatcaaataaaccctgccc

SEQ ID NO: 402 - DNA, 1355 bp, Homo sapiens
  misc_feature (1327)..(1327): n equals a,t,g, or c
gcccctgctggatggcactgtgggtaacctgcatcctttcactgtgcacatggttctcatgcctttacggagcagactccttggcaaataaatgcctcagtgcaggagccacacgcaaggcatttcccttctgtgtcctctttcgtgatcttgaggtgggacttgggtttgaaggctttgtcactcacctggcatgcaaactcttttgttattgtgaactctctgacagtgctttaagtctggggcacgaataaataattttccacacagctcacaactgtagggcttacatccagtgtgtgtgcgttatgtctgtgtgtgtatccttatttttttgagacggagtctccctctgtcacccaggctggagtgcagtggcgcgatctcggctcactgcaacctccgcctcctgggttcaaacgattctcctgcctcagcctcccgagtagctgggattacaggcacccaccamcacgcctggctaatttttgtatttttagtagagatggggtttctccatgttggtcaggctggtctcgatttcctgaccttgtgatccgcctgcctcggcctcccaaagtgctgtgattataggtgtgacacaccacacccggtcctgtgtatgttttgagacggagtctcactctgtcacccaggctgaagtgcagtggcaggatctcttctcactgcaacctccacctcctgggctcaagtgattctcctgcctcagcctcccaagtagctggtatttcagacttgcaccatgatgcctggctactttttatatttttagtagagacggagtttcaccagcctggtctcgaactcctgacctcaagtgatccacccaccttggcctcccaaagtactgggattacagacatgagccatcacgcccggcccctaagtggatttttaggcattctttcaggtgggcctctgtggtgaaaccttttgtgcacatttcacaaacggcttctccgctgtgtggcatttctcagctttctccactgccttcacaggaaacttcttcccgcactcctggccgacgtcgctccctaggtgactgtgcggcaaaagctcagacctcaggacactggtggctgttgtccagcctagtgtctgcttaccccgcactcatcccgtagtcacacgtgaaggcttgaggggtctggaacttcctggccgtagcaatggactttctgaactttcttgctctttcagaattgcgttttgaccctgagtgtggtcgtgggtgactcgccggcctcccgccccggggtgtggtgcctttgttctgagtcatcacaagtgccatcatcctgancctagcwtctttcagatcaccctctcga

SEQ ID NO: 403 - DNA, 802 bp, Homo sapiens
  misc_feature (23)..(23): n equals a,t,g, or c
  misc_feature (40)..(40): n equals a,t,g, or c
  misc_feature (56)..(56): n equals a,t,g, or c
  misc_feature (59)..(59): n equals a,t,g, or c
ctcacttaaaagggaacaaaaanctggaagctcccacgcnggttggcggcccgctnttnaactagtggaatccccccgggttgcaggattcggcasgagagaagaccgaggtggccgaggcgctgaccaaggtgggtccctgtctgctgcacaaccacaaacctacctctgacccccagccccaagccttgtcactctggcacagactggtcccagtgtcaggcagacctctgagcctggtcacagactgaccccttccttctggatacaggctgatctttgtcacaggccacagacctctggacctctggtcccagccataagtggactgacctctctttatggctgtatccctgctgttctggatgctcctgggggcagtgcctatagctcagggtcatcctgagattcagctcctggagtctgagagttgtggccacagcgcagagggtccttggcgggggggcctgcgctgtccgctgcagcctgggctctgagcagtgctatccctagaccttactcaggggatcctctgaactctggccctgccctgcagcttgagctatttttgcacagctttgcggtgcatggcttttaaatggctccataagcagcaggctttctgcggtgatttttttttccatctcacaccgtatcccctccttgtctcccctcccctgtctccgagggtccatctctctgggtctcttcttgtctctcctcacctcctcccgacctttctgcccttcctcatctcttggggcctgaccctgcaggctgaggctggccgcatggagctcga

SEQ ID NO: 404 - DNA, 940 bp, Homo sapiens
gtgcgatggaaagtgccttcattctagcctgacaaaggtgggttcagtggatggcagcaaacacaattattgaacagatctgagaaaaatttcacaattttctcagtccttaattgctttaatatttaaatcctggccttctggaaagtctcaggtggtgaaatcaaaattcatattaaaatgcaaatgggcaattaaataattgargttatttaaataatgtatattctttattttcatacctgcttgaatatatattgtaaaggcgagttaatttatgctaaaaaattatgagacttctgaaaaatgttctcactcaaatgttaatcatttctttctccacctgttcttgtttgtttagtttgttttgtgctgtgataacagaatgcctgaaactaggtaatttatattgaaaagagatttatttctcatacttctggaggctaagaaatccaaagtcagggggcttatattgagccagggtcttcttgctgtgtcatctatggcacaaggcagaaggacaacagaacatgccagagacagagagagacagaggccaagcccatcttcttatcaggaacctattcccataacagcattcattcattcacaagggcagaactataatgtcctagtcatctgttagagatcccacctcccacactgttgcattggggactgtgtttccaacacatgaactttgggggacacgtccaaaccatagcagaccctaaatttaaacacaggataataataaacagtttctgtgacagttctcacactgagggaaacaaaaacaaacaaacaaaaaacaattaggactgattcactgctgtttttccctttcttatagtgaaaagaaattcagaagctaaagaagttcttagtaaattaattcttaaaatgcttacaatgtaagtgtattaaagaccattttaag

SEQ ID NO: 405 - DNA, 1365 bp, Homo sapiens
ggcagagctaacccgagtgaagccacttccgggcttcccgggcgccttccgcagtcctcttccgggtgatggcggccgggtgccccggatgtagccctggcgcaagatctcttcttttttccacctcgccttccgcggattcccagcttgagaaacacctctttgccccgtcatgccaaagaggaaagtgaccttccaaggcgtgggagatgaggaggatgaggatgaaatcattgtccccaagaagaagctggtggaccctgtggctgggtcagggggtcctgggagccgctttaaaggcaaacactctttggatagcgatgaggaggaggatgatgatgatggggggtccagcaaatatgacatcttggcctcagaggatgtagaaggtcaggaggcagccacactccccagcgaggggggtgttcggatcacaccctttaacctgcaggaggagatggaggaaggccactttgatgccgatggcaactacttcctgaaccgggatgctcagatccgagacagctggctggacaacattgactgggtgaagatccgggagcggccacctggccagcgccaggcctcagactcggaggaggaggacagcttgggccagacctcaatgagtgcccaagccctcttggagggacttttggagctcctattgcctagagagacagtggctggggcactgaggcgtctgggggcccgaggaggaggcaaagggagaaaggggcctgggcaacccagttcccctcagcgcctggaccggctctccgggttggccgaccagatggtggcccggggcaaccttggtgtgtaccaggaaacaagggaacggttggctatgcgtctgaagggtttggggtgtcagaccctaggaccccacaatcccacacccccaccctccctggacatgttcgctgaggagttggcggaggaggaactggagaccccaacccctacccagagaggagaagcagagtcgcggggagatggtctggtggatgtgatgtgggaatataagtgggagaacacgggggatgccgagctgtatgggcccttcaccagcgcccagatgcagacctgggtgagtgaaggctacttcccggacggtgtttattgccggaagctggacccccctggtggtcagttctacaactccaaacgcattgactttgacctctacacctgagcctgctgggggcccagtttggtgggcccttctttcctggactttgtggaggaggcaccaagtgtctcaggcagcgaggaaattggaggccatttttcagtcaatttccctttcccaataaaagcctttagttgtgtaaaaaaaaaaaaaaaaaaaagggcggccgc

SEQ ID NO: 406 - DNA, 2163 bp, Homo sapiens
cgcccacgcgtccgaggcggcggagccccagccccacccagtgcggagcgcgccgcgagccccgccgyaagctgagcgcctccgcccgccaggcgcgccggcgccgggccatgtactcggggaaccgcagcggcggccacggctactgggacggcggcggggccgcgggcgctgaggggccggcgccggcggggacactgagccccgcgcccctcttcagccccggcacctacgagcgcctggcgctgctgctgggctccattgggctgctgggcgtcggcaacaacctgctggtgctcgtcctctactacaagttccagcggctccgcactcccactcacctcctcctggtcaacatcagcctcagcgacctgctggtgtccctcttcggggtcacctttaccttcgtgtcctgcctgaggaacggctgggtgtgggacaccgtgggctgcgtgtgggacgggtttagcggcagcctcttcgggattgtttccattgccaccctaaccgtgctggcctatgaacgttacattcgcgtggtccatgccagagtgatcaatttttcctgggcctggagggccattacctacatctggctctactcactggcgtgggcaggagcacctctcctgggatggaacaggtacatcctggacgtacacggactaggctgcactgtggactggaaatccaaggatgccaacgattcctcctttgtgcttttcttatttcttggctgcctggtggtgcccctgggtgtcatagcccattgctatggccatattctatattccattcgaatgcttcgttgtgtggaagatcttcagacaattcaagtgatcaagattttaaaatatgaaaagaaactggccaaaatgtgctttttaatgatattcaccttcctggtctgttggatgccttatatcgtgatctgcttcttggtggttaatggtcatggtcacctggtcactccaacaatatctattgtttcgtacctctttgctaaatcgaacactgtatacaatccagtgatttatgtcttcatgatcagaaagtttcgaagatcccttttgcagcttctgtgcctccgactgctgaggtgccagaggcctgctaaagacctaccagcagctggaagtgaaatgcagatcagacccattgtgatgtcacagaaagatggggacaggccaaagaaaaaagtgactttcaactcttcttccatcatttttatcatcaccagtgatgaatcactgtcagttgacgacagcgacaaaaccaatgggtccaaagttgatgtaatccaagttcgtcctttgtaggaatgaagaatggcaacgaaagatggggccttaaattggatgccacttttggactttcatcataagaagtgtctggaatacccgttctatgtaatatcaacagaaccttgtggtccagcaggaaatccgaattgcccatatgctcttgggcctcaggaagaggttgaacaaaaacaaattcttttaattcaacgggtgctttacataatgaaaaaaccacttgtggcacacgatgggcatctaacatcatcatcttctaatgtgttggagattttcatttcaaatatattttttaaattactctattttccaaaacacgtaatgcatttttctcgaaaataccttactgtaaaaataactgtcgcgtacacatgtgtgaagtagctagaacatactgaattttttttgtactgttggactctattcagtgtcatgtcctatatctgatcaagttatcaaggagataattctagaatgaaaaagaaaatcctcttgttggaaacaaaagacgttttatatgtgcagtatgacaaagaggagtttcagagacaactttgaatccttgtcagcctggagaccagcaccagaggaatctacaaggcaaactcccatatatttgcttcccccaaattgctgcccctacagactcaaagctctttttctttgttttgttgtttctctaaaaatttactgttctttgtcgatgctatataagccagggagttctaagacgccagctctttgagatttgctcattcccctgtatttcccacatatatattacatatacccgctaataaatttatgtttgttttaaaaaaaaaaaaaaaaaactcgagggggg

SEQ ID NO: 407 - DNA, 1979 bp, Homo sapiens
  misc_feature (968)..(968): n equals a,t,g, or c
gctttgccagggctgagccgggctgcctggtgccctcaccgcccccgccawacaccaccatgcwgactcccggcctgcggaactcgtagtgcagcccctgtcgcctccccggcccctgctatcccacgcaggactggcttcggccgccggggccagcagcttgcracgtgtccctggggaggcggaatcgctgtgcgccctgagcccgggctcagcccttcgctttccagctgcgtcctgctcccggccgsccagggagcccagtggcgatgagggcactgctggcgctttgccttctccttggctggctgcgctggggcccggcgggcgcccagcagtccggagagtactgccacggctgggtggacgtgcagggcaactaccacgagggcttccagtgcccagaggacttcgacacgctggacgctaccatctgctgcggctcctgcgcgctccgctactgttgcgccgcggccgacgccaggctggagcagggcggctgcaccaacgaccgccgcgaactggagcacccaggcatcactgcgcagcctgtctacgtcccctttctcatcgtcggctccatcttcattgcgttcatcatcctgggctctgtagtggctatttattgttgcacctgtttgagacccaaggagccctcgcagcagccaatccgcttctcactccgcagctatcagacagagaccctgcccatgatcctgacctccaccagccccagggcaccctcccggcagtccagcacagccacgagctycagcttcacaggcggctycatccgcaggttcttctcagccatctggtttcctggtgtcaccccagtatttcgcttacccccttcagcagragcccccactggctgggaagagctgtccagactttcagttccagktgacacgcccaggccatgaatycacaactcagtcagatggcagacaggtggagccctgctnccattgccacatgcaattctgagaaaatttcccttgtaactgatcagtgtcwtggaggagcatgctaggaaaacacagcaccttctaatttgaaagttcctgtctccaatcacagaaaggctaaaccagagaactgtttctggttttgcaaacatgtgatcattacatttcaatctatgctacttttattcaaaatatgcagcagtttgactttaaagttgcaaactggctaaaaacgttttactggacattcagctatattgcttagaaaagggctacatgtttctttttcatataagttgttcattgagttatgataggaatatattcataaataagcaaagaaaaatacctaattgtaattatcaaaggttcacttaaaaaattaactattaggtaaacttaagggggcagtgaaaaatctatttatgatttcgggagtaacctaaccatgaataatattagcatwatgagamcatttmctttttaaataaatamctaaatttkgtttacaaymggagttttyccagaatacaaggttycaataatcacatgaggagtttaaagttttaaatatatactcagacattcattgtaacacagagtgtatgtaaaatcatttcccccactcactggagggagtatttattgcagactttttgttcagcaacatttagtgtttcagtgaaagttggacagttggggcttaaaacatttatttgtaaaatgagctatgttcaaatgtaaatatttgtaatttaatgtatttaccmcattgactgtactaattatttagtagtcatactgtaatttttatgttaataataactggagttcaaagtctagctattggtataatcatctaatattatatatatctccagtgcccctgaattttatgtttgatgactatatatttgggcatatatcttgttggattagaataaataaaacactttatattttcatgaactctaaaaaaaaaaaaaaaaaaaaaaaaaaaaaaaaaaa

SEQ ID NO: 408 - DNA, 2087 bp, Homo sapiens
  misc_feature (1)..(1): n equals a,t,g, or c
ncccacgcgtccgctgttgctcaaaggaaataggagttggtgtgcttgtgaccaaggggttacacttccagcttttaaaattctcctttacatgtgctcagtgttttgttttgtgttttggtttctgttttttattttaattcccacattgggcacaagaatcagaatatggatagctagtttaagaaacttttgtgggtgcactgtagcatagatgacagaatttgatgttccccccatctccaattcagttcagggcattccacagttaaacagaaatgggaacgtggggctcttataaatgaaatgggcgctcacagttttggttttcagctcttcatgtctgtaagtgtgctttgggggaggctatgtctgtatggtcgattctcagttatcacatttgcctctcctcccactaccttcatggacattcagtgctgtttcgcactgcagttagagagaagggacggacagttggtgacactcagccacattgctacttttatctgttctggtaagaagttagatagatggtagattgaagcaattgggtagaattagttgggggaatatttatgagttgctgtgtttgttgattagttccatctctttcccattttaactgagaattgattatatatagctctaagtatataggtatttaaacaaccccacaagcggctgtatcagtaacatttattaattccactatagtgagggaggatttccattctaaataccttattttgagggatttataaaacttagttgtaaaagagaaagcccacatagtgggaataaattgcttcagccatttttagtatttgagagcactagggaagatgtttagtagctgtgtggatgccttttttcacaccctgtctattgaatgctgcatccattcacgaagttaaatgttacatgcagttagtccttaatgtggactggatctgtacttttgttttggattaaaacatttaaagatttttgaagtgcagctactccccacgtggcatttgatacacataaaagtcatactgtgtgtgcacaaagagtacatggattttccagcatattgctttaaaaaattatataaactgttaaaatattaacacctcaggctacctgctgtattctgtcccattgacccctggaattggatttactgcaagtgattgataattcaattatgtggcttttcccctttaatcttgccatttaaattacagtagaaagacaaaatcaagtaaaataaagtgttagataatagaaagagtgttaagaccagcccacttttctcatgtttatgttctttcatttggaccaagaatctccgcatggaggttgatttgccactggggactttggctaagactattaggtttgctttcaactagatgttcctgagacaagcagagggacactgcaattccccttccatgcctgctgttctcccccatgtaagtcttctttgaaattaacggatgtgtctcctttggaacagccccataacaaaagagaactactgatctgagcataggaaagtagaggctctaccacttttcagttgaaaaagcaagactttctctgtgtttctgaaacaaggcataatgttgtcacagaatcagagatccagtctcacttttccacaaatctccaaatctccagtcttatcttgtgtgctctaatggtttggttcaatccctttccaactcttgttttcaaagcatggggcctgagtgttctccactcctcctaagaaaggagcttgggtggaagggaccatgctgacctcctccatcagagggctcttccagtagtattctcggatgcaacctccatttctcagttaccattatttcctgtatcagctttgtccttcctggagggatgcacagtgatccggcccaccactgttgttgtcttgtgcttctgctctttcctatggtttcaggttattttctgggtttcccctattcttcttttatttccttttttttttatatttgctttcctttctactgcttttagatttgcaggagatgcaagtttcagctcaatgtttggcttctctcaatatggaaatt

SEQ ID NO: 409 - DNA, 1811 bp, Homo sapiens
  misc_feature (21)..(22): n equals a,t,g, or c
  misc_feature (37)..(37): n equals a,t,g, or c
aactaagtggttcccccgggnntgcagaatttsggcncaagccagaccaggagtgtccagtccttgggccttggtcagcctggagcagttgctcggccccctgtggtgggggcactatggagcgacatcggacttgtgaggggggtcctggggtggcaccatgccaggcccaggacacagagcaacggcaggagtgtaacctgcagccctgccctgagtgcccccctggccaggtgcttagtgcctgtgccacctcatgcccgtgcctctgctggcatctgcagcctggtgccatctgtgtgcaggagccctgccagcctggctgtggctgccctggagggcagctgctgcacaatggcacgtgtgtgcctcccactgcctgcccctgcacccagcattctctgccctggggcctcaccctgaccctggaagagcaggcccaggagctgcccccagggactgtgctcacccggaactgcacccgctgtgtctgccacggtggagccttcagctgctccctcgttgactgtcaggagtgccccctggggaaacgtggcagcaggtggccccgggggagctggggctctgcgagcagacgtgcctggagatgaacgccacaaagacccagagtaactgcagttcagctcgagcctcgggctgcgtgtgccagcccgggcacttccgcagccaggcaggcccctgcgtccccgaagaccactgcgagtgctggcaccttgggcgtccccacctgcctggatctgaatggcaggaggcctgtgagagctgcctctgcctcagtgggaggcctgtctgcacccagcactgctccccactcacctgtgctcagggcgaggagatggtgctggagccagggagctgctgtccctcttgccgcagggaggctccggaggagcagtcgccctcctgccagctcctcacggagcttygaaacttcaccaaagggacctgttacctggaccaggtagaagtgagctactgcagtgggtactgcccatccagcacccatgtcatgccagaggagccatacctgcagagccagtgtgactgctgcagctaccgtctagacccggagagccctgtgcggatcctgaacctgcgctgtctgggtggccacacagagcccgtggtgctgccggtcatccacagctgccagtgcagctcctgccaggggacggggtttcgccatgttgcccaggctgttcttgaactcctgggctcgagtgatccacctgcctcagcctcccaatgcgctggggttacaggcaggaaccactgcacccagccccctgacctcatcttttaagcaaggctgacattgctatgcaggcttgttgggtggacttggtgagggcacgcgtgtgaagtggctggcaggtgcctagttctgttaagcacctgccatatgataacctgaggtcccactgtgtggcagatgaaggggaaacagaggtggaaggcacccgtgccacctgggtggagcacagtggaaggcctggtgttggctctgggcgtcctcctggcaccagcctgaccactctgcctctcttactaacccatctctccctcacgtgtcccctgggaggtgacttctcaaagcgctaacaggctccgctgggtgagtccacagctgtccctcttgtgatcatgggactcagcagcactgaccacgtccttccacgctctctcacctgcccccaactgggggcccatgacttggcattagcatgttccaaataaagtgatactggcaacaaaaaaaaaaaaaaaaaaaaaactcgagggggggcccg

SEQ ID NO: 410 - DNA, 642 bp, Homo sapiens
ggcacgagggggccaccacacccggcctgtacatgctgttttgcatcttgctttatacgttggggagtgccagatgtcaccatctttcgttcttcctctggggctggtcaaatccccctgagaaaactcctctggcctcctggcggggggtgaaggccaggctgccagggccaggctgccagcttctgggagctgcaggggcagaggcagggagctgtcaggcattcagccagcaagacgcactcagtacccacttggggttcagaatccccctccctcatcttcagatgggccagatgtccccaaagccagcggcccctttctgtttcaccctgtctacagaataaacccccagtcactgggggtgggggaagagtaaggggagaggggaaacgagatttggaggtctagctgctgctgaaacagccctcagttcgtctttattttgccttctgcaaaactggcctggtgttgccagctccttttgaggactttgctaccggttctcagcatccctcaattgctggcttaggattcatgggtttttaggggtggggtgggattagcatgtccagctgctttccagtttccaaagttctgtccctatcatattgcctctgatttaaaaaaaaaaaaaaaaaa

SEQ ID NO: 411 - DNA, 606 bp, Homo sapiens
  misc_feature (9)..(9): n equals a,t,g, or c
  misc_feature (19)..(19): n equals a,t,g, or c
ccccccggnctgccaggantttcggcacgagtctctctgtcaactctatttgtatttctataatggaaactcaaatttgcctaactcagattgtagcacttttcttcctcaggctagtcctaggaaaactcacttgttttttgtatggaaaactagtgttagtagaagcctttattcttgcatagcccccaaatcagctttttcagctataatttagtaagtctaatgtgttcgactgaagtactttttttttgtaataacaagtgaaaaataatgaagagtgtgtcctggcgcatggctcacgcctgtaatcccagcacttcgggaggccggagcygaggcagcggatcacttgagggtcaggagttcaagaccagcttgaccaacatggtgaagtcctgtctctattaaaaatacaaaaattagccaggtgtggtagtgcatgtctgtaatcccagctacttgggaggctgagacaggagaattgcttggacctgggaggcggaggttgcagtgaggtgagattgcggcattgcactccagcctggacaacaagagtgaaactttgtctcaaaaaaaagaaagaaaaaaaaaaaaaaaactcga

SEQ ID NO: 412 - DNA, 1118 bp, Homo sapiens
  misc_feature (482)..(482): n equals a,t,g, or c
gataaattttgaacaccaggactctgaaaaagtttaagcatatatatgagaaatttcctgaaatgttgtatgtattgtcttgtcttcttaaacagaagacactgaacagaatggaatctttggttgatctctaaggaccaccattttgaggatctcttataatgtatgatgacatttttcggttcccacattttgctttttctgttttgccctttgaaagcaggccatcgtcatttggtcagttcctcctttcttactgtggctgtgtccatctctaaggggccattcttccactctacagctcaaaaaagaaaatccaggaaacagcttcccaggcctgccttcctggtccccctcagttcccaaaacacacaaaccaggacaaaacaccacttcagttttctgcatcttatagtcttacaaccttgagtttgggaggatcttgactcaagagtcagatggtgaaatatctagtacttganccccttgtgtgataatgtcaagagaactaaggtttggtcccagacccaacaataactaccaataggaatctgggtagcatcttttaaattctttagtcttcagtcttatctgtaaaacatgggactggtctagataatttctccaactccaaaattcaatcatgttcttaatattaaaaatcctcatgtccatagatttttgtattctctccctggtaaatcctggtaatttcacagggatgtttgaaactgaaaaatcctgggaaaagtagattttagtcaagtccactccaatttaaaaccatactgaagtaccattttcactcataattataaattaaaaaatgacactatcgagggttgataagattatagagagatggctattttcatgttgccagtgagaatataaaattcccatttggggaaaaaatttatactatctattcaaaagttatatgcacttaatctatgacttgacaattccatttctcatgttcattttggaggattactgacacatatcctatgcaagaatgtgattgatagcattgttttcatttgagaccagcctgggcaacatagtgagaacctgtctctacaaaaaatttaaaaaaaaaaaaaaagggcggccgc

SEQ ID NO: 413 - DNA, 830 bp, Homo sapiens
ggcacgagtaaggactgtgttctttatgcatttcttgatccaggcatggcagttcctcttttcctgtacatattcacactcctgccacttctaccctttctcttatccctctgcttttcacctctgactgtaaaaagaagtagcagttccgaaagcaagagttccctatgaacacggaagaagacattggcaacttttgagtacaacaactatatttaatagagtaatttaagaacatcagccagtgaattttatacaagatagtgaaagagaaaaggaagattaattaggggtagtttaggatgccattaaatagcctagaattaggggagtagtcgttgaatagaaaggaggccacaaatttgagggatataagctaagaattggtaagccaagaagaaggaaaaggtttgggcagtaaggataatgaggaacaaaatagagaactcagaagcaatatctgactgttatcattggaagaatttttttgcttgcttgaggctggatattgaagtggatcaggatacttgagtgactatctgatgggcttttggaactagctctcaagaggtgaaaattagcttttttttctttttctttctttttttttttttttgaggcaaggtctcactgttgttgaggctgaacctcctgggctcaagcagttgtcccattgcagcctcctcagatactctgtaagccaaggcagggggaatattttgtgctcagtagtttgaggctgtggtgagctaagatcacactgctgtgctcacttcagcctgggcaacacagtgaaaccccgtctccatctgtttaaaaaaaaaaaaaaa

SEQ ID NO: 414 - DNA, 755 bp, Homo sapiens
  misc_feature (640)..(640): n equals a,t,g, or c
ggcagagggaaatgcataggcttgtaatgataattaagattcaatctcactctcaatgagatcttgggattcctgcaagtttgaccttcacttatgcaatctgtaaaatgaaggcattgggcttagatgacttagatggtttcttcagtgtcttacaggcttacatgttatatttttgaattgctataaagcatgttttgcaaattctgacaccaaacaatgttttgcattcctatagcacagataaaccatgtttatagtagccttactcattctccattgggccttaggtggtacagtgatgtccaagtgactcgtgacctctcacttcttccacttttccaggtagaagatcagccttgctcagcctcctgggattaggagatgttttaagaaaaggagaatttgcatcaaagttctgacattgtttgaggaaaagaggtagatttcctaaaaattcccctgaagcccataggatatattctcttcaaaataatgagtgggccgggtgcagtggctcacacctgttatcccagcactttggaaggccatggtgggcagatcacttgaggtcaggagtttgagaccagcctggccagcatggtgaaaccctgtctctactaaaaatacaaaaattagnccggatgtggtggtgcatgcctgaggttgcagacagccgagatggtgccactgcactccagcctgggcaacagagcgagaccctgtctcagaaaaaaaaaaaaaaaaaactcgaa

SEQ ID NO: 415 - DNA, 1939 bp, Homo sapiens
gaacacaaacatgcagtctgtagcagatggtaataggctgayatattacacttgttgatgtaaatctgataggtttctttctctccaaggacagctttttaaatatttaacagtatcaataatttttcagtttctgtgagaattttataatttataatttgcagacttaatgtataatctattttgtcctaacaattacaaatatattttttatttcagattrtatatattcctaccagatggagataattacagctttaaaaatttttattttttcattttatttcacacattgacattaaatttttatggacacataataactgtacatatatatggggtagaatgtgatgttttaatacatgtactcaatgtgtaatgatcaaatcagggtaatttgcataatgatttttctgtagggagaaaattcaaaatctactcttctggctattttcaaatatataatatgttattgttaactatactcatcctactatgcaataggacaccagaacttattcctgggttctacatccgttaaggcaaccaaggattggaaatattggaaaaaaaaattgcgtctgtactgaacatgtacagacttttttcttgtccttattccttacacaatatagtacaataactatttgcatgacatttacatcggatattatgagtgatctagagttgatatgaagtatatgggaggatgtgcaaaggtgatgtgcaaatactatgtcattttatatcagggacttgagtatcctttgttaycctcaggagatcctgaaacyagtcccccatggatactgagggctgactgtatagtcctatcctcacggaactttcattctaatgrgggaagactgactataaacaaaatatatgtaataggtggtggtaagtaccgtggagaagtaacaaatggggcaaagtgagttatacagctccatycttagaaaccttggagtacttttcttagtttatactcgtggtggtttccttttgtctcctttattacatgggactctgacatgtgcccatagctagggtggcagtaggatctacccgaaaagcgtcctgctgatacaggaccaaagcatcctgttgttctcgagcctataaaaagagctaatggtcttgcttctcttaactgtggcctcctacactgtgttttggatgattggtgatgtcttggatattctgtttctttggaactttgaatatacaacactttactagggaattagcaatggaagcagagcaaagatgtacagaggaaacaatgcrtaactctgatggaattgaagtcatgaggcagcagagagcttaaattasagctttaaaaatttttattttttagagggaatttamttgggagtaacagcagtaatagttaacggagccagaatgcttgagtcatataattgcaaagcagagttgggagcaacagatgctaaagagtagttgctgtagttcctctttgggtcgtaggagcagttgtcatrttmctatayagctactgcatgaagaagagttcttagtgaggcctgggtgaacagctcttcttagtattctgtgtgaccccattygaccttttaacaaatccctaagtaaataaatagcccctmaggwaaactaagtttttctctgctgtttttttgcttgagagagctataactgtaatagacttatatttctgaacattttagtgcttgccaatatttggtaatatttatgtttcctatatttgtaatgaacattcttcttcmggtacatttyttgttaaattattgtttsatgsataaaagttcaccttttattgtataaaattgactcagattaatttatacacattgacaatgggtaaatagagtttttcagattattaaaagctgaaggatgcccatgtaagcaaaaaaaaaaaaaaaaaactcga

SEQ ID NO: 416 - DNA, 1776 bp, Homo sapiens
  misc_feature (9)..(9): n equals a,t,g, or c
  misc_feature (24)..(24): n equals a,t,g, or c
ggcagaggnagacgggggtttctnccatgttgcccaggctggtctcgaactcctggactcaagcaatccgcccaccttracttcccaaagtgctgggattatgggygggtgtragccattgcgcccagccttgaagtcatgttctaaattgtatttgaatttgtgcctctttgtttttccccaaaccaaagccctcaaattgtagtctctgtcggcttctgcagaattctggaaaatgccagttttcctcccccgcccttgttttccataaaacatatttatatattgtgatgaggagtactttctgaagagtacttcgtatttttttttaattgccttgtttgccttcaacttccttgattttcatagtttacatgggtgtgtgtaggggtgtgtgtgtgtatgtgtgtgggttagggcttttttcgttgcatgtgatggttctgtggacatatgatccccacaaactgtgggagtgattggccaggccttgttttktttgtttgtttgtttgtgtttttgttcttttgaagaatagagtggtatttagaaaataaattgcattgcaaagctcttatcggctcatatgagagagcaggttcctgcccttgaaaatgccggtaagctatagcatatgttttttaagacttaagcatttcatgctttaaaataccttcacaagtgaacattacacacagaagttcatttggttttcctttgttttatggtgcatatagcaataaagacccccctccaccctgcaacccccatcccccaccgggcctttgtccctgccttggcttttctccccttctcattctcctctcccctttcctcactgaaggctgtgagttgctttcaatgtgacaacactatgatgtcatttggaaggatttgccaggacagactgattctgagtcctgggtgccgtatgtgtatgcggcagtgttgtcaggcgatcttgtttgaagctctatgttgccataattaccatcaagtacacactgttggcaaaaggctaacacctgactttagaaaatgctgatttgagaacaaaaggaaaggtcttttttcactgcttaaagtggggtcactttgatacctttgcggtcatgtctgtgtctgatgagtgtagaatctctggatgtgcactgtcagtcatgtgtccaccaggcctcgaatatcatatgggaaatgtcatagttaaaaacgtacagccaggcccgtgtgctgttaatagtgtgaaattgtcatgttaaaaaaaaaaacaaaacaggaaccaaatgtgaccttgtgcatatattggtagctgaaaatcttcaaggctactgatgggtggccccttaatcttgtctttgattgctgtgtgcagggaaaggtgtccccgtttgttcatgctgttttggggggtgggggggtatttgcaagaatactcattttgacataataggtcctcttgtcagagatcctctaccacagacattaatagctgagcaggagccacatggattgattgtatccactcaccattgacgatggcattgagcgtagctagcttatttccaatcctacgtgtttttgagcttgctcttacgttttaagaggtgccaggggtacatttttgcactgaaatctaaagatgttttaaaaaacacttttcacaaaaatagtcctttgtcattacattatttactcatgtgtttgtacatttttgtatgttaatttatgaatgattttttcagtaaaaaatacatattcaagaaccaaaaaaaaaaa

SEQ ID NO: 417 - DNA, 682 bp, Homo sapiens
  misc_feature (624)..(624): n equals a,t,g, or c
gcaaatattaattgccatttactttgaaacctaaaatggtcaagattccattttcctccaggctaataaataataatttgcaatatatagattgtattttgtctttgaaacgctgtgaggagatcctcttaatgtggcatggtctgcttctatgccttgcttctgtgtttcttgagctccgtggagataggccccctctcctggcttctctgcttgagccacataaaatgccacttcacagctcttccctttgaagcctgatccagtatgcatttggagctaattactgcagttgacacaactccatctaaaagcgtcatgaaagattctgtaatcactgataagaaaatgatcttgcaaattattgctgtgtcctcctttattgcctctttaccttaacagtacagtttacaataatgtaaatttttttctaatctttcaactttaaccctagaaattgtagatgttttagcagtggttatgtgatattggcacaacataactatataatttgctcaatattgtggtgcatacctgtaatcccagctgctcaggagtctgaggcatgagaatcacatgaacccaggagatggaggttgcggtgagctgagagcgagtcactgnactccagccaggacgacagagtgaaaccctgtctcaaaaaaaaaaaaaaaaactcgag

SEQ ID NO: 418 - DNA, 739 bp, Homo sapiens
  misc_feature (649)..(649): n equals a,t,g, or c
gctggactcagagctctaacgacagctgcctcaaaaagaaaataacatcccttgttcatgcttgccagaaaacggcagcagaagcaggcccaagggcatcctctacctcctggcattcatttttgcctctgtcatctcatgcaggtgtgtctgcttggtggaaactgggtttcacaacagagtccaagatgtaaaggagtttggaaaatgtctaatgtggcttttgatgtatgtaagggaaatatttaaggcaatcctattgtaaatgagagaggataaagggatacaatgggagttaagtgtgctgcagttcactcgaactggtaaaatgtcagccccagttgactttgataaattatgcatatgccagctgccccagtcacagtcttgaagctcttgccctttccttgtgtgtgtggtttaggatgggttcccattggctgtgtttccatcccatctcatctcaagggaaatctctgctgctcctgagcacctcgtgtcatagattttatactcttacagacttggaatgcagtagaggtatgtggawttttaggggtttgtttttttaagaataagtaacaagaaataacacatttcttaataatagcttttttgacatagtttggagtctgattatatggtacanttttctaccagtaatatagggttgccaataaatagaaaakgttttctaaaaataaattttattacaacaaaaaaaaaaaaaaaaactcga

SEQ ID NO: 419 - DNA, 1126 bp, Homo sapiens
ggcacgagattgcctacaaatgtcagaggtataatggtttggttttcatgctggcttctcacacagtccatcacagtgattcttggagccagagggaggtatggaagactgtgtgttctccaagggaggcactgtggtctggtggataagagtgggagtcccaatcctttctccgcagatgtgctagctgtgcactctgggcaagtttctcactctcctgagcctcagcgtctttatcaatatgacgagaataaatacagcacctgcctacctcatggggttgtttcagcagtcaatgagatcatgtatatgaagcatttagtatacctagcacctaataaaagctcaacaaccagtagtcttattactaacaaaatggagctagaaggatgcattagtttaaacaaaatcttgaggcagatactgggagtacctgtctttattcttcaacttgagtctcctcccagtttgtttggataaaaactcaaatgtaatatttttaatttgggtaaaagaacttctgagaaagggttgaacatctatccacttgcctttttatgcctagggaactagagatacttgttggcggcatcgcaaatgttgctgacttatgaagtactgcagtatctgaatacctttttgtaggataatctaaagtttccaaaaaatagtatagtgttgtagtgaagaacttggactcttaagccagattattttgttcagattcagaaatcccctccactccacccactggctgtatagccttgcccaaatcactgaatctctgtgtgtctgcgtcctggtgtgtgaaatgaggacaatagtagctattgggtagggttggcctggggtctaagtgatgactgcctgtaaggtgtttagaacagtatttggtaaacaactggcactcaatcagtgttgctgtgattatgatgatttattccaaggttgcttgctttccagtacatcatagactactacttgaccaaatttactagcaatggagtacctgaaagttttacatgtgcacatttgcatgaaaaccccacaaaatttccctttgaacagtgaaggggacggcacaaagataattcttggcactaagcttaaaaaaaaaaaaaaaaaa

SEQ ID NO: 420 - DNA, 851 bp, Homo sapiens
gctcccacagataattgagaatatgcagtatttggttttctgtgtctgctttagtttgcctaggatattggcttctagctgcatccatgttgcagcaaaagacacaattttattctattttatggctgtgtagtattccatggtgtgtatgtaccacattttctttatacagtccaccattgatgggcaccagggttgattttatgtctttaaatatgtgctgcaatgagaaaaaacatattttctacaaaatgatagaagtttaaaaggacaagtttatgggttagctaattggcttcccattttattctctaattctcttatattgacacttcttgagatttaatgttgtttgccaggaacatggtactggtattgtgttggtaaacagtaagcggtagaaacaatggtgataacatagattcatacacaatgtgcttttaattctttgaaaaaatagaataaattcaggagtgaattgctttgtaagttgttatttttaaaacttacctgcaatgaaagaggactgtcctcctcgcagaactagagaagggtgacaagccatctccctattcactgattggattcccagtgctactagttttgtgttactgaaaatcacttgagataattctgttctatgtgcaaaaaagcmaaaaagtagaatttagaaatccaggcctgctaatagctattagccatctatttattgttctgatttttttttttttttttgagatggaatctcgttccagcctaggcgacagagtaagacctgtctcaaaaaaaaaaaaaaaaaaaaacctcgtgccgaattcgatatcaagcttatcgataccgtcgacctcgag

SEQ ID NO: 421 - DNA, 747 bp, Homo sapiens
catacttttcaacattcccttctgtcctttctttgtttttaaagaaagctctgattttgtttcattttcagctggagacttaaatgacaccaagcaaagcctacttagtttagatctccagaaattggctggtggaaaaaaatcaaacatgaagattgcagttttgttttgtttttttctgcttatcatttttcaaactgactttggaaaaaatgaagaaattcctaggaagcaaaggaggaagatctaccacagaaggttgaggaaaagttcaacctcacacaagcacagatcaaacagacagcttggaattcmgcaaacaacagtttttacaccagtagcaagacttcctattgttaactttgattatagcatggaggaaaagtttgaatccttttcaagttttcctggagtagaatcaagttataatgtgttaccaggaaagaagggacactgtttggtaaagggcataaccatgtacaacaaagctgtgtggtcgcctgagccctgcactacctgcctctgctcagatggaagagttctttgtgatgaaaccatgtgccatccccagaggtgcccccaaacagttatacctgaaggggaatgctgcccggtctgtccgctactggtacagagctttagctaagcaaaatatcagtgtgtgattaatctttaacttccatttgtttttgttactaattttagattaaaattatgatacattaaaaaaaaaaaaaaaaaactcga

SEQ ID NO: 422 - DNA, 2520 bp, Homo sapiens
acgagcgccttgaggaggatgagtccctggagctggttcctgctgcagaccctctgcctcctgcccacgggcgcagcttcgcggcgcggggcgcccggcaccgccaactgcgagctcaagccccaacaaagcgagctgaattccttcttgtggaccattaagcgagacccaccatcttacttctttggcacaatccatgtcccgtacacccgagtttgggacttcatccccgacaactctaaggaggctttcctgcagagcagcattgtgtactttgagttggatctcacagacccctataccatctcagctctcaccagctgtcagatgctgccacagggcgagaacctccaagatgtgctccccagggacatctactgccgcctcaagcgccacctggagtatgtcaagctcatgatgcccttgtggatgaccccagaccagcgcggcaaggggctctacgcagactacctcttcaatgctattgccggaaactgggagcgcaagaggcctgtctgggtgatgctcatggtcaactccctgactgaagtggacattaagtcccgtggagtgcctgtcttagacctgttccttgcccaggaggctgagcggctgaggaaacagactggggcagtggaaaaggtggaagagcagtgccatccattgaatgggttgaacttttcacaggtcatctttgctttgaaccagaccctcctgcagcaggaaagcctgcgagcaggcagtcttcagatcccctacacgacggaggatctcatcaaacactataactgcggggacctcagctccgtcatcctcagccatgacagctcccaggttcccaattttattaatgccacgctaccacctcaggagcgcatcactgctcaggagattgacagctacttacgccgggagctgatctacaagcggaatgagagaatagggaagcgggtgaaggcccttttggaggagttccctgacaaaggcttcttctttgcctttggagctgcttcacagtagccttgaaaatcaggagccttgaactacagtagctgtgaaaactgtttgcctaatggttactggaggggacagaatgggttcaaagttcctccaaagctccatccttaaagaatcatcactatttgacatgtccaatagttccctgaaatttccattcccaagcttgtcttcatttgacctgactcagagcttgctctgtgtgaatagccctattcttagggtgtgtgttgaaaacaatcagtagcagctgtttaacatcatagttgctggaaatagcaatattaattgaagcttacaaggggctgcccaaaaaacttaaaagcaaaatcccatagggggtatagaaaagctctaaaatattcctagagagtcacatgcatgagaagagctgtgcacatgcccaggaaagacctgagaaggtcctaatctctcacctctggctgatcttgaggctctgtgtaagcagagtgtgaaagctaaggcaaagtcataaattgcctgttgaagcatcaaatacatgcccccaaactcacacagcccctctgcaaaggttgggaaacttgcaaggaatttaaggaaatctctgttcagtcattagccagccactaaactaactgagcagatccttcagtgatcacacacaacaaagaatacagactttacagacttagtcctagaaaatcactacacaaacagcaacaacaatgcacctgggactaagggagaggagatgagttccagagttggtatattatttaaatgtctagttttcaataaaaacaattataagacacagagcaaaactagaaagtatggcccatacccagggaaaaacaagcaaccaatagaagctgtccttgaggaagttaatatcttggacttactagaaaatgactttaacactagttattataaatatgttcaaaaaactaaaagaggccaggtgcggaggctcacgcctataatcccagcactttgggaggctgaagcaggtgggtcacctgaggtcaggagtttgagaccagcctgaccaatatggcaaaaccctatctctactaataatacaaaaattagccaggcgttgtggcgcacacctgtaatcccagctacttgggaggctgaagcaggagaactgcttgaaactgggaggaagaggttgcagtaagctgagatcacaccactgtactccagcctgggccacaagagtgaaactccatctccaaaaaaaaaaaaaaaaaaaaaaaccctaaaattaaccatatctaaagaattaaaggaaagtttgagaacaatatctcaccaatacagaatatcaataaaaatataaaaattattttaaaagaaccaaataggaattctggaatttaaagtgtaggaactgaaatgaaaaattcactacgggggctgaacagtagatttgaactggcagaagaagaatcaacatacatgaagataggttgattgagatgattcagtatgagaaagaaaaaaaaaaaaaaa

SEQ ID NO: 423 - DNA, 1462 bp, Homo sapiens
ggccatcggcggggcagtcgcgggatgcgcccgggagccacagcctgagctttagcccatgaggaggatgtgaccgggactgagtcaggagccctctggaagcatggagactgtggtgattgttgccataggtgtgctggccaccatctttctggcttcgtttgcagccttggtgctggtttgcaggcagcgctactgccggccgcgagacctgctgcagcgctatgattctaagcccattgtggacctcattggtgccatggagacccagtctgagccctctgagttagaactggacgatgtcgttatcaccaacccccacattgaggccattctggagaatgaagactggatcgaagatgcctcgggtctcatgtcccactgcattgccatcttgaagatttgtcacactctgacagagaagcttgttgccatgacaatgggctctggggccaagatgaagacttcagccagtgtcagcgacatcattgtggtggccaagcggatcagccccagggtggatgatgttgtgaagtcgatgtaccctccgttggaccccaaactcctggacgcacggacgactgccctgctcctgtctgtcagtcacctggtgctggtgacaaggaatgcctgccatctgacgggaggcctggactggattgaccagtctctgtcggctgctgaggagcatttggaagtccttcgagaagcagccctagcttctgagccagataaaggcctcccaggccctgaaggcttcctgcaggagcagtctgcaatttagtgcctacaggccagcagctagccatgaaggcccctgccgccatccctggatggctcagcttagccttctactttttcctatagagttagttgttctccayggctggagagttcagctgtgtgtgcatagtaaagcaggagatccccgtcagtttatgcctcttttgcagttgcaaactgtggctggtgagtggcagtctaatactacagttaggggagatgccattcactctctgcaagaggagtattgaaaactggtggactgtcagctttatttagctcacctagtgttttcaagaaaattgagccaccgtctaagaaatcaagaggtttcacattaaaattagaatttctggcctctctcgatcggtcagaatgtgtggcaattctgatctgcattttcagaagaggacaatcaattgaaactaagtaggggtttcttcttttggcaagacttgtactctctcacctggcctgtttcatttatttgtattatctgcctggtccctgaggcgtctgggtctctcctctcccttgcaggtttgggtttgaagctgaggaactacaaagttgatgatttcttttttatctttatgcctgcaattttacctagctaccactaggtggatagtaaatttatacttatgtttccctcaaaaaaaaaaaaaaaaaactcgag

SEQ ID NO: 424 - DNA, 1635 bp, Homo sapiens
ggcacgaggggacctgctgctggtgggcacccaacagctgggggagttccagtgctggtcactagaggagggcttccagcagctggtagccagctactgcccagaggtggtggaggacggggtggcagaccaaacagatgagggtggcagtgtacccgtcattatcagcacatcgcgtgtgagtgcaccagctggtggcaaggccagctggggtgcagacaggtcctactggaaggagttcctggtgatgtgcacgctctttgtgctggccgtgctgctcccagttttattcttgctctaccggcaccggaacagcatgaaagtcttcctgaagcagggggaatgtgccagcgtgcaccccaagacctgccctgtggtgctgccccctgagacccgcccactcaacggcctagggccccctagcaccccactcgatcaccgagggtaccagtccctgtcagacagccccccgggggcccgagtcttcactgagtcagagaagaggccactcagcatccaagacagcttcgtggaggtatccccagtgtgcccccggccccgggtccgccttggctcggagatccgtgactctgtggtgtgagagctgacttccagaggacgctgccctggcttcaggggctgtgaatgctcggagagggtcaactggacctcccctccgctctgctcttcgtggaacacgaccgtggtgcccggcccttgggagccttggagccagctggcctgctgctctccagtcaagtagcgaagctcctaccacccagacacccaaacagccgtggccccagaggtcctggccaaatatgggggcctgcctaggttggtggaacagtgctccttatgtaaactgagccctttgtttagaaaacaattccaaatgtgaaactagaatgagagggaagagatagcatggcatgcagcacacacggctgctccagttcatggcctcccaggggtgctggggatgcatccaaagtggttgtctgagacagagttggaaaccctcaccaactggcctcttcaccttccacattatcccgctgccaccggctgccctgtctcactgcagattcaggaccagcttgggctgcgtgcgttctgccttgccagtcagccgaggatgtagttgttgctgccgtcgtcccaccacctcagggaccagagggctaggttggcactgcggccctcaccaggtcctgggctcggacccaactcctggacctttccagcctgtatcaggctgtggccacacgagaggacagcgcgagctcaggagagatttcgtgacaatgtacgcctttccctcagaattcagggaagagactgtcgcctgccttcctccgttgttgcgtgagaacccgtgtgccccttcccaccatatccaccctcgctccatctttgaactcaaacacgaggaactaactgcaccctggtcctctccccagtccccagttcaccctccatccctcaccttcctccactctaagggatatcaacactgcccagcacaggggccctgaatttatgtggtttttatatattttttaataagatgcactttatgtcattttttaataaagtctgaagaattactgtttaaaaaaaaaaaaaaaaaaa

SEQ ID NO: 425 - DNA, 2079 bp, Homo sapiens
ggcacgagggaggcgcggctgcgggacctgactagattctacgacaaggtactttctttgcatgaggattcaacaacccctgtggctaaccctctgcttgcatttactctcatcaaacgcctgcagtctgactggaggaatgtggtacatagtctggaggccagtgagaacatccgagctctgaaggatggctatgagaaggtggagcaagaccttccagcctttgaggaccttgagggagcagcaagggccctgatgcggctgcaggacgtgtacatgctcaatgtgaaaggcctggcccgaggtgtctttcagagagtcactggctctgccatcactgacctgtacagccccaaacggctcttttctctcacaggggatgactgcttccaagttggcaaggtggcctatgacatgggggattattaccatgccattccatggctggaggaggctgtcagtctcttccgaggatcttacggagagtggaagacagaggatgaggcaagtctagaagatgccttggatcacttggcctttgcttatttccgggcaggaaatgtttcgtgtgccctcagcctctctcgggagtttcttctctacagcccagataataagaggatggccaggaatgtcttgaaatatgaaaggctcttggcagagagccccaaccacgtggtagctgaggctgtcatccagaggcccaatataccccacctgcagaccagagacacctacgaggggctatgtcagaccctgggttcccagcccactctctaccagatccctagcctctactgttcctatgagaccaattccaacgcctacctgctgctccagcccatccggaaggaggtcatccacctggagccctacattgctctctaccatgacttcgtcagtgactcagaggctcagaaaattagagaacttgcagaaccatggctacagaggtcagtggtggcatcaggggagaagcagttacaagtggagtaccgcatcagcaaaagtgcctggctgaaggacactgttgacctaaaactggtgaccctcaaccaccgcattgctgccctcacaggccttgatgtccggcctccctatgcagagtatctgcaggtggtgaactatggcatcggaggacactatgagcctcactttgaccatgctacgtcaccaagcagccccctctacagaatgaagtcaggaaaccgagttgcaacatttatgatctatctgagctcggtggaagctggaggagccacagccttcatctatgccaacctcagcgtgcctgtggttaggaatgcagcactgttttggtggaacctgcacaggagtggtgaaggggacagtgacacacttcatgctggctgtcctgtcctggtgggagataagtgggtggccaacaagtggatacatgagtatggacaggaattccgcagaccctgcagctccagccctgaagactgaactgttggcagagagaagctggtggagtcctgtggctttccagagaagccaggagccaaaagctggggtaggagaggagaaagcagagcagcctcctggaagaaggccttgtcagctttgtctgtgcctcgcaaatcagaggcaagggagaggttgttaccaggggacactgagaatgtacatttgatctgccccagccacggaagtcagagtaggatgcacagtacaaaggaggggggagtggaggcctgagagggaagtttctggagttcagatactctctgttgggaacaggacatctcaacagtctcaggttcgatcagtgggtcttttggcactttgaaccttgaccacagggaccaagaagtggcaatgaggacacctgcaggaggggctagcctgactcccagaactttaagactttctccccactgccttctgctgcagcccaagcagggagtgtccccctcccagaagcatatcccagatgagtggtacattatataaggattttttttaagttgaaaacaactttcttttctttttgtatgatggttttttaacacagtcattaaaaatgtttataaatcaaaaaaaaaaaaaaaaaaa

SEQ ID NO: 426 - DNA, 2657 bp, Homo sapiens
ggcacgaggaagaagcttcagctgattgagggcaggcagcacagatcaacatggagccccaccatggtagtcctgttcaggtgggtcccagtcacagatgcctattggcagattctcttctccgtcctcaaggtcaccagaaacctgaaggagctggacctaagtggaaactcgctgagccactctgcagtgaagagtctttgtaagaccctgagacgccctcgctgcctcctggagaccctgcggttggctggctgtggcctcacagctgaggactgcaaggaccttgcctttgggctgagagccaaccagaccctgaccgagctggacctgagcttcaatgtgctcacggatgctggagccaaacacctttgccagagactgagacagccgagctgcaagctacagcgactgcagctggtcagctgtggcctcacgtctgactgctgccaggacctggcctctgtgcttagtgccagccccagcctgaaggagctagacctgcagcagaacaacctggatgacgttggcgtgcgactgctctgtgaggggctcagcatcctgcctgcaaactcatacgcctggggctggaccagacaactctgagtgatgagatgaggcaggaactgagggccctggagcaggagaaacctcagctgctcatcttcagcagacggaaaccaagtgtgatgacccctactgaggcctggatacgggagagatgagtaatagcacatcctcactcaagcggcagagactcggatcagagagggcggcttcccatgttgctcaggctaatctcaaactcctggacgtgagcaagatcttcccaattgctgagattgcagaggaaagctccccagaggtagtaccggtggaactcttgtgcatgccttctcctgcctctcaaggggacctgcatacgaagcctttggggactgacgatgacttctggggccccacggggcctgtggctactgaggtagttgacaaagaaaagaacttgtaccgagttcacttccctgtagctggctcctaccgctggcccaacacgggtctctgctttgtgatgagagaagcggtgaccgttgagattgaattctgtgtgtgggaccagttcctgggtgagatcaacccacagcacagctggatggtggcagggcctctgctggacatcaaggctgagcctggagctgtggaagctgtgcacctccctcactttgtggctctccaagggggccatgtggacacatccctgttccaagtggcccactttaaagaggaggggatgctcctggagaagccagccagggtggagctgcatcacatagttctggaaaaccccagcttctcccccttgggagtcctcctgaaaatgatccataatgccctgcgcttcattcccgtcacctctgtggtgttgctttaccaccgcgtccatcctgaggaagtcaccttccacctctacctgatcccaagtgactgctccattcggaaggaactggagctctgctatcgaagccctggagaagaccagctgttctcggagttctacgttggccacttgggatcagggatcaggctgcaagtgaaagacaagaaagatgagactctggtgtgggaggccttggtgaaaccaggagatctcatgcctgcaactactctgatccctccagcccgcatatccgtaccttcacctctggatgccccgcagttgctgcactttgtggaccagtatcgagagcagctgatagcccgagtgacatcggtggaggttgtcttggacaaactgcatggacaggtgctgagccaggagcagtacgagagggtgctggctgagaacacgaggcccagccagatgcggaagctgttcagcttgagccagtcctgggaccggaagtgcaaagatggactctaccaagccctgaaggagacccatcctcactcattatggaactctgggagaagggcagcaaaaagggactcctgccactcagcagctgaagtatcaacactagcccttgacccttgagtcctggctttggctgacccttctttgggtctcagtttctttctctgcaaacaagttgccatctggtttgccttccagcactaaagtaatggaactttgatgatgcctttgctgggcattatgtgtccatgccagggatgccacagggggccccagtccaggtggcctaacagcatctcagggaatgtccatctggagctggcaagacccctgcagacctcatagagcctcatctggtggccacagcagcacaagcctagagcctccggatcccatccaggcgcaaagaggaataggagggacatggaaccatttgcctctggctgtgtcacagggtgagccccaaaattggggttcagcgtgggaggccacgtggattcttggctttgtacaggaagatctacaagagcaagccaacagagtaaagtggaaggaagtttattcagaaaataaaggagtatcacagctcttttagaatttgtctagcaggctttccagtttttaccagaaaacccctataaattaaaaattttttacttaaatttaagaattaaaaaaatacaaaaaagaaaaaatgaaaataaaggaataagaagttacctactccaaaaaaaaaaaaaaaaaa

SEQ ID NO: 427 - DNA, 2410 bp, Homo sapiens
ccacgcgtccgcttcgacgacgacacctgcagaagtgcggagcccgccatgccgcgccacctctcgggactgctcctgctgctctggccgctgctgctgctgctgccgccgacccccgccgcccccggccccctggcccgcccgggtttgcggaggctgggcacgcggggcccagggggcagtcccgggcgccgccctgtctctgctgtccccacccgcgcgccctattccggggccggccagcccggcggggcccgaggcgcaggtgtttgcaggagcaggcccttggatttggtgttcatcatcgatagttcccgcagtgtgcggcccctggagttcaccaaagtgaagacctttgtctcccagataattgacactctggacattggggcggcagatacacgggtggcagtggtgaactatgctagcaccgtgaagattgagttccatctccagacccactcagataaacagtccttgaaacaggctgtggctcggatcacacccctgtctacaggcaccatgtccggcctggctatccagacagcaatggatgaggccttcacggtggaggcaggagctcgggggcccacttccaacatccctaaggtggccatcatcgtgacagatgggaggccccaggaccaggtgaatgaggtggcggctcgggcccgggcatctggtattgaactctacgccgtgggcgtggaccgggcagacatggagtccctcaagatgatggccagcgagcccctagacgagcacgttttctatgtggagacctacggggtcattgagaaactctcctctagattccaggaaaccttttgcgctctggacccgtgtgtgcttggcacacaccggtgccagcacgtgtgtgtcagtgatggggaaggcaagcaccactgtgagtgcagccaaggctactccttgaacgccgatcagaagacgtgttcagctatcgataagtgtgctctgaacactcacggttgtgaacacatctgtgtgaacgacagaactggctcttaccactgtgagtgctacgaaggttacaccctgaaccaagacaggaagacttgttcggctcaagaccaatgtgcctttggtacacatggctgccagcacatttgtgtaaatgacagagatgggtcccatcactgtgaatgctacgagggttatactctgaatgctgacaacaaaacgtgttcagttcgcagcgagtgtgctgggggctcgcacggctgccagcacctgtgtgtggacgacgggcccgcggcctatcactgcgattgtttccccggctacaccctgaccgaagaccggaggacgtgcgcagccattgaagaagcacgaagactcgtctctacagaagatgcttgtgggtgtgaagccaccctggccttccaggagagggccagctcatatctgcagagactgaatgccaaactcgatgatattttgggcaagttgcaagcagatgcgtatggacaaatacatcgttgaattactcagatttttcacctggatatacggagagcttggtctatttaatatttttgcatacttcaatgttcctgctaataatttgccattgcaaatgctttaatattactggataagtagtatgaggatcttctagagaatcagtaggacataaacgttcacatccttaagagcaaactttagtgtctctaagctatgactgtgaaatgattcatggggaatagaatgaaaagtttggtatctctttatttaccaattgagccatttaatttttaaatgtttatattagtaagataaccattcttacaatgggaactttttatctattttctcttgatagtatttatagtataaaccagttttattattgagagtgtaaattatacaagtatttacacataaaaaagttcatataattgaggtaaatataatttagaactgtttctttaatgctttgttttttgctcactttttgctggaatatcactgaagctgtgatcaggggattataacacatatcaagatcaagtgaacactacatgaaatattgtaagaaacacataactaaagactttagttttgaattaagtgttataacttcttaccaagttttggtaaaaaatcctacattatctttactgtttcactttaggattcaatcaagaaaattatatacttataaatattgatctaaaaagttaacaacaaacccaatgtcgccattttaaagtttaagcttaacttttcttcacttacatatttagtatatgtattttatttttccgcttgaaagcttatagctcttaggagaaaaccatcctttaaattgtgactactcattttttctgtttgtattgtctttagtataataaaaagttactatctttataaaaaaaaaaaaaaaaaa

SEQ ID NO: 428 - DNA, 2131 bp, Homo sapiens
tcgacccacgcgtccgcggacgcgtgggcggacgcgtgggcgcggcctcccggcgctcggctccgaccccgccgccgccaccatgcagccccccagcctgctgctgctcgtcctcgggctgctcgctgcgcccgccgccgcgctcgtccgaatcccgctgcacaagttcacctctgtgcgccggaccatgtcggagttggggggccccgtggaggatctgatcgccagaggccccatttcaaaatacgcccagggggtgcccagtgtggcggggggtcccgttccggaggtgctcaggaactacatggacgcgcagtactacggggagatcggcatcgggacgcccccgcagtgcttcaccgtcgtctttgacacgggctcctccaacctgtgggtcccctcgatccactgcaagctgctggacatcgcctgctggatccaccacaagtacaacagcggcaagtccagcacctacgtgaagaacggcaccagcttcgacatccactacggctccggcagcctctccgggtacctgagccaggacaccgtgtcggtgccctgtaagtcgggtctgtcgagcctggctggcgtcaaggtggagaggcagacgttcggggaagccaccaagcagccgggcatcaccttcatcgcggccaagttcgacggcatcctgggcatggcctacccccgcatctcggtcaacaatgtgcttcccgtctttgataacctgatgcagcagaagctggtggagaagaacatcttctctttctacctgaacagggaccccggcgcgcagcctgggggtgagctcatgctgggcggcacagactccaagtactacaagggtcccctgtcctacctcaacgtgacccgcaaggcgtactggcaggtccacatggaacaggtggacgtgggcagcagcctgaccctgtgcaaggggggctgcgaggccatcgtggacacgggcacctcgctcatcgtgggccccgtggacgaggtgcgcgagctgcagaaggccatcggggccgtgccgttgatccagggcgagtacatgatcccctgtgagaaggtgtccaccttgcccgaggtcaccctgacgctgggcggcaaaccctacaagctgtcgtcagaggactacacgctcaaggtgtcgcagggcgggaagtccatctgcttgagcggcttcatgggcatggacatccccccgcccggcgggccgctctggatcctgggggacgtcttcatcggccgctactacaccgtgttcgaccgggaccagaaccgcgtgggcctggccgaggccaccaggctctagctgcccgcccgctggggaggacggggtccggcaggaggaggctggccgccccgccctcccggccacccctgccgcacacactcacgctcagactcacactcaaagcccagctctgcaggcgccgggctgtcgggctgccgttttgttctgtggtttccccggccttggtgtgtctgtctgtctagtagagggcggggtgcggggcagcagccactaggctgaccccgagtctggagccacgtcactgactgggaagccccagcctggctcggccgcccatcgtcttgcacgcgggaccccctcccccggcccaggtagttcccccccccccccccagcccgtgcttcgggggcctggctgcccaggcaggacttctggactgagcccccaccccaggccaggctgttctctgggcttctcctcctggggtctggtctggggtccagagcggggcactgctggcctgtcttcccgtgtggcccatcgtggaagggacccgccgaggcccaaggacaagcaggaagggcttggaagggtcgggactcagggacaaaaggcagccttgtgatgcctttggggtcctcctggggcttgaccccatctaggagggcatttgctggtgccgggttggggaagaaggggaggggggggctggtgccaccttctgtgagcttttcccctcttgagtgaccaggagccgaagtgaacgtggaaatacagtcgtctgggcctcaaaaaaaaaaaaaaaaaaaaaaaaaaaaaaaaaaaaaaaaaaaaaaaaaaaaaaaaaaaaaaaaaaaaaaaaaaaaaaaaaaa

SEQ ID NO: 429 - DNA, 2794 bp, Homo sapiens
  misc_feature (164)..(164): n equals a,t,g, or c
aaaaagaaatcttgcatttgacacatgaaaaagtaactaaaagcttgcacggagatatattaagcccttgcactaaaaatgctggtactgtttaaattcctcccgttgacttcaagtgggcgcttttcatccgtaacattgtatcaccgggtgcaccaccagancgttttttcgcaggaagcgaagtcattctctccggcgtctacacttaacttgtatatttgttctagccaatttcagtcacttcagaaactttactgtggcgtaattccagttcttaggtacgcgagcatagagtgaaaaaatagctgtgattgttcttatgtaaaaatcaaagctccaatggaagttaatgaatacctttgtaataatggaatctatttgccctttatttcttaatcttctgttttaaactgctgctattaaaaacacacccatgttattaggtttacggaagttgagctgtcgttcaagttcttggcgtccggaaaggtgtccgtgccatgggcttgtgacccggtcctggatacaccagaaacatcaccttcttgccacctaaaagagaatcgcactcacaaacgctgtcacaaccgtctttatgacatcaatctcccttgttccggttctctttttacaaaaaagaatttacttcattaaacaatttccgtctctagtttaaacagaaggtggaaaaaaatagaccccggtctagactcattttctccagtccacattggaatgggtttaagaatatcctcttccaaacaaaacaagacgatttgtactttgtgtctaagatgtctaagatgaaacgtttaaaactctgattaccacaattttggattttttgttaaaatcaaatgtattttcaaacttactgtgttacaatattatagttaaaaagtacagggagagcagaagccctgatctaagaggtgagtcattgtcctcatgttgctgctaacttgaattgcagaagagaaaatctcagtgccttctgcctggctttttgatggagtttgcttaacacccttcatctttctgtttctctccatgtaactaaatgacgttttaaaaattcagtgctgaggtgtctgggtagcacagcggttgagcctccgatttttggtttcaactcaggtcacgatctcagggtcatgggatcgagccccacaacaggctccacgctcagccgggagtgtgcttaagtttctcgctctgcccctgcccttccccttcccctgctgcgtgcacctatgcactctctctctcaaataaacaaataaatctttaaaaataaataaataaaacacagtgcataccataaaacattaagtaatatgcgttagggaagcatttgagatcatgcatagcttatatatttcaaaaaggatttgttcacatcagtacaatagatagatataaaagaagcaattcttggagcgtctgggtaaagaaggtagtgctccggctcagcaggctttcccgtcaagccactgatctccacccggctctcccgtgttcctcttcaataactgagtgcagtctatgagcagatgctgccttctgccacataaagtatccttaacttttactttgctttgagtttaaaccagcattgaaatgtaaatcacgtcttcctcatgcatgaaattgtgagggaagtcagagaggttctctaagagtttatttagcaatgaggaaacaggacaaagaggaggtagtcccatagtggggagggtgggaggcggggtctgccgggcagcactgggtccagcgtctccctttccctagctttctcccaattttctttaggaaaaatgatgtcatagtgagatttcctataacagaatgtttctaaggttcactgtatggacccagaccccagacggttgtcttataagcgaacttagaacggatgctgggaactaagtacttgagtgttgacttgctcacctgcgtgggacagagggacaagccagcaagcccccatgaagtgacgggcagccccacctgggccctggagagaccgacgcaccctctcagctggggtgcagagaaaggattggtttgggggatagcagtggactgtcagaagaacttacgggatcctattgtaatgtaagctatgaatcaggcttgctgtcctgggactgaggttgtaacccgtgaacgacgcaccaacacaggcagctgatgcgtttgctttggcttccaatttgctaatataaaaatctagacttgtttcatgaaaacaggacatttaaacattctatgaatattctccaaaaatatttggggaaacctatgtacacatttctgttggactgacacctagaaatcaaattgttgtgacagaggatgtgcctatgttcagcttcagtaaatactgccggagagatctctgaatgataaacagttaacggaaaatcgcaccaaaccaggctgttggaggcaacaacccattgggctagtttctggtggcctgctgcagccacgcaggcgagcactgggcttcagactgcacgggactctctttgtccacctgtcctgtgcctggccccacaccaggatgctggcgattatcaaatacactttactggtgattacctttgagcatatttgctttcacaaatcagttctgtaactttgtgtgcattgggctaaattttacaaactaatcattggttaaaaggaagtggcctaaggtccccagtcttgctgatatcagggcagctgctcctttggggttcctcgtcttccatgggtgaagcatgggagtgaggggccccat

SEQ ID NO: 430 - DNA, 2048 bp, Homo sapiens
acgcgtccgggaaaggagacgctggtgatggggttaggaaaaagtgggactcctccccacgaccattgctattatccagatcatttctaaggattcggtttctgccatttctgacagctgcttgaggccgagtgaacgtggttttggaagattgcttaaacaaagaatggaggccagagtggtgcacgcattgcagaaaaggcaagtgtcacttctttgtgtgtttctgggagtgtcttgggctggcgcagaacctcttcggtattttgtggcagaggaaacggagagagggacctttctggccaacctagcaattgatctggggttaggggtggaggaactgtcagctcggggatgtagaattgtttcagatgagaccataggatttttactcctcaatccgcttactggtgatttacttctaaatgagaaattagaccgagaggaactgtgtggccccacagagccatgtgtgttgcctttccagttgttacttgaaaagccttttcagattttccgtgctgaactatgggtcagagacatcaacgatcattctccagtatttctagatagagagattaccttgaacatattagaaagtaccactccaggggcaacatttctcctagaaagtgcacatgattcagatgttggaatcaacaacctgagaaactacaccatcagctccaatgtttatttccatattaatgtccatgataacggggaagggaatgtttattccgaattggtactagataaagtgctggatcgtgaagaggttcctgagctgcgtttaaccctcaccggcttggatggcggttctccgcccagatccggaaccaccctcatacgcatcctggttttggacataaatgacaacgtccctgaatttgtagagtcgctttacaaggtccaggtgcctgagaacagccctgttggttccctggttgtcactgtgtcagctagagatttagataccggaagtaatggagaaatcgtctatgcatttttttacgctactgaaagaactctcaaaacgtttcgaatcaattcaacatctggcaatcttcatcttaaagccgaattgaactacgaggcaatacaaacttatacattaactattcaggccaaagatggtggagggctttctggaaaatgtactgtggtggtccatgtaacagatataaacgataatccaccagaactgctcatgtcatcacttactagcccaatcccagaaaactcaccagagacagtagtcgctgtttttaggattagagacagagattcagggaacaatgcaaagatggtgtgctccatccaagaccatctccccttcgtcctgaagccatcagtagagaatttctacaccttggtaacagagagagcactagacagagaagaaagaaccgagtacaacatcaccatcaccgtcaccgacctggggacccccaggctgaaaacccagcacaacctcacggtgaccgtgtccgacgtcaacgacaacgccccgaccttcagccagacgacttacaccctgcgcgtccgcgagaacaacagccccgccctgcacatcggcagcgtgagcgccaccgacagagactcgggcgccaacgcccaggtcacctactcgctgctgccgccccacgacccgcagctgccgctgggctcgctggtgtccatcaacgcggacaacgggcagctgttcgcgctcaggtcgctggatttcgaggcgctgcaggcgttcgagttccgcgtgggcgcggccgaccgcggctcgccggcgctcagcagccaggcgctggtgcgcgtgctggtggcggacgccaacgacaacgcgccgttcgtgctgtacccgctgcagaacggctcggcgccctgcaccgagctggtgccgcgggcggccgaggcgggctacctggtggccaaggtggtggcggtggacggcgactcgggccagaacgcctggctgtcgtaccagctgctcaaggccacggagcccgggctgttcggcgtgtgggcgcacaacggcgaggtgcgcacggcgc

SEQ ID NO: 431 - DNA, 2406 bp, Homo sapiens
  misc_feature (1934)..(1934): n equals a,t,g, or c
ccacgcgtccgcggcggcgaaggcaacaattaaggcccccaggtggactggcagcgcccgctgatgctactactgcagtctttattttttcccatgagctgggggtcgggtgggggagggaaagggagggatgaccttcctagggagaagcccacgacctgtcctgtctttgatcgcctctttgacatttttgccaaaataccactagtggaaagtcaggctagctgtgctcgtattggaatagcagcctcacactggcgtctggactgttctgtagatggaatgcaagcggactgtctgtctttaatctaacttattgctagagaatagggttttaagacgaaaagaaaactgaaacgggattggccctcattcagtgagttctgtggttccagtaaggatttgtatgtacatacgctcttgtcttacgttttgggtactcttgtctcatctgttttagctgtgcgtttcttttcagggtgtactcgaccagccatggactagtgtaaatcccgaacggacagacttggaacataaggcgcgttgatccttatggtttaggcctggccagtttcccgagtctcggattagctgacagtattaacactaaattgcagtttacagtatttctacatgacagccatacgtaacatcaagccattgattgtgtattttcctttgctagtttactttggctttgcatccgtagtcagccttatccaggttgggttttgctgttcgccgtctcccaggccacaaggcttgcctgaggggaatcgcagctccttttaggttttggtattaggtgcttggcaggtggctgtgggatttgtacccttcttcctcttaactcaaatccaccgcaaaaatgatgaatcactttaatagaaacgttaaacaccacaaaaatagagaaaattcaggtctgtatgtcattgattgtgttgatattttcagagaactcctgatttttaagctgccacgctccttcctcagggatcacgctgccatcactcttgagtgttccccgctggaccttctgctggtggctctcgggacggtggagacgccgttgagctggagaagctgggcagtcatcttgaggaaggttgtggtgcagtgtgtggaaatttaggtgctagaagcttactggtagaaaaacccaaaaggaagagaagagctcttctgttcataagcgctctgtccgatttcgggagcctcgtaagcatgtccgtttttcctccccggaaacactccttccctaagcagttgttgtaggaaaacgaactaaaggcattatcagataataaatcactcctatttgaccaagactttttctacattttttttttttctttttaatgaaagcatcaaagcgagagagtcctttctctcttgtacagttgacacatgctctggaatcgaaggaaactacgttgctgtttccacaaatttgttctcagtttagccttaggtccttcattcttattttggaaaaatctgtctgaaaaacgtgacctgtcgagtgtgtgttcagcctttctttacaagaccagaaacggtgtgaactcccgagatatggaggtaataacgccagactcgctttgttggttgctgcggtttagtcaaggagaggtatgaggaataattgaggaaacactgactgttgctttttgctctttaccagaatcggacttaagagttgggaaatgagtatgtgtgacaggatccaggtgaccgtgaggatgagaacagtgatgccctggagcatggcacagtctacccagcatgactttccttagaaggttccctccatacgctagagcaaaagtcccaattaactgaaccctagcagaactagaagagagctgtacagcttttgtgccatcaccggggccctaaagtcaatgccatggatgggaaattatgggggnttgggggggaggggtaggtggggctttccttaacttatcttcatgtccagtgagcagtgttttgtccttccttgtagcctttggaaatgatttactggaattacaaaacctattttttcttttaaatttcagctttggctctggctgctttttagaataatgcaagataacagttatacctgagggctaaaaatgaagagggaacgggagacttgatatttaagcagcttgaatggtttcttttcttttctttatttttaaagaaatgcacttgcctctgatactgtctctccagtgaaatgattactcctccattactctattgatacaatattgtgcatgctagtgttgtatttctatacagtagcttgaaatttattaacttatactgtaggtgttatgtattcctatgacaaaaaaaattaagtcttcaaattttaaaaaaaaaaaaaaaaaaaaaaaaaaaaaaaaa

SEQ ID NO: 432 - DNA, 1669 bp, Homo sapiens
ccacgcgtccggcacggtcgccaggcaccgctgaccgaggcctgctgggattccagaattggagagggaggcaccatgaagactctcctgctgctggtggggctgctgctgacctgggagaatggacgggttctgggagaccagatggtctcagacactgagctccaggaaatgtccaccgaggggagtaagtacattaatcgggaaattaaaaatgctctcaagggggtgaagcagataaagacactaatagaacaaacaaacgaggagcgcaaatccctgctcaccaacttggaagaagccaagaagaagaaagaggatgccctgaatgacaccaaggattcagaaatgaagctgaaggcgtcgcagggggtgtgcaatgacaccatgatggccctctgggaggagtgtaagccctgcctgaaacagacctgtatgaagttctacgcccgagtctgcagaagcagcacagggctggttggccaccaggttgaggagttcctgaaccagagttctcccttctacttctggattaatggcgaccgcatcgactccctgctggagaacgaccggcagcagacccacgccctggatgtcatgcaggacagtttcgaccgggcatccagcatcatggatgagctgttccaggacagattcttcacccgtgaggcccaggaccctttccacttctcacccttcagctcattccagcggaggccttttttcttcaatatcaagcaccgctttgcccggaacataatgcctttccctggctaccagcccttgaatttccacgacatgtttcagcccttcttcgacatgatacaccaggctcagcaggccatggatgttaacctgcacagactcccccactttccaatggaattcacagaagaagacaaccaggacggcgccgtgtgcaaggagatccgtcacaactccacagggtgcctgaagatgaaggaccagtgtgaaaagtgccgggagatcttgtctgtggactgttcgtccaacaaccccgctcaggtccagctgcgacaggaacttaataattccctccagattgcagagaagttcaccaagcttgtacgacgagctgctgcagtcctaccaggagaagatgttcaacacgtcctccctgctgaagcagctggacgagcagtttagctgggtgtcccagctggcgaatctcactcagactgaggacccgttctatctccaggtcacgacggtgagttcccagacttctgactccagtgctccctctggcgtcactaaggtggttgtgaagctctttgattccgaccccatcaccgtgatcctcccagaagacctctccaggaacaatcctaaatttatggagaccgtggcagagaaagcccttcaggaataccgccagaagagccgggaggagtgagatgggaacactgcctctccacatggcaggtgtctgagttctgtcgcccccgcgatgagcgataggcccctagagagagctctgcatgtcaccgagtgaccgggccttccttgaggccctcctgtcccctcaccccgcctgtcctccctctggactctgcattgtaacaccgtgttcactgatcatgggaagaactcctgtgtgccactaactcaataaaaccaccagtaatctgaaaaaaaaaaaaaaaaa

SEQ ID NO: 433 - DNA, 1491 bp, Homo sapiens
ccacgcgtccgggagccatggcgccgtccgggccgctgctgctggtgctgctcgtgccgctggccgccgcgcgggccgggccctacttccgtcccggccggggctgccgcctgcccctgcggggggaccagctgtcggggctggggcgcaggacctacccccggccgcacgagtacctgtccccatctgacctgcccaagagctgggactggcgcaacgtgaacggggtcaactatgccagtgccaccaggaaccagcatatcccccagtactgtggctcctgctgggcccacggcagcaccagtgccatggcgggaccggatcaacatcaagagaaagggggcgtggccctccaccctgctgtccgtgcagcacgtcctcgactgcgccaacgcgggctcctgtgaggggggcaacgacctgccggtgtggaggtacgcccatgagcacggcatcccggacgagacctgcaacaactaccaggctaaggaccaggaatgcaacaagttcaaccagtgtggaacatgcacggaattcaaggagtgccactacatccagaactacacgctctggaaagtgggtgactacggctccctctccggcagggagaagatgatggcggaaatctatgccaacggccccatcagctgcggtatcatggccacggagaagatggtgaactacacgggaggcatctacgcggagtaccaggatcaggcctacataaaccacgtcatttctgtggtcggctggggcgtcagcgacggcacggagtactgggttgtccggaattcgtggggggaaccgtggggggagcacggctggatgaggattgtgaccagcacctataaagacgggcagggcgccagttacaacctcgctgtcgaggacacctgtacgtttggggaccccatcgtttaagggacaggtctccccagaagagcagtgttatcgtgaaccataatcagggggtcctatcgctctgggcactgggttggttccaccatggtctgaagggactggggactggcatcaaacgtgtctgatggctgctcgcggccccgtgcgcccagaagggagaaggggcgcctgtcagcacacagcctgccgcggcgccggccgggagcgcgctcctggggaagagtctgcaatgggacggctgagagccccgggccggccactgccctgccccagtgtctgcctggccaccgtgtgatccgcaaggcccaaacgatgtgactgccaagctcctctgtccctgatttggtgtttcctgtctggcagctgtggtccatgatgtggtgcggaagcccaggcttctcaaagctcttacgttgcctgggattcggtgggggggagtcggggggtggagggagaagacggccctgtgagattgcccaagtgatgaataaagtacgtgaccccgcaaaaaaaaaaaaaaaaaaaaaaaaaaaaaaaaaaaaaaaaaaaaaaaaaaaaaaaaaaaaaaaa

SEQ ID NO: 434 - DNA, 571 bp, Homo sapiens
  misc_feature (249)..(249): n equals a,t,g, or c
  misc_feature (548)..(548): n equals a,t,g, or c
tcgacccacgcgtccgggggcgtacgcgggcaagatggaggcgactacggctggtgtgggccggctagaggaagaggcgttgcggcgaaaggaacggctgaaggccctacgggagaaaaccgggcgcaaggtgagaagtgtggagtgagggtcgcagttgaggcgtccagcgttcggggtccgggtcgcgcttgaggagagcaaagggctaataaggaaagacagctgccgagggcgcgcatgccgggncgctaacgcatgcgcgagaagacgggcgccctcccacgatgtctggggctgcttggcgtgggactcctctggcgctggtgcggtcgtcgcgcacgcgcgggggtgggcaargcatggtcagcgacccgcagtccatctgactcctgcttcccgggtgttgctcgtgtaggtatctagggctgcctgtaggttcagatgcttgttgggttaggcgtgatttgttccgttcctctatggcctagctggtctttaacccccgccttcgattctgagtcagacagactccccagttcgggcangcaattcccttggaacaagggca

SEQ ID NO: 435 - DNA, 2087 bp, Homo sapiens
  misc_feature (56)..(56): n equals a,t,g, or c
tcgacccacgcgtccgtggggccgagcgccgctgggtaggcggaagtagccgcagnatggcggcggctatgccgcttgctctgctcgtcctgttgctcctggggcccggcggctggtgccttgcagaacccccacgcgacagcctgcgggaggaacttgtcatcaccccgctgccttccggggacgtagccgccacattccagttccgcacgcgctgggattcggagcttcagcgggaaggagtgtcccattacaggctctttcccaaagccctggggcagctgatctccaagtattctctacgggagctgcacctgtcattcacacaaggcttttggaggacccgatactgggggccacccttcctgcaggccccatcagacactgaccactactttctgcgctatgctgtgctgccgcgggaggtggtctgcaccgaaaacctcaccccctggaagaagctcttgccctgtagttccaaggcaggcctctctgtgctgctgaaggcagatcgcttgttccacaccagctaccactcccaggcagtgcatatccgccctgtttgcagaaatgcacgctgtactagcatctcctgggagctgaggcagaccctgtcagttgtatttgatgccttcatcacggggcagggaaagaaagactggtccctcttccggatgttctcccgaaccctcacggagccctgccccctggcttcagagagccgagtctatgtggacatcaccacctacaaccaggacaacgagacattagaggtgcacccacccccgaccactacatatcaggacgtcatcctaggcactcggaagacctatgccatctatgacttgcttgacaccgccatgatcaacaactctcgaaacctcaacatccagctcaagtggaagagacccccagagaatgaggcccccccagtgcccttcctgcatgcccagcggtacgtgagtggctatgggctgcagaagggggagctgagcacactgctgtacaacacccacccataccgggccttcccggtgctgctgctggacaccgtaccctggtatctgcggctgtatgtgcacaccctcaccatcacctccaagggcaaggagaacaaaccaagttacatccactaccagcctgcccaggaccggctgcaaccccacctcctggagatgctgattcagctgccggccaactcagtcaccaaggtttccatccagtttgagcgggcgctgctgaagtggaccgagtacacaccagatcctaaccatggcttctatgtcagcccatctgtcctcagcgcccttgtgcccagcatggtagcagccaagccagtggactgggaagagagtcccctcttcaacagcctgttcccagtctctgatggctctaactactttgtgcggctctacacggagccgctgctggtgaacctgccgacaccggacttcagcatgccctacaacgtgatctgcctcacgtgcactgtggtggccgtgtgctacggctccttctacaatctcctcacccgaaccttccacatcgaggagccccgcacaggtggcctggccaagcggctggccaaccttatccggcgcgcccgaggtgtccccccactctgattcttgccctttccagcagctgcagctgccgtttctctctggggaggggagcccaagggctgtttctgccacttgctctcctcagagttggcttttgaaccaaagtgccctggaccaggtcagggcctacagctgtgttgtccagtacaggagccacgagccaaatgtggcatttgaatttgaattaacttagaaattcatttcctcacctgtagtggccacctctatattgaggtgctcaataagcaaaagtggtcggtggctgctgtattggacagcacagaaaaagatttccatcaccacagaaaggtcggctggcagcactggccaaggtgatggggtgtgctacacagtgtatgtcactgtgtagtggatggagtttactgtttgtggaataaaaacggctgtttccgtgrwwaaaaaaaaaaaaaaaaagggcggccgctctagaggatccctcga

SEQ ID NO: 436 - DNA, 1409 bp, Homo sapiens
  misc_feature (1180)..(1180): n equals a,t,g, or c
  misc_feature (1384)..(1384): n equals a,t,g, or c
  misc_feature (1392)..(1392): n equals a,t,g, or c
acaggatctaccccctctgcagcccttcaagaagaggtatgattgctaccacttttccccacaaagtgacgaaaggaaacagcgacggaagcgcaaccgaaccctggaattggtgtctcgactggtccattcccggcccacccccattaaccggctcgagccactcccaggacgaagtcaaggcctcggaaggcgactacaactcccagcaggtcgagcagctccgcccgcgctgattctccattggccttccgggggtggggattagatgggaggtggccgtggggctgcggccgggatttgtcccctcttcggcttccgtagaggaagtggcgcggaccttcatttggggtttcggttcccccccttccccttccccggggtctgggggtgacattgcaccgcgcccctcgtggggtcgcgttgccaccccacgcggactccccagctggcgcgcccctcccatttgcctgtcctggtcaggcccccaccccccttcccacctgaccagccatgggggctgcggtgtttttcggctgcactttcgtcgcgttcggcccggccttcgcgcttttcttgatcactgtggctggggacccgcttcgcgttatcatcctggtcgcaggggcatttttctggctggtctccctgctcctggcctctgtggtctggttcatcttggtccatgtgaccgaccggtcagatgcccggctccagtacggcctcctgatttttggtgctgctgtctctgtccttctacaggaggtgttccgctttgcctactacaagctgcttaagaaggcagatgaggggttagcatcgctgagtgaggacggaagatcacccatctccatccgccagatggcctatgtttctggtctctccttcggtatcatcagtggtgtcttctctgttatcaatattttggctgatgcacttgggccaggtgtggttgggatccatggagactcaccctattacttcctgacttcagcctttctgacagcagccattatcctgctccataccttttggggagttgtgttctttgatgcctgtgagaggagacggtactgggctttgggcctggtggttgggagtcacctactgacatcgggactgacattcctgaacccctggtatgaggccagcctgctgccatctatgcagtcactgkttncatggggctctgggccttcatcacagctggagggccctycgaagtattcagcgcagcytcttgkgaaggactgactacctggactgatcgctgacagatcacctgctgtcmctgccatgactgagccagcccagccggtccattgccaaatctctctttcgcggctacccatactcaggtttgttgcctttggacgtagcttanttacaganagctggtcagcagcagt

SEQ ID NO: 437 - DNA, 2571 bp, Homo sapiens
ccacgcgtccggtaatcttcaaatatgcgcatggcgagtattatggtctgggtgatgatcatcatggtgattctggtgctgggctacggaatatttcactgctacatggagtactcccgactgcgtggtgaggccggctctgatgtctctttggtggacctcggctttcagacggatttccgggtgtacctgcacttacggcagacctggttggcctttatgatcattctgagtatccttgaagtcattatcatcttgctgctcatctttctccggaagagaattctcatcgcgattgcactcatcaaagaagccagcagggctgtgggatacgtcatgtgctccttgctctacccactggtcaccttcttcttgctgtgcctctgcatcgcctactgggccagcactgctgtcttcctgtccacttccaacgaagcggtctataagatctttgatgacagcccctgcccatttactgcgaaaacctgcaacccagagaccttcccctcctccaatgagtcccgccaatgccccaatgcccgttgccagttcgccttctacggtggtgagtcgggctaccaccgggccctgctgggcctgcagatcttcaatgccttcatgttcttctggttggccaacttcgtgctggcgctgggccaggtcacgctggccggggcctttgcctcctactactgggccctgcgcaagccggacgacctgccggccttcccgctcttctctgcctttggccgggcgctcaggtaccacacaggctccctggcctttggcgcgctcatcctggccattgtgcagatcatccgtgtgatactcgagtacctggatcagcggctgaaagctgcagagaacaagtttgccaagtgcctcatgacctgtctcaaatgctgcttctggtgcctggagaagttcatcaaattccttaataggaatgcctacatcatgattgccatctacggcaccaatttctgcacctcggccaggaatgccttcttcctgctcatgagaaacatcatcagagtggctgtcctggataaagttactgacttcctcttcctgttgggcaaacttctgatcgttggtagtgtggggatcctggctttcttcttcttcacccaccgtatcaggatcgtgcaggatacagcaccacccctcaattattactgggttcctatactgacggtgatcgttggctcctacttgattgcacacggtttcttcagcgtctatggcatgtgtgtggacacgctgttcctctgcttcttggaggacctggagaggaatgacggctcggccgagaggccttacttcatgtcttccaccctcaagaaactcttgaacaagaccaacaagaaggcagcggagtcctgaaggccccgtgctccccacctctcaaggagtctcatgccgcagggtgctcagtagctgggtctgttcccccagccccttgggctcacctgaagtcctatcactgccgctctgcccctccccatgagccagatcccaccagtttctggacgtggagagtctggggcatctccttcttatgccaaggggcgcttggagttttcatggctgcccctccagactgcgagaaacaagtaaaaacccattggggcctcttgatgtctgggatggcacgtggcccgacctccacaagctccctcatgcttcctgtcccccgcttacacgacaacgggccagaccacgggaaggacggtgtttgtgtctgagggagctgctggccacagtgaacacccacgtttattcctgcctgctccggccaggactgaaccccttctccacacctgaacagttggctcaagggccaccagaagcatttctttattattattattttttaacctggacatgcattaaagggtctattagctttctttccgtctgtctcaacagctgagatggggccgccaaggagtgccttccttttgctccctcctagctgggagtgacgggtgggagtgtgtgtgcccaggtgggggtgtctcctggctgggaaggagggaaagggagggagagttttgcgggggttggcagtggagagcaggctggagaggagatggctaatagctgtttaatggaaacctgctgggctggagggagttaggctgaatttcccgacttcctctgccagttattgacacagctctctttgtaagagaggaaagaaactaaacccacccaagggatgatttcagggggagaggtggagggcagatgtcctgggcaaaccgggcccctctgcccacacacctcacttgatccttttgccaaacttgtcaaactcaggggaactggcttcccagttgcccctttgccatattccaagtccccctcagacttcatgtctctgctcatcagcactgtcccaggatcctggagagggagaacccctggccccaggggaaagaggggggggtctcccgtttcctgtgcctgcaccagccctgcccccattgcgtctgcacacccctgcgtgtaactgcattccaaccactaataaagtgcctattgtacaggaaaaaaaaaaaaaaa

SEQ ID NO: 438 - DNA, 3080 bp, Homo sapiens
ccctctaacctccagagctatggtctcagatgcttccttttagagagaaggtcattagtccaccaagaagccaaatgacaacaggaaaggtgatgggaagatgaaaacaaaggaaggtggacttttgggtatatgttatagccatgtatgtatgtcttcttttttctattttctcttgttcttcatcttaactgtcctcaatctgccccacaccaaccctgtgtcactcccagcacacataagacagagcagaagaccccatccttgagctggtctcccctgggtatgggctgaggtaacatcccacacaccaggacgatcttccctgcctcccatcggtcacattaagacattttcaaagtgtaatattataaatggacctacctctaaatattgactttacagttattttatgaggcactcaatttatagctaagggttttcagtctagtgtcatgaaagagataaaagggtgttcacagattatttaagacataaggctggtcagggatgagtcagagagtcattctccatgaagtcacccctggccaactttgaaaggaagaatgtttaactgcactttgggcgtaaatgacaagcatctgggaccctccccttccctgatccctgccaccaccactcaatcggccagataatcaattgtttctgaggtcactttcacataatcttggcaactttagttgttgaaagcatgcatgcaggggcaacatggtgttacctgttgctttttttttcccccttctaagctccttaccagagagcagatctaaggatactgtgtaacttgaaataaccggcattttcagactttgccatttcatagtccatagggcaagccatctttcagggatatccacatggtgggcaggaaatcttgacattggcttctcagaaaatatctgcctagtcacacctgggaattcactaaacacccaaatgcagtgtttgatgtggccttacctgctccttgtatcttattggattgaatgagaacagatgcaaaacaagtatgtacagaaatgccaggaaaactactgtcttccaatggggttcaacagttcaaagccctccattgatggagccacttaggaggtttcagtgtcttaattcttttagattttgacagttttagaaaactaaaaaaaaaaaaaacaagtttttatcgtgaaatttgattacaaaagattttgagagaaatgataagaaccagatctgaagaatttgaaatttgaaaattcagcagagcatttttttaaatgtatcttgtacaagatgaactaaataaatgtttttaaactgacttctttttggtggatttcaaaagttaaccttcagacttatttagagggttttcataaagcaagtttttttctgttgctgctcaatttctttcttttcttttctatcttttcttttctcttccttttgctgttccctgtgtgtgaagcaggaggggcagctgaaatgctttgcatactcaccctggtcattttccagttaggacaagctcaaagggagagcacagctcagaaggtggcactcatgactcaggaaataatttgtggctcatttgaaagcagcatcttctaagtgtgttgcaaaatagagaaaaatcaacaggttgttggggtgtttattttccccactgcgtatgaaagctggtgctgctgccctttgatggccaagaggagctcctggcagccgtggccatgtgtcccggggtgtgtggggcaggcggcagttcttggcagccttctctgcagggctgcttcctgaccttgcttcaaagccttctgggctgtagaccacacagagctcaccctcaagcagccacgctggaccacattgctttcactgattttgactcatctcccccatagtgcagtgtgtccaaaggtggctgtgggtgacacagccgtgtgttcgtgctgtacggcactgtggtcatgggggtgacgctggagctcctgattagtttgagttcaaatcccagcctcgctggtgggcatgcttagaacagaccctagcaggcgccaagccccagtaagtggtggagtcattggtaaaggataatgctgaatgcaggacatttatatggatgaaagagtatgggaaagggaatttcagtgatatgaattccaaagcgtgttagtatattttataagaaacaaaaaggtattcaccagcaccaccaaactccatcatcagtcacaggcaaccaagaattgatcactctcccagaactttgggaggccgaggcaggcagatcacgaggtcaggagatcgagaccatcctggctaacacggtgaaaccccgtctgtactaaaaatacaaaaaaaaaaaaagaaaaattagccgggcatggtggcgggaggctgaggcaggagaatggcgtgaacccgggaggcggagcttgcagtgagccgagatcacgccactggactcctgcctgagtgacagagggagacgccgtctcaaaaaaaaaaaaaaaaaaaaaagaattgagcactcaagtccgtcttctaaactgcctgaacctcttgagatgagaagaacaaaacaaacctgcgctgtcctgatgtaggttaccctaatggagcttcctgggttctcctctccctgtcacatctcagggactccaccttattttaaagctgtcttactagcactgttggacttttctgtttcagatgctcaaacaagagatggagcaggggcagggtttggggttaaatgggctggaggtgagattggcccccctaaggtgttgaggacacttggggtgaaagtcgttagggtatatgtaggtcagagccagggccgctgcgtgcacagaggtctgtcatggagcggccagtaggcaccaaaatccagccaaagctcggccatgagagctgggtagcggcaggggtgacaacagtggccaccctggtaaggttaaggtcagacttgggttagtctaagctgtcagagggtgttcatcatttttcttacctttccaatagtgaccctattccaaaggccttgtttcttgtgccagagaagaaactaaagtata

SEQ ID NO: 439 - DNA, 1837 bp, Homo sapiens
  misc_feature (48)..(48): n equals a,t,g, or c
  misc_feature (987)..(987): n equals a,t,g, or c
  misc_feature (1037)..(1037): n equals a,t,g, or c
  misc_feature (1312)..(1312): n equals a,t,g, or c
cagcagagcccagcgcggtgctatcggacagagcctggcgagcgcaanggacgcggggagccagcggggctgagcgcggccagggtctgaacccagatttcccagactagctaccactccgcttgcccacgccccgggagctcgcggcgcctggcggtcagcgaccagacgtccggggccgctgcgctcctggcccgcgaggcgtgacactgtctcggctacagacccagagagaaaagcttcattctggaggggaaggagttttgagtgccaaggatgaaattccacccatcactcggtctctgagctgcaggacacaggcaggacaacgggagcacactgccaggatgggagctgctgggaggcaggacttcctcttcaaggccatgctgaccatcagctggctcactctgacctgcttccctggggccacatccacagtggctgctgggtgccctgaccagagccctgagttgcaaccctggaaccctggccatgaccaagaccaccatgtgcatatcggccagggcaagacactgctgctcacctcttctgccacggtctattccatccacatctcagagggaggcaagctggtcattaaagaccacgacgagccgattgttttgcgaacccggcacatcctgattgacaacggaggararctgcatgctggggagtgccctctgccctttccagggcaatttcaccatcattttgtatggaagggctgatgaaggtattcagccggatccttactatggtctgaagtacattggggttggtaaaggaggcgctcttgarttgcatggamagaaaaaactctcctggacatttctgaacaagamccttcacccaggtggcatggcagaaggaggctatttttttgaaaggagctggggccaccgtggagttattgttcatgtcatcgaccccaaatcaggcacagtcatccattctgaccggtttgacacctatagatccaanaaagagagtgaacgtctggtccagtatttgaacgcggtgcccgatggcangatcctttctgttgcagtgawtgatsaaggttctcgaaatctggatgacatggccaggaaggcgatgaccaaattgggaagcaaacacttcctgcaccttggatttagacacccttggagttttctaactgtgaaaggaaatccatcatcttcagtggaagaccatattgaatatcatggacatcgaggctctgctgctgcccgggtattcaaattgttccagacagagcatggcgaatattycaatgtttctttgtccagtgartgggttcaanacgtggaktggacggaktggttcgatcatgataaagtwtctcagactaaaggtggggagaaaatttcagacctctggaaagctcacccaggaaaaatatgcaatcgtcccattgatatacaggccactacaatggatggagttaacctcagcaccgaggttgtctacaaaaaagsccaggattataggtttgcttgctacgaccggggcagagcctgccggagctaccgtgtacggttcctctgtgggaagcctgtgaggcccaaactcacagtcaccattgacaccaatgtgaacagcaccattctgaacttggaggataatgtacagtcatggaaacctggagataccctggtcattgccagtactgattactccatgtaccaggcagaagagttccaggtgcttccctgcagatcctgcgcccccaaccaggtcaaagtggcagggaaaccaatgtacctgcacatcgggggtcgacgcggccgcgaatcccgggtcgacgagctcactagtcggcggccgc

SEQ ID NO: 440 - DNA, 1188 bp, Homo sapiens
  misc_feature (892)..(892): n equals a,t,g, or c
gacggagcgggcgccttccgagcgccgatcagggagcccggagtccccgcgtccccgcagcccccagaacccggacaactgttgcggcggcggcaggggcatcgcgggggcgtgggcagcccccgcaccccagcaggcggctcccgcgggcgccggctcccggctacgaagcgaggaacgagcgggcggcgggcacgaggcagctctggacggatcaatgcaagccagacgatgaccagttgtggccagcagtccttgaacgtgctcgccgtcctcttctcattgctgttttctgcagtcttgtctgcacatttccgggtctgtgaaccatacacagaccacaaaggccgctaccactttggcttccactgcccccggctctcggacaacaagaccttcatcctctgttgtcaccataacaacacggtcttcaaatactgctgcaacgagacggagttccaggcggtgatgcaggcgaacctcacggccagytccgagggttacatgcacaacaattacaccgccctgttgggagtgtggatctatggatttttcgtgttgatgctgctggttctggacctwwwgtatwamtcggcaatgaactacgacatctgcaaggtctacctggcacggtggggcatccaaggacgatggatgaaacaggacccccggcggtgggggaaccccgctcgggcccctcggccgggtcagcgggccccacagccgcagcctcccccaggcccgctgccacaagccccacaggccgtgcacacattgcggggagatgctcacagcccaccgctgatgacyttccagagttcgtctgcctgaaaacgcttttgctgtgcctcaggatgggggagatgagatctgaagcacccggtgcagcctncgagaagaacaacttctacagagatgccagggacagccgaggtagcggcgrtggcacaggaggaaatgctgcctgtgcccaaagcccccttccacggacttctaagattaggagcaaactcaggggtaggggctgggggtgcaggggaggggattctgagccacctgtccgcaagcaatagtcctattttgggctggtggcttctgagaggtgactcattgtggactcaggatgaccaagacaaaggtcgacgcggccgcgaattcccgggtcgacgagctcactagtcggcggcc

SEQ ID NO: 441 - DNA, 3369 bp, Homo sapiens
ggattcgcggccgcgtcggaccttccgcggaccgggcgacccagtgcacggccgccgcgtcactctcggtcccgctgaccccgcgccgagccccggcggctctggccgcggccgcactcagcgccacgcgtcgaaagcgcaggccccgaggacccgccgcactgacagtatgagccgcacagcctacacggtgggagccctgcttctcctcttggggaccctgctgccggctgctgaagggaaaaagaaagggtcccaaggtgccatccccccgccagacaaggcccagcacaatgactcagagcagactcagtcgccccagcagcctggctccaggaaccgggggcggggccaagggcggggcactgccatgcccggggaggaggtgctggagtccagccaagaggccctgcatgtgacggagcgcaaatacctgaagcgagactggtgcaaaacccagccgcttaagcagaccatccacgaggaaggctgcaacagtcgcaccatcatcaaccgcttctgttacggccagtgcaactctttctacatccccaggcacatccggaaggaggaaggttcctttcagtcctgctccttctgcaagcccaagaaattcactaccatgatggtcacactcaactgccctgaactacagccacctaccaagaagaagagagtcacacgtgtgaagcagtgtcgttgcatatccatcgatttggattaagccaaatccaggtgcacccagcatgtcctaggaatgcagmcccaggaagtcccagacctaaaacaaccagattcttacttggcttaaacctagaggccagaagaacccccagctgcctcctggcaggagcctgcttgtgcgtagttcgtgtgcatgagtgtggatgggtgcctgtgggtgtttttagacaccagagaaaacacagtctctgctagagagcactycctattttgtaaacmtatctgctttaatggggatgtaccagaaacccacctcaccccggctcacatctaaaggggcggggccgtggtctggttctgactttgtgtttttgtgccctcctggggaccagaatctcctttcggaatgaatgttcatggaagaggctcctctgagggcaagagacctgttttagtgctgcattcgacatggaaaagtccttttaacctgtgcttgcatcctcctttcctcctcctcctcacaatccatctcttcttaagttgayagtgactatgtcagtctaatctcttgtttgccarggttcctaaattaattcacttaaccatgatgcaaatgtttttcattttgtgaagaccctccagactctgggagaggctggtgtgggcaaggacaagcaggatagtggagtgagaaagggagggtggagggtgaggccaaatcaggtccagcaaaagtcagtagggacattgcagaagcttgaaaggccaataccagaacacaggctgatgcttctgagaaagtcttttcctagtatttaacagaacccaagtgaacagaggagaaatgagattgccagaaagtgattaactttggccgttgcaatctgctcaaacctaacaccaaactgaaaacataaatactgaccactcctatgttcggacccaagcaagttagctaaaccaaaccaactcctctgctttgtccctcaggtggaaaagagaggtagtttagaactctctgcataggggtgggaattaatcaaaaacckcagaggctgaaattcctaatacctttcctttatcgtggttatagtcagctcatttccattccactatttcccataatgcttctgagagccactaacttgattgataaagatcctgcctctgctgagtgtacctgacagtagtctaagatgagagagtttagggactactctgttttagcaagagatattttgggggtctttttgttttaactattgtcaggagattgggctaaagagaagacgacgagagtaaggaaataaagggaattgcctctggctagagagtagttaggtgttaatacctggtagagatgtaagggatatgacctccctttctttatgtgctcactgaggatctgaggggaccctgttaggagagcatagcatcatgatgtattagctgttcatctgctactggttggatggacataactattgtaactattcagtatttactggtaggcactgtcctctgattaaacttggcctactggcaatggctacttaggattgatctaagggccaaagtgcagggtgggtgaactttattgtactttggatttggttaacctgttttcttcaagcctgaggttttatatacaaactccctgaatactctttttgccttgtatcttctcagcctcctagccaagtcctatgtaatatggaaaacaaacactgcagacttgagattcagttgccgatcaaggctctggcattcagagaacccttgcaactcgagaagctgtttttatttcgtttttgttttgatccagtgctctcccatctaacaactaaacaggagccatttcaaggcgggagatattttaaacacccaaaatgttgggtctgattttcaaacttttaaactcactactgatgattctcacgctaggcgaatttgtccaaacacatagtgtgtgtgttttgtatacactgtatgaccccaccccaaatctttgtattgtccacattctccaacaataaagcacagagtggatttaattaagcacacaaatgctaaggcagaattttgagggtgggagagaagaaaagggaaagaagctgaaaatgtaaaaccacaccagggaggaaaaatgacattcagaaccagcaaacactgaatttctcttgttgttttaactctgccacaagaatgcaatttcgttaayggagatgacttaagttggcagcagtaatcttcttttaggagcttgtaccacagtcttgcacataagtgcagatttggctcaagtaaagagaatttcctcaacactaacttcactgggataatcagcagcgtaactaccctaaaagcatatcactagccaaagagggaaatatctgttcttcttactgtgcctatattaagactagtacaaatgtggtgtgtcttccaactttcattgaaaatgccatatctataccatattttattcgagtcactgatgatgtaatgatatattttttcattattatagtagaatatttttatggcaagatatttgtggtcttgatcatacctattaaaataatgccaaacaccaaatatgaattttatgatgtacactttgtgcttggcattaaaagaaaaaaacacaaaaaaaaaaaaaaaaagggcggccgctgcgcgatc

SEQ ID NO: 442 - DNA, 558 bp, Homo sapiens
  misc_feature (27)..(27): n equals a,t,g, or c
  misc_feature (39)..(39): n equals a,t,g, or c
cgggaccggataacaaatttcaccccnggaaacaggctntgccccactaggcttttggcaaaaaagctattttaggttgccactttaggaggtacgcctggcaggtaccgggtccggaaattcgcggccgcgtccgactcatgactgtgttggcactttaaaaatattgatatcccacaataaacagggttatcattgatataatttcccacatattttactataaataatcgagtaacaacctgtcttgtaccattctttacagaaaggcttttctcaatgcgttagtcagggtttcttcccggggagaaaatttataatccttaatgaggccagtactcagaaggacatttctgcttactcttttctctgtaattgccctcactaaaataaagcatgacttttttatcatgtgttcacacatgcagtgcatccctagagtttttctgaagcatgaattcaataacatataattagacctgattctgagaagattttctcttcttcgtcgacgcggccgcgaatcccgggtcgacgagctcactagtcggcggccgc

SEQ ID NO: 443 - DNA, 2499 bp, Homo sapiens
caccagcaccccgcccagagcagtgccgctgcccaaatcctcgcaggcagctcatcaacgcaattgcaactccggctggagccccggacctgcaagcctgggtgtccgtgggtccgtctgcccagccatctgctggtggcacctctccctcctgccgcctccctcggtgaaccccaccttgcagaagtgcagctcgcccggagcagcccaggagctcagcatgcgtcccccaggcttcaggaacttcttgctgctggcgtcctcccttctctttgctgggttgtcagctgttcctcaaagcttctcgccatctctgaggagctggccgggcgccgcctgcaggctgtcccgggccgagtcggagcgacgctgccgcgcacctgggcagcccccgggggccgcgctgtgccacggccggggccgctgcgactgcggcgtctgcatctgccacgtgactgagccgggcatgttcttcgggcccctgtgtgagtgccatgagtgggtgtgcgagacctacgacgggagcacctgtgcaggccatggtaagtgtgactgtggcaagtgcaagtgtgaccagggatggtatggggatgcttgccagtacccaactaactgtgacttgacaaagaagaaaagtaaccaaatgtgcaagaattcacaagacatcatctgctctaatgcaggtacatgtcactgtggcaggtgtaagtgtgataattcagatggaagtggacttgtgtatggtaaattttgtgagtgtgacgatagagaatgcatagacgatgaaacagaagaaatatgtggaggccatgggaagtgttactgtggaaactgctactgcaaggctggttggcatggagataaatgtgaattccagtgcgatatcaccccctgggaaagcaagcgaagatgcacgtctccagatggcaaaatctgcagtaacagagggacttgtgtatgtggtgaatgtacctgtcacgatgttgatccgactggggactggggagatattcatggggacacctgtgaatgtgatgagagggactgtagagctgtctatgaccgatattctgatgacttctgttcaggtcatggacagtgtaattgcggaagatgtgactgcaaagcaggctggtatgggaagaagtgtgagcacccacagtcctgcacgctgtcagctgaggagagcatcaggaagtgccagggaagctcggatctgccttgctctgggaggggtaaatgtgaatgtggcaaatgcacctgctatcctccaggagatcgccgggtgtatggcaagacttgtgagtgtgatgatcgccgctgtgaagacctcgatggtgtggtctgtggaggccacggcacatgttcctgtggtcgctgtgtttgtgagagaggatggtttggaaagctctgccaacatccgcggaagtgtaacatgacggaagaacaaagcaagaatctgtgtgaatcagcagatggcatattgtgctcggggaagggttcttgtcattgtgggaagtgcatttgttctgctgaagagtggtatatttctggggagttctgtgactgtgatgacagagactgcgacaaacatgatggtctcatttgtacagggaatggaatatgtagctgtggaaactgtgaatgctgggatggatggaatggaaatgcatgtgaaatctggcttggctcagaatatccttaacaattacatgagagaggtctggattcttattttttctgggccattagaacatataaatgcgaaggaaaccatgtatattcaccactaggacaggttaaaaagaccattgtatgtttttctatttctgaattacgaatgaaatccgagtacctattagaaatgagttatgcaaatttagatgcaaataacattagaaaaaaaagattcttccataattaacataagtggttcctaacgagagcaatttttccacccaaaagtcatttggcaacatctacagacaattttgattgtcacactgggtcgggtaggaaggtatgctgcagacatttggtgggtagaggccagggatgctgctgagcatcccgcagtgtacaggacagcccccaaacaaggaattatccagccccaaatgccaatagggctcagactgagaaacattgagttatatggctattagaaatccacattcttacacaagaaagaccatattagaatctaaggaaaacatgcatattcacattaattaatcgatcagatttttccagaattccgtatcagtcaccattttaatatggggacaatgaagacaagcacacaggaggtagaatatcagagtggggctggatcaagggcaaaaactggtcattaagtcatctgacattaaatcatttagccactaagttatttgtgtactctcactttaaactcaccaaagaagattctcttaaagaaattatgaaaaatgtacaatttaacattttaaataaatagtgacagaagttgtttaaaaa

SEQ ID NO: 444 - DNA, 1623 bp, Homo sapiens
ggcacgagctaagaagggggagtcctgaacttgtctgaagcccttgtccgtaagccttgaactacgttcttaaatctatgaagtcgagggacctttcgctgcttttgtagggacttctttccttgcttcagcaacatgaggcttttcttgtggaacgcggtcttgactctgttcgtcacttctttgattggggctttgatccctgaaccagaagtgaaaattgaagttctccagaagccattcatctgccatcgcaagaccaaaggaggggatttgatgttggtccactatgaaggctacttagaaaaggacggctccttatttcactccactcacaaacataacaatggtcagcccatttggtttaccctgggcatcctggaggctctcaaaggttgggaccagggcttgaaaggaatgtgtgtaggagagaagagaaagctcatcattcctcctgctctgggctatggaaaagaaggaaaaggtaaaattcccccagaaagtacactgatatttaatattgatctcctggagattcgaaatggaccaagatcccatgaatcattccaagaaatggatcttaatgatgactggaaactctctaaagatgaggttaaagcatatttaaagaaggagtttgaaaaacatggtgcggtggtgaatgaaagtcatcatgatgctttggtggaggatatttttgataaagaagatgaagacaaagatgggtttatatctgccagagaatttacatataaacacgatgagttatagagatacatctacccttttaatatagcactcatctttcaagagagggcagtcatctttaaagaacattttatttttatacaatgttctttcttgctttgttttttatttttatatattttttctgactcctatttaaagaaccccttaggtttctaagtacccatttctttctgataagttattgggaagaaaaagctaattggtctttgaatagaagacttctggacaatttttcactttcacagatatgaagctttgttttactttctcacttataaatttaaaatgttgcaactgggaatataccacgacatgagaccaggttatagcacaaattagcaccctatatttctgcttccctctattttctccaagttagaggtcaacatttgaaaagccttttgcaatagcccaaggcttgctattttcatgttataatgaaatagtttatgtgtaactggctctgagtctctgcttgaggaccagaggaaaatggttgttggacctgacttgttaatggctactgctttactaaggagatgtgcaatgctgaagttagaaacaaggttaatagccaggcatggtggctcatgcctgtaatcccagcactttgggaggctgaggcgggcggatcacctgaggttgggagttcgagaccagcctgaccaacacggagaaaccctatctctactaaaaatacaaaagtagccgggcgtggtgatgcgtgcctgtaatcccagctacccaggaaggctgaggcggcagaatcacttgaacccggaggcggaggttgcggtaagccgagatcacctccagcctggacactctgtctcgaaaaaaaaaaaaaaaaaa

SEQ ID NO: 445 - DNA, 2214 bp, Homo sapiens
gcagtcgcagcatgctttccgaggaagccggtgttgccgagattgccaaaatgctttggagtttttaactgaatctaagaaaagtccaaaatagatttgagactgtaaaaacagaaactgcagcaagggggattcagtgccaatgcatcaacaaaaaagacaaccagagttagtggaaggaaatcttcctgttttcgtgttccccacggagctcatattttatgcagatgatcagtcaacacataagcaagtgttgacactgtacaatccctatgagtttgccttaaagttcaaagttttgtgtactactccaaataagtatgttgtcgttgatgctgcaggtgcagtaaagcctcagtgttgtgtggatattgtgattcgtcatcgagatgttcgatcctgtcactatggtgtaatagacaaattccgtctccaagtttccgagcaaagccaaaggaaggctttggggaagaaaagaggttgttgctactcttctcccatcagcaaaagaacaacaaaaggaagaagaggaaaaaagattaaaggracatttaackgaaaktttattttttgagcagtcgtttcaaccaggtcttatcacaatggccatacttagaacatgagcaaggatttcaattgacttctgaagtaaatctgtcttgaaaatatgaatgtggactgccttttatctctatttcactccattaacatgcaacaaactattgaatgatttcaaataattgcaaatgtataatatatattttaaattataatttaatttgaaggactgcagaacattattttacagacagcaaggatgcttctgagtgacacctaggaaattatttgaagaaattctttttatatctayacctgttgtgtaagaaactttaaaacattkgttattttctcacctttttttctaattcactttgattgctaggggtcatgtatgcttcgaagttacaggactaaaagagcaaactgaccggcctaaaactaaaatgacatttattccctagctacaaacatcagcgttattatgttaattataccttgccctctatcattataaatggttgccatggtgtttctaaaaataagtgttttaccattaatgtgtagagggcaaacaaagcataaagtactaagggatcatgcttatcctagggtctcacagaagagaggacatatttaattaatcttgtgaattacagaacaggttgtggtccagacaccaagaatcataggggtttttttttaaaaaacctaatagaagtagggtgacctctctctttggtctaagagttctaaaggaaggtaggcatctgtttaattagttggttcaccctggctttacctctggttaatgctttgtgttaataggaaggaaaaatcactttatcttttcttccaagcccctccctgcctgacttacccagactgggattaccagataccaggtgatttatgtggagatgatttttcacctttaaactctaagccaagtgtaagaaactcttgatagctatgtctattttatatcagtcactgagacttttttttaagtttttatttattattaagacaactttgccaaaaaagtcccctaagcacaactatttacatttctttatagcctcttctgatctctaacacatatgcagttttaactgttattttcatagtaactgatcttttgtctaaggatttttacctgaaagcacaatgtattgagtctcttgaaaatcatctttcagatctttttacagaatgaacttatgcactgctactgtagtattctcaaggaatatatgtaaacacaaatgtatgcctgaggttggtttttgcagaaaacagtctctgcttctaaaaacttctatgtctagtcttccataggaaatcctcactgtttaaccatgtgaggagcctaagtcattaaacggatcatgtctgtacattgtgtaatgaatgaaaagcacataaatgtaatctactttgaactttgtaaaaatgatgtgtggaggctattcttgtttctccatctcaagtcctgtgtgtgcacgtgtgtgcaagtgcacatgtgtgtgtgtaataacacattgtaaagaacagaaattactttaaaaaataaacagaaatggagacctgaaaaaaaaaaaaaaaaaaaaaaaaaaaaaaaaaaaaaactcgagggggggtcccgtacccaat

SEQ ID NO: 446 - DNA, 590 bp, Homo sapiens
attggatcgttttcctactgggacgtggccccagcttctccgtgactctgcagcacacctgttcccaccctgttctgccccaggattgtgctggaagtgctggttgtgctccgaagcatcagcgaacagtgccgccgtgtgtccagccaggtcaccgttgcctcagagctgagacacaggcagtgggtggaaaggacgctgcggtctcgccagcggcagaactacctgcgtatgtggagtagtatcagactactgtcccctgtgctcagcctgatactgttactcattgcgctggagttggtcaacattcatgctgtttgtgggaagaatgcgcatgagtatcagcagtacctaaagtttgtaaagtcgatcttgcagtacacggagaacctggtggcttacaccagttacgaaaagaacaagtggaatgaaactatcaatcttacrcatacagctttgttgaaaatgtggacttttagtgagaagaaacaaatgttaatacatttagccaagaaatccacaagtaaagtactcttatgaaaacttgtaaaaaaaaaraaararrraaaaaaaaamctcgagggggggcc

SEQ ID NO: 447 - DNA, 2527 bp, Homo sapiens
ctcttgctaccttcccggcgcagagaaccccggctgctcagcgcgctccggggtcatggagatccccgggagcctgtgcaagaaagtcaagctgagcaataacgcgcagaactggggaatgcagagagcaaccaatgtcacctaccaagcccatcatgtcagcaggaacaagagaggtcaggtggtggggaccagaggtggctttcgtggttgcacagtttggctaacaggcttgtctggagcgggaaagactactgtgagcatggccttggaggagtacctggtttgtcatggtattccatgctacactctggatggtgacaatattcgtcaaggtctcaataaaaatcttggctttagtcctgaagacagagaagagaatgttcgacgcatcgcagaagttgctaaactgtttgcagatgctggcttagtgtgcatcacaagtttcatatcaccttacactcaggatcgcaacaatgcaaggcaaattcatgaaggtgcaagtttaccgttttttgaagtatttgttgatgctcctctgcatgtttgtgaacagagggatgtcaaaggactctacaaaaaagcccgggcaggagaaattaaaggtttcactgggatcgattctgaatatgaaaagccagaggcccctgagttggtgctgaaaacagactcctgtgatgtaaatgactgtgtccagcaagttgtggaacttctacaggaacgggatattgtacctgtggatgcatcttatgaagtaaaagaactatatgtgccagaaaataaacttcatttggcaaaaacagatgcggaaacattaccagcactgaaaattaataaagtggatatgcagtgggtgcaggttttggcagaaggttgggcaaccccattgaatggctttatgagagagagggagtacttgcagtgccttcattttgattgtcttctggatggaggtgtcattaacttgtcagtacctatagttctgactgcgactcatgaagataaagagaggctggacggctgtacagcatttgctctgatgtatgagggccgccgtgtggccattcttcgcaatccagagttttttgagcacaggaaagaggagcgctgtgccagacagtggggaacgacatgcaagaaccacccctatattaagatggtgatggaacaaggagattggctgattggaggagatcttcaagtcttggatcgagtttattggaatgatggtcttgatcagtatcgtcttactcctactgagctaaagcagaaatttaaagatatgaatgctgatgctgtctttgcatttcaactacgcaacccagtgcacaatggacatgccctgttaatgcaggatacccataagcaacttctagagaggggctaccggcgccctgtcctcctcctccaccctctgggtggctggacaaaggatgacgatgttcctttgatgtggcgtatgaagcagcatgctgcagtgttggaggaaggagttctgaatcctgagacgacagtggtggccatcttcccatctcccatgatgtatgctggaccaactgaggtccagtggcattgcagagcacggatggttgcaggagccaacttttacattgttggacgagaccctgctggcatgcctcatccagaaacagggaaggatctttatgagccaagtcatggtgccaaagtgctgacgatggcccctggtttaatcactttggaaatagttccctttcgagttgcagcttacaacaagaaaaagaagcgtatggactactatgactctgaacaccatgaagactttgaatttatttcaggaacacgaatgcgcaaacttgctcgagaaggccagaaaccacctgaaggtttcatggctcccaaggcttggaccgtgctgacagaatactacaaatccttggagaaagcttaggctgttaacccagtcactccacctttgacacattactagtaacaagaggggaccacatagtctctgttggcatttctttgtggtgtctgtctggacatgcttcctaaaaacagaccattttccttaacttgcatcagttttggtctgccttatgagttctgttttgaacaagtgtaacacactgatggttttaatgtatcttttccacttattatagttatattcctacaatacaattttaaaattgtctttttatattatatttatgcttctgtgtcatgattttttcaagctgttatattagttgtaaccagtagtattcacattaaatcttgctttttttccccttaaaaaaagaaaaaaattaccaaacaataaacttggctagaccttgttttgaggattttacaagacctttgtagcgattagattttttttctacattgaaaatagaaactgcttcctttcttctttccagtcagctattggtctttccagctgttataatctaaagtattcttatgatctgtgtaagctctgaatgaacttctttactcaataaaattaattttttggcttcttaaaaaaaaaaaaaaa

SEQ ID NO: 448 - DNA, 4712 bp, Homo sapiens
catggtacgcctgcaggtaccggtccggaattcccgggtcgacccacgcgtccgcccaygcgtccggcggctccgagccaggggctattgcaaagccagggtgcgctaccggacggagaggggagagccctgagcagagtgagcaacatcgcagccaaggcggaggccgaagaggggcgccaggcaccaatctccgcgttgcctcagccccggaggcgccccagagcgcttcttgtcccagcagagccactctgcmtgcgcctgcctctcagtgtmtccaactttgcgctggaagaaaaacttcccgcgcgccggcagaactgcagcgcctcctcttagtgactccgggagcttcggctgtagcckgctmtgcgcgcccttccaacgaataatagaaattgttaattttaacaatccagagcaggccaacgaggctktgctctcccgacccgaactaaagctccctcgctccgtgcgctgctacgagcggtgtctcctggggctccaatgcagcgagctgtgcccgaggggttcggaaggcgcaagctgggcagcgacatggggaacgcggagcgggctccggggtctcggagctttgggcccgtacccacgctgctgctgctcsccgcggcgctactgsccgtgtcggacgcactcgggcgcccctccgaggaggacgaggagctagtggtgccggagctggagcgcgccccgggacacgggaccacgcgcctccgcctgcacgcctttgaccagcagctggatctggagctgcggcccgacagcagctttttggcgcccggcttcacgctccagaacgtggggcgcaaatccgggtccgagacgccgcttccggaaaccgacctggcgcactgcttctactccggcaccgtgaatggcgatcccagctcggctgccgccctcagcctctgcgagggcgtgcgcggcgccttctacctgctgggggaggcgtatttcatccagccgctgcccgccgccagcgagcgcctckccaccgccgccccaggggagaagccgccggcaccactacagttccacctcctgcggcggaatcggcagggcgacgtaggcggcacgtgcggggtcgtggacgacgagccccggccgactgggaaagcggagaccgaagacgaggacgaagggactgagggcgaggacgaagggcctcagtggtcgccgcaggacccggcactgcaaggcgtaggacagcccacaggaactggaagcataagaaagaagcgatttgtgtccagtcaccgctatgtggaaaccatgcttgtggcagaccagtcgatggcagaattccacggcagtggtctaaagcattaccttctcacgttgttttcggtggcagccagattgtwcaaacaccccagsattcgtaattcagttagcctggtggtggtgaagatcttggtcatccacgatgaacagaaggggccggaagtgacctccaatgctgccctcactctgcggaacttttgcaactggcagaagcagcacaacccacccagtgaccgggatgcagagcactatgacacagcaattcttttcaccagacaggacttgtgtgggtcccagacatgtgatactcttgggatggctgatgttggaactgtgtgtgatccgagcagaagctgctccgtcatagaagatgatggtttacaagctgccttcaccacagcccatgaattaggccacgtgtttaacatgccacatgatgatgcaaagcagtgtgccagccttaatggtgtgaaccaggattcccacatgatggcgtcaatgctttccaacctggaccacagccagccttggtctccttgcagtgcctacatgattacatcatttctggataatggtcatggggaatgtttgatggacaagcctcagaatcccatacagctcccaggcgatctccctggcacctcgtacgatgccaaccggcagtgccagtttacatttggggaggactccaaacactgccctgatgcagccagcacatgtagcaccttgtggtgtaccggcacctctggtggggtgctggtgtgtcaaaccaaacacttcccgtgggcggatggcaccagctgtggagaagggaaatggtgtatcaacggcaagtgtgtgmacaaaaccgacagaaagcattttgatacgccttttcatggaagctggggaatgtgggggccttggggagactgttcgagaacgtgcggtggaggagtccagtacacgatgagggaatgtgacaacccagtcccaaagaatggagggaagtactgtgaaggcaaacgagtgcgctacagatcctgtaaccttgaggactgtccagacaataatggaaaaacctttagagaggaacaatgtgaagcacacaacgagttttcaaaagcttcctttgggagtgggcctgcggtggaatggattcccaagtacgctggcgtctcaccaaaggacaggtgcaagctcatctgccaagccaaaggcattggctacttcttcgttttgcagcccaaggttgtagatggtactccatgtagcccagattccacctctgtctgtgtgcaaggacagtgtgtaaaagctggttgtgatcgcatcatagactccaaaaagaagtttgataaatgtggtgtttgcgggggaaatggatctacttgtaaaaaaatatcaggatcagttactagtgcaaaacctggatatcatgatatcatcacaattccaactggagccaccaacatcgaagtgaaacagcggaaccagaggggatccaggaacaatggcagctttcttgccatcaaagctgctgatggcacatatattcttaatggtgactacactttgtccaccttagagcaagacattatgtacaaaggtgttgtcttgaggtacagcggctcctctgcggcattggaaagaattcgcagctttagccctctcaaagagcccttgaccatccaggttcttactgtgggcaatgcccttcgacctaaaattaaatacacctacttcgtaaagaagaagaaggaatctttcaatgctatccccactttttcagcatgggtcattgaagagtggggcgaatgttctaagtcatgtgaattgggttggcagagaagactggtagaatgccgagacattaatggacagcctgcttccgagtgtgcaaaggaagtgaagccagccagcaccagaccttgtgcagaccatccctgcccccagtggcagctgggggagtggtcatcatgttctaagacctgtgggaagggttacaaaaaaagaagcttgaagtgtctgtcccatgatggaggggtgttatctcatgagagctgtgatcctttaaagaaacctaaacatttcatagacttttgcacaatggcagaatgcagttaagtggtttaagtggtgttagctttgagggcaaggcaaagtgaggaagggctggtgcagggaaagcaagaaggctggagggatccagcgtatcttgccagtaaccagtgaggtgtatcagtaaggtgggattatgggggtagatagaaaaggagttgaatcatcagagtaaactgccagttgcaaatttgataggatagttagtgaggattattaacctctgagcagtgatatagcataataaagccccgggcattattattattatttcttttgttacatctattacaagtttagaaaaaacaaagcaattgtcaaaaaaagttagaactattacaacccctgtttcctggtacttatcaaatacttagtatcatgggggttgggaaatgaaaagtaggagaaaagtgagattttactaagacctgttttactttacctcactaacaatggggggagaaaggagtacaaataggatctttgaccagcactgtttatggctgctatggtttcagagaatgtttatacattatttctaccgagaattaaaacttcagattgttcaacatgagagaaaggctcagcaacgtgaaataacgcaaatggcttcctctttccttttttggaccatctcagtctttatttgtgtaattcattttgaggaaaaaacaactccatgtatttattcaagtgcattaaagtctacaatggaaaaaaagcagtgaagcattagatgctggtaaaagctagaggagacacaatgagcttagtacctccaacttcctttctttcctaccatgtaaccctgctttgggaatatggatgtaaagaagtaacttgtgtctcatgaaaatcagtacaatcacacaaggaggatgaaacgccggaacaaaaatgaggtgtgtagaacagggtcccacaggtttggggacattgagatcacttgtcttgtggtggggaggctgctgaggggtagcaggtccatctccagcagctggtccaacagtcgtatcctggtgaatgtctgttcagctcttctgtgagaatatgattttttccatatgtatatagtaaaatatgttactataaattacatgtactttataagtattggtttgggtgttccttccaagaaggactatagttagtaataaatgcctataataacatatttatttttatacatttatttctaatgaaaaaaacttttaaattatatcgcttttgtggaagtgcatataaaatagagtatttatacaatatatgttactagaaataaaagaacacttttggaaaaaaaaaaa

SEQ ID NO: 449 - DNA, 1051 bp, Homo sapiens
ggtttttcccgggatacatctgtgttgagtcactttgcattcaacagtgcctcgccaccaaaatcatacataagaggaaaactaggactggaagaatatgctgtcttttacccaccaaatggtgttatcccttttcatggattttcaatgtatgttgcaccactttgttttctataccatgaaccttccaaattgtatcagatattccgtgagatgtatgtgcgttttttcttcagactccattccatctcttctcatccttctggtattgtgtcactctgtctgctgtttgaaactcttcttcaaacttatcttccccaactcttttatcatctacgagaaattggggctcaaccacttcgcatatcatttaagtggatggttcgagctttctctggatacttagctacagatcagctcttgcttttatgggatagaatcctaggatacaactctctggaaattcttgctgtgctggcagctgccgtgtttgctttccgagcagtgaacctgatggaggtgacatcactggctgcagctgaaaatctagctgcccacagtgaacagttctgcactgctcctctattccctgagctttacagagtccagatccctgtactgctgaactcaggcagaaagaagagtgcagtttattggactccaatctcattcaacagaacaaagaagttgaggttgcaaggaagaacctataatgatgggtcatggaatataacctagaaaagaagagaaataaaagagactgtgtttcaccatgttgcccaggctggtctcgaacttctgagctcaagcaatccaccctcctcagcctccagaagtgctgggattacaggcatgagacaccaagtccagccataaggttcttattctatatatacatgaaatgatatcacttgaaggtagactgtgataagttaaatacgtatattttttaaatcttcaaacaaccactaaaataaaagaacaaagagttacaactaaaaaaaaaaaaaaaaaaactacgtagggggggacggcgtacccaattacgccc

SEQ ID NO: 450 - DNA, 707 bp, Homo sapiens
  misc_feature (562)..(562): n equals a,t,g, or c
  misc_feature (570)..(570): n equals a,t,g, or c
gggtcgacccacgcgtccgcccacgcgtccggtttctacaacccttaggaacatcagaatcatgtgtgtgtgggtgcttattaaataaamsagttcctggagctcactcccagtgactgccagtctgatgattaggggctcagctaggacctaggtttgcgaaagctcccagctgatctcatgcagccagcctggctctggctctggckctgggagctgggttgggaactagtctttggtgctattctgctgawacttcaagatgggctctttgactccgtcttgtattgtcakcacttgtattcaggtctgttcttcccctggattgtaaactccttgatgtctgggtcatctcagctcatgagctgagcttwcagtgggtgctcagtggaacagatgctgaatggagtcaggctgtagggaggccagcgtgtgttggtaagtgagagacaaaaatcattttaaaaagaatctttttgcccttcagttgtgtttgccatgagttaatgtgatttactctagtggaagccagtgcagcttaagtggaggtcttgccctgaantggagccnggttatggatcagcagagctgccaaaagcgttttgggggaaatgtttctgtgtcaccctcagttgattgaactcaagttttcactcccgtttaacaccacgtgggggccattctgacttctgcggagtgggtatgat

SEQ ID NO: 451 - DNA, 1945 bp, Homo sapiens
gagcttgtaagaaggctcatgccattgaccctcttaattctctcctgtttggcggagctgacaatggcggaggctgaaggcaatgcaagctgcacagtcagtctagggggtgccaatatggcagagacccacaaagccatgatcctgcaactcaatcccagtgagaactgcacctggacaatagaaagaccagaaaacaaaagcatcagaattatcttttcctatgtccagcttgatccagatggaagctgtgaaagtgaaaacattaaagtctttgacggaacctccagcaatgggcctctgctagggcaagtctgcagtaaaaacgactatgttcctgtatttgaatcatcatccagtacattgacgtttcaaatagttactgactcagcaagaattcaaagaactgtctttgtcttctactacttcttctctcctaacatctctattccaaactgtggcggttacctggataccttggaaggatccttcaccagccccaattacccaaagccgcatcctgagctggcttattgtgtgtggcacatacaagtggagaaagattacaagataaaactaaacttcaaagagattttcctagaaatagacaaacagtgcaaatttgattttcttgccatctatgatggcccctccaccaactctggcctgattggacaagtctgtggccgtgtgactcccaccttcgaatcgtcatcaaactctctgactgtcgtgttgtctacagattatgccaattcttaccggggattttctgcttcctacacctcaatttatgcagaaaacatcaacactacatctttaacttgctcttctgacaggatgagagttattataagcaaatcctacctagaggcttttaactctaatgggaataacttgcaactaaaagacccaacttgcagaccaaaattatcaaatgttgtggaattttctgtccctcttaatggatgtggtacaatcagaaaggtagaagatcagtcaattacttacaccaatataatcaccttttctgcatcctcaacttctgaagtgatcacccgtcagaaacaactccagattattgtgaagtgtgaaatgggacataattctacagtggagataatatacataacagaagatgatgtaatacaaagtcaaaatgcactgggcaaatataacaccagcatggctctttttgaatccaattcatttgaaaagactatacttgaatcaccatattatgtggatttgaaccaaactctttttgttcaagttagtctgcacacctcagatccaaatttggtggtgtttcttgatacctgtagagcctctcccacctctgactttgcatctccaacctacgacctaatcaagagtggatgtagtcgagatgaaacttgtaaggtgtatcccttatttggacactatgggagattccagtttaatgcctttaaattcttgagaagtatgagctctgtgtatctgcagtgtaaagttttgatatgtgatagcagtgaccaccagtctcgctgcaatcaaggttgtgtctccagaagcaaacgagacatttcttcatataaatggaaaacagattccatcataggacccattcgtctgaaaagggatcgaagtgcaagtggcaattcaggatttcagcatgaaacacatgcggaagaaactccaaaccagcctttcaacagtgtgcatctgttttccttcatggttctagctctgaatgtggtgactgtagcgacaatcacagtgaggcattttgtaaatcaacgggcagactacaaataccagaagctgcagaactattaactaacaggtccaaccctaagtgagacatgtttctccaggatgccaaaggaaatgctacctcgtggctacacatattatgaataaatgaggaagggcctgaaagtgacacacaggcctgcatgtc

SEQ ID NO: 452 - DNA, 599 bp, Homo sapiens
gaattcggcacgagcgtccacgcagccgccggccggccagcacccagggccctgcatgccaggtcgttggaggtggcagcgagacatgcacccggcccggaagctcctcagcctcctcttcctcatcctgatgggcactgaactcactcaagactccgctgcccccgactccctgctgagaagttcaaagggcagcacgagggggtctttggctgctattgtcatctggagggggaagagtgagagccggatagccaagaccccaggcattttcagaggtggcgggaccttagtcctacccccaacacacacccctgagtggctcatcctccctttgggcataacgctgcccttgggggctccagaaacaggcggtggggattgtgccgctgagacctggaagggcagccagcgtgccggccagctgtgtgcattgctggcttaatatgcagggcttggggggctgtggccacatgcccggcaggaggtgagtgaggagccctgtggcgtgctggtgtggggatcgtgggcatttcaaacgggcttgtcgtaccctgaacaatgtatcaatagagaaaaaaaaaaaaaaaaaaactcga

SEQ ID NO: 453 - DNA, 978 bp, Homo sapiens
ggcacgagcacttaatctcaggtgaacgcatcacttgccaaactgttggaatgctatttgtgttttgttgcactgtttttttcgtttgtttgtttgtttatttggttggctttttggagagggaaatttggaaacgggacatacacaaaagttacacacccacattccctttttatcatgacatacaagaagaaactagcagagctaagaatggagtgaagaaaggcagtatggcaggcaccagcaaagagttgagggctgttgctcttaaaaattattttttttattattattttgaaagtatggaagttttccattcactggggaaaggagggaaaagtgcatttatttttatacagagttacttaattacctccaaaacacatatgttggaaatcgcttttgctggtgcaaagtatattaatgagcaggaatacatacattgaggttatgaatagagagctcaatttgtacctttgctgtcttgctcaagcttggtatggcatgaaaactcgactttattccaaaagtaacttcaaaatttaaaatactagaacgtttgctgcgataaatcttttggatttttgtgtttttctaatgagaatactgtttttcattacctaaagaacaatttgctaaacatgagaaatcactcactttgattatgtatagattacataggaagaacaatcacatcagtaagttatagtttatattaaaggtaattttctgttggctcataacaaatataccagcattcatgatagcatttcagcattttccaaggtaccaagtgtacttattttgttgttgttgttgttgttgtattttagaaggaattcagctctgatgtttttaaagaaaaccagcatctctgatgttgcaacatacgtgtaaaatgggtgttacatctatcctgccatttaaccccacagttaataaagtggctgaaaataataaaaaaaaaaaaaaaaaaaa

SEQ ID NO: 454 - DNA, 528 bp, Homo sapiens
ccacgcgtccgcacagactctcctggccccctgtccttttggaaagaagacagggatgaaatataatcaagcaattaaccacccccatcatcaccaagaacaacagtatcaacaagaagaacagggacaacaaaacccacggatgaaacattcctttctcagctcagatcttatctggtgcgttctctctctgctctgtcttggtgtgtggtttagagaaacatggacaacgctgtttggaagaacagggcttcccaggaatcaacaatgcccaagaaggaagggattgtagaaatagcttaaccctttcatttaccaacgtggaaattgaagcccagggaagggaagggaccggtcgtggaagggagagccatcagcagaaagagaccctgagatcttcgcctgggattcccaggaagtccagcccgagctgattcacagaataaatgcatgcaaaccttgctatcaataaattacacatgcacttacgtaaaacacataaaaaaaaaaaaaaaaaaaaaaaaaagg

SEQ ID NO: 455 - DNA, 625 bp, Homo sapiens
  misc_feature (6)..(6): n equals a,t,g, or c
  misc_feature (11)..(11): n equals a,t,g, or c
  misc_feature (43)..(43): n equals a,t,g, or c
  misc_feature (46)..(46): n equals a,t,g, or c
  misc_feature (68)..(68): n equals a,t,g, or c
ttaccntcacntaaggggaacaaaagctggagctccaccgcgntgncggccgctctagaactagtggntcccccgggctgcaggaattcggcacgagctcgtgccgaattcggcacgagcagcaacagcaacacaggtgtggagttgacagacaggtacattgaaccagagctgtgatttagacaagccaggaacctcatgtatgtccataatgctgctgacattcactcttcacttccccagcacattactgtcatatctcccagagaattatgtcataccttctctcttctcaaacctgcaacactggatctgctgtgttcactctcagttggtaacctgtttcgtatttcagagagacaatgtaagcactgagaagagaactcttgcacactccaacacctcatctgccacctctcaccatctgtctccttgtactactggagatggtctgccctcctcctggggaggccaaactcatccacttctgcactagattccgtcctcttttatcttccctacatcatgtgttttccttctatactcatcattccttttagcaataaatatctttaaaaaaaaaactcgagggggggcccggtacccaattcgccctatagtggag

SEQ ID NO: 456 - DNA, 597 bp, Homo sapiens
tggcggccgctctagaactagtggatcccccgggctgcaggaattcggcacgagcccggccgccatcttgggtcatcgatgagcctcgccctgtgcctggtcccgcttgtgagggaaggacattagaaaatgaattgatgtgttccttaaaggatgggcaggaaaacagatcctgttgtggatatttatttgaacgggwttacagatttgaaatgaagtcacaaagtgagcattaccaatgagaggaaaacagacgagaaaatcttgatggcttcacaagacatgcaacaaacaaaatggaatactgtgatgacatgaggcagccaagctggggaggagataaccacggggcagagggtcaggattctggccctgctgcctaaactgtgcgttcataaccaaatcatttcatatttctaaccctcaaaacaaagctgttgtaatatctgatctctacggttccttctgggcccaacattctccatatatccagccacactcatttttaatatttagttcccagatctgtactgtgacctttctacactgtagaataacattactcattttgttcaaaaaaaaaaaaaaaaaactcga

SEQ ID NO: 457 - DNA, 665 bp, Homo sapiens
ggcacgagaaactccagttaatgccatttattttgcttcttgtttgcttaacctccctgccttctaggggttataatgagaagaaactaacagacaatattcagtgtgagatttttcaagttctttatgaagaagccacagcatcctacaaggaagaaatcgtgcatcagctgcccagtaataaaccagaagagctagaaaataatgtagatcagatcttgaaatggattgagcagtggatcaaagatcataactcttgacttataaggctagctacttaataatcactcttgttgatatctctgccgacatcatagaaattgttcaagtgtcagtaacactttattaaaatcatgttgcagaaccagcaggtggatagtatataggtttatgcctgtgtttcttttctccatgagaaagctaaacatgaaatataatgaatatagtaattattaagggattgagacaaaaactgtgattttaatacttaaattgctaaagaataaataaatctgacaaaatgggtggatatcttttaagtttattacagaaaaaaatgcagatgatctcttaaaataaaactaaagataaagcaaaaaaaaaaaaaaaaaaaactcgtagggggggcyccggtacccaatcgccctatgagtgagtcgtattac

SEQ ID NO: 458 - DNA, 723 bp, Homo sapiens
  misc_feature (722)..(722): n equals a,t,g, or c
tattgtagttagaaccatctgacacatagcttttattccattggttttttgttatgtctttctttacaagaatttgaagtccatcaggccgggagttttgtttgttgtgtttgctgctatctcccagtgcctaaaattgcctggcatacagtaggcatttaataatctttgaatcagtgaaaaccagatggtggcttggcatttccacataggaatgagccaggtggaaatcatccaggatataagtagatcttgaagtgataaggaagggtcatcataatcatgtggggcccattttgccctttcttgtttcttttctctaggctcagcaacagcctcaccaaggactccatgaatatcaaagcccatatccacatgttgctagaggtgagagcagctcaccccactaccagactctgtgtttagggtggtgacctgaagaaggaagagagcgaaagaagggaaggaccatctttccctctaaactggagtcaagggagggaggtcagagcaagcctgggggcgtaacccagacccagtctttgttcaatctcttctgtcctctttttcaggggcttagagaactacaaggcctgcagaatttcccagagaagcctcaccattgacttcttccccccatcctcagacattaaagagcctgaatgcctttgaaaaaaaaaaaaaaaaaaaaaaaaaaaaaaaaaaaaaaaaaaaaaaaaaang

SEQ ID NO: 459 - DNA, 2466 bp, Homo sapiens
ggcacgagcaggggcttagatgctgctgcgccatcccttacctgtctgtttctgtttctccttctgtcccttcccagtctcagcactgagtctcttgcccattggcctggtgagggaaggagctgccagccccacccaacagctcaggttacagagagagtcactttcttccattactcacagagtaaacatcaaggaaggccactgattgattgacagtgtctgggtcagatgtctatccttaggccagtccctgtgaacaaggggatgggtgtctgcgtggaccagatctgaagcacaggcccatgcctggggccaggggtgggaactatggacctctctccccactgagaaccccagggagcaggtgaggtgaaattcctctaggggaagaggggcaaaattgacaagatagcagatgtctaccatactgctgtggggcctggtccctcccagaaggaaaaacatagtaacaatagagtgggtctcaccctccacctgggtctcaagtagggtgtggatgaggacaatggaaatgaaggaaaggttagaaggcctgtggtaccggttggtaaatagctcttcgtgctttctccatatggagtgagagtgcttggatgtgattccttcaaagtcaggtctaggagactcaggatgcctaatctagaggtaagaacattgtgaggaaagccagtgaattcagtcttgtgcatgctgactttgaagtacttttggaagagccaagtggaattatccacaggacaggaccaaatcttacctggttcttccccaggccgactagtccacaacaggaaataaaaagagttgccccgataccaagttgtactagtccattctcacactgctatggggaaatacctgagactgggtaatttataaagggaaaaggtttaattgactcacagttctagatggctggggaggcttcaggaaacttacaatcatggcagaaggcaccacttcacagggtggcgggagagagaatgagtgcccagcgaagggagaagctccttataaaaccatctgttctccttataaagatctcttaataaaaccgtcagagaactatctcattcactatcaggagaagagcatgggggaaccgcccccatgattcagtttactccacctggtcccgcccttgacatgtgggtgttattacaatttaaggtgagatttgggtggggacacagagccaaaccatatcacaaggctttctcctccttgctgggattgtacccatagcctctttctgagtcctctctcttttagcctctttatgcctgcagtgcatccttataccatttctagagtcatctttataaaacttatactctccgtatgactcataaatcctgtttttttttttgcacagtatattaagtataaatttgttaaagtctttaatggtctgcccccaagctacatttccattttgtatgtctttcagttcctttctactttgtatttggctgttgagttaactgaatttttgccattccattaacccatcccatgcttttcccacttctagatttcacttttcttgtaggctagaatgtcttgactgggatctgactggagataatgagaacaaaaactggttcaaagagccaggatgttgcataaaagtcctaagattgtatctaagcaggtaaaataaaaattttaggcaattacttaaatttgaaatgctcacatttattaataaggcatgtaacatctacatgagccatcatttgcttttttaattccacattgattaggagccaaaccttcagggcaggtatccggtagagcgccctggagaggccctggataggcacaggcgcctgtcagggggctcttcacatgctgtgtgctgctgctgggagaagagggggccagagactagggggcttctaagaagaggtggcatttctgcctcagtgttgaaggatgaataactttgacaggctggaaaaaggtgacatttcaggtagagcgtgtcacatggatgtaaataccaaaggtcaaggacatgggcttgagagatggtgagaaggatggaggtgactgtggcttgcattctatccgtatcactattaattaccttctaatgcctttggctctaggtggtggaacaagtaaagtaatggacaaatactttttctaccaatatttagtgaccaaatgcagagttatggagagggccagggacctcatgaaccatactctttctagtctagggacataactccaatgcctttcctgtcccagtaagaggccatggatttcaagaagccagacaatccattctttcagataatgataaaaaagaaaccatttattttatttctaagtatagaatgaaacatttatagttgcccaaattttggtaccttttaggagaaaaatacagatttttttgttgttaaaaataaacttaaaaaaaaaaaaaaaaaa

SEQ ID NO: 460 - DNA, 1739 bp, Homo sapiens
ggcacgagagatcctcaggatatctttagccaaaggaaaagctccgcattcccacctggggggaaagctggattgccatgggcacgaagtagtggtgcagagtccctggccatcctgaatatccagaatggtgtttctgaagttcttctgcatgagtttcttctgccacctgtgtcaaggctacttcgatggccccctctacccagagatgtccaatgggactctgcaccactacttcgtgcccgatggggactatgaggagaacgatgaccccgagaagtgccagctgctcttcagggtgagtgaccacaggcgctgctcccagggggaggggagccaggttggcagcctgctgagcctcaccctgcgggaggagttcaccgtgctgggccaccaggtggaggatgctgggcgcgtgctggagggcatcagcaaaagcatctcctacgacctagacggggaagagagctatggcaagtacctgcggcgggagtcccaccagatcggggatgcctactccaactcggacaaatccctcactgagctggagagcaagttcaagcagggccaggaacaggacagccggcaggagagcaggctcaacgaggactttctgggaatgctggtccacaccaggtccctgctgaaggagacactggacatctctgtggggctcagggacaaatacgagctgctggccctcaccattaggagccatgggacccgactaggtcggctgaaaaatgattatcttaaagtataggtggaaggatacaaatgctagaaagagggaatcaaatcagccccgttttggagggtgggggacagaagatggggctacatttcccccatacctactatttttttatatcccgatttgcactttgagaatacatctaaggtcatctttcaaaagagaaaaattggacacttgagtgactttgtttttagttttgtttttgtacattatttatgtgattgttatggaattgtcacctggaaagaacaattttaagcaatgtcatttctagatgggtttctaattctgcagagacacccgtttcagccacatctaaaagagcacagtttatgtggtgcggaattaaacttccccatcctgcagattatgtggaaatacccaaagataatagtgcatagctcctttcagcctctagccttcactcctgggctccaaaagctatcccagttgcctgtttttcaaatgaggttcaaggtgctgctttgcatgcctgccaacccatggaagttgtttcttacttcttttctctcttatttattaaccatggtctgagagttgtttttgttctatgtaacagtattgccacaaaactataggcaaatcgtgtttgcagggagatttctgatgcctctgtgggtgtgtgtaagttaaagtggccacatttaagaaggccaagctttgtagtggttgcacagtcacactgatatgctgatttgctctttctcattgtatgtctatgctttgtcatcagtgctatagtaaattacaaagaaataggtagattgtatgaacatacccacaaatgcctatgatttaggttaccaatgtattctttctcatttggggttttgcttctgtctgtctgtttattggaaacttgtacttcaagtagggggaatcctaattctaataactccttagctaagttttattattcaggcaataaacatgttttcatgtaaaaaaaaaaaaaaaaaaa

SEQ ID NO: 461 - DNA, 1139 bp, Homo sapiens
ggcacgaggtcactcctaatgtaggatgggacgattgccccaagctctgtcgtgagtggttgattgacggttttcttaagggaacaatgctgggaaagatgataggcgcccgccactgacccctcccgcctccctgcccctccagtaaactcccacacaaaatagcagtatgaggtgtggggaaataatcttggcctccgtcctgggtttacttttgactctgccacctacaagctgtcacctgaacaagtcctttccgttcctgtgtcttccctggtcacaagctctaagcctgaacccacactctgggaatgaagcagggtagcggcctctgcttcagcaactctgaggggtctaccttgggtggggagttggcctcatccagagggctgctggagggccaagacaaggctctggtggggaggtgtgctgagaggggattgcttatcccaccaccagcttttctgggggaggtggggaagtgatggttaaaaaatggagttcctgctatcagccatgtcctgatgaattggaaagtccccttctttctcctttcctcttgcatctcctgcctgcttcccctgcctgccctcctgtgacatgtgccctctccagcaggtatgtcacacagcaccccaagggaagggcagtgtaacgctcttttccatgatggactaccacagccagaggaagacaggccttcccttcttttctagttctttttggtttgaaaacaaggcactcttattttccccttccaagaagctggtggttcacacgggccagcacacacattatcaaagacctagtttgtttctagtaaatgagtccattgaagtgggagccttggccgggcaaggtggctcacacctgtaatcccagcactttgggaggccgagatgggtggattgagatcgagaccatcctggtcaacatggtgaaaccctgtctctactaaaaatacaaaaattagctgggcgtggtgacacacacctgtagtcccagctactcaggaggctgaggcaggagaatcgcttgaacctgggaggcggaggtaacagtgagccgagattgcgccactgcactccagcctgggcgacagagtgagactgtctctccaaaaaaaaaaaaaaaaaaaa

SEQ ID NO: 462 - DNA, 2648 bp, Homo sapiens
ggcacgagcttgtaggtactcattgaggtttattgtgtaagatgaatgaatgttgcaaattcctaaacatgtgattcagatgcccaatcttactctgttactttatgaaaattttttaaagctatatgatgttatatcaaaatatgttgttatactttaggataatcggtgtgttagccctgaatttcagcataagtcccatttttttccatgggagtctaggaaagctatatgtttattcagcagcaaaatacagtttggaacttaaataaactattgatcaatttctggtcttatgctagaaggaataaagcatcaagaaaaagaaaagatttgctgtcaagaccaggaaaatttgacaatagagtattagaatgcaggaaatgaggggaagtggaaaggcagcaagtaggagagaaaaagtgcagggacagtagaaagtgaatgtaggagctttctgacccatgcacttcaggaacgcaattcatccctaaaatgctgtttgctgtcttaggttgcaagtaaccaaattaaaaccagtttgaaagtagagtgagacagctgtcatcataagagtcatttgatctgtttaaaggtggctgcttgtatgcagggaccaacagtcatgtccagggcagcagctggtgcacacttcaagcacagaccataagagctaccccaggcagcacctgctaccaatagtgcaaacaactcagagagacctcgttggcataagggaatactctctcctttctgagtaaagagcaagtagaactaaaggtttcacattttaaacatactttacattcctcctcttctggggctcaagcctacttttgggccaaagcggatgttatatctgacatagagtcctcggagcagcagttgttcctgaaagttcctttttgcatctttgtgcctcatgcagtggcttacaggtcaaccagacttctcccctgacttttgatgtgtaagagcttgtgtttcaaatgggtttggttttcttaatgtcaccctaggttggtggaaaggagagtaaatggaaatggggggagcagggtcccctggggaggtttaaacagatggaagtcaattgtctcttgagaatagaggaggctattgagttttcattccacactctgctcctgttctgtcagcaaagaacaaggactactctccagcaattgctttccactggactcccccaccccggctcccacaaaaacctagggatcaacttagttcactccaaattagaaaatttaatagtcatttgtttcttcttgtccacagggagaaccattttctttccttctttcaaaattgcccaggtcttgtgaagggttattaacaccagaaagaaatacattttaataagcttaaatctcatttctacatgaaaccatcagattttagtactgcaatattttgatccctctgtcttttaggctctgacaccaaaattgccataatgaaggtgtttcacttcttctcatttatttttatgggatcttttattcccaaatgccttttcatcccagccaaagggagaaatgttgatagatctgccatcaagaaggttccaaagctggcctgtcaggttttctgtttccttgtttattatctttgaacttttgttttaaatgttttaaacacttatttaccatgtaactaaatgcctgatagcattgaaagtactttatgggttttaatttatttaatgctcatgaaaccctatgaggtaggtactgatattatttttattttactgatgaggaaagtgaagcaaagagaagtgaaatgaaaggtagtgagtgatgggaccagggtttggacatgggcagtctggctctaaaatgtatgcttttaactactatgtaatgctgcctcaccaacaacttgtctcacaaattgatattctggatcagaggatgtcgactggcctgcaaatgtattttgtatggctcatacacagttcagaagttttaaaaatttacatagaaatctgcatttcctgacttcttttgaaaatgggaataccaaacatcattaggcttgaattcccaatacggcaacaacagctgagcaacaagcagctgtttagactaggcaccttccgttcattccagcccacaatgcagatcatagtatcgacttaaatttcctgcctgccttagagaagcttctgagcttgtgacctctattctagctgctctatgaatggacgctgccccagtacagcgaggacctgctgcaaaatgcatttcttagtcttcaatacttattcctccttgtaactggatttctggtaagttatgtctcatggtggatctgccccaaagatggagactgaatggcagtgagtcactcgccctggcctccattgttctggagaaggttccagccacatggttgatgtcagctggttttccagagccagagctgggttgcaggacagacacacctgcatctaatagtgaaaggcaaagttgaaaggccaagaccagcctgaggtctgagggaccaagggcttcacagaggccagaagttcagaggtggacataaaaggtgttaggagaataaggaagtgaaaagaacatagtacagtgtatcagaggaggagctccaggctggcaaatatcactccc

SEQ ID NO: 463 - DNA, 3107 bp, Homo sapiens
ggcacgagagatagggttccacctgagtgctacagtggtgccacctcagatggtccctcctaaaggggcctacaacgtggctgtgatgtttgaccgctgccgggtcacttcctgcagctgtacctgtggggctggggccaaatggtgcacccacgtcgtggcactctgtctcttccgcatccacaacgcttctgcagtctgcctgcgagccccagtctcagagtccctgtcccggctacagagggaccagctgcaaaagtttgctcagtacctcatcagtgagctccctcagcaggtgggtgaggtcggcaccccctcctgcaattagctccgggccaggccgcataacagccttcctgttaggcccaggcctccatgggttcacctaggccgtgttctgcctgcctccgtctctttctccctcagatcctccccacagctcagcgtctcctggacgaactcctgtcttcccagtcaacagccatcaatacagtgtgtggagctccggaccccacagcagggccctcagcatcggaccagagtacttggtatctggatgaatcgacactcactgacaacatcaaaaagacactgcacaagttctgtggcccctcccctgtggtcttcagtgatgtgaactccatgtatctgtcttccacggagccgccagccgctgctgaatgggcatgtctgctgcgccctctgaggggccgtgagccagagggcgtctggaacctgctaagcattgtgcgggagatgttcaagcggagggacagcaatgctgcccccttgttggaaatcctcactgaccagtgcctcacctatgaacagataacaggttggtggtatagcgtacgtacctcagcctcacacagcagtgccagtgggcacacgggccgtagcaacgggcagtcagaggtggcagcccatgcctgtgccagcatgtgtgacgagatggtcacactgtggaggctggccgtgctggaccctgcactcagcccccagcggcgccgggaactgtgtacgcagctgcggcagtggcaactgaaggtgattgagaacgtcaagcggggccaacacaagaagacgctggagcggctcttccccggcttccggccagcggtggaggcctgctacttcaactgggaagaggcctacccacttcctggtgtcacctacagcggcactgacaggaagctggcactgtgctgggcccgggccctgccctctcggccaggtgcctcccgctctgggggcctggaggaatcccgggaccggccccgaccccttcctactgagccagctgtgcggcccaaggagcctgggaccaagcgaaagggcttgggtgagggggtcccctcatcacagcggggtccccgccgcctctcagctgaagggggagataaagctctacataagatgggtccaggtgggggcaaagccaaggcactgggtggggctggcagtgggagcaagggctcagcaggtggcggaagcaagcgacggctgagcagcgaagacagctccctggagccagacctggccgagatgagcctggatgacagcagcctggccctgggcgcagaggccagcaccttcgggggattccctgagagccctccaccctgtcctctccacggtggctcccgaggcccttccactttccttcctgagcccccagatacttatgaagaagatggtggtgtgtacttctcggaagggcctgagcctcccacagcctctgttggcccccctggcctactgcctggggatgtctgtacccaggacgacctcccttctacagatgagagtggcaatgggcttcccaaaaccaaagaggcagcccctgcagttggagaggaggatgatgactaccaggcgtactatctgaatgcccaggatggggctgggggcgaggaagagaaggccgagggcggggctggggaggagcacgacctgtttgctgggctgaagccactggaacaggagagtcgcatggaggtactgtttgcctgtgctgaggccctgcatgcgcatggctatagcagtgaggcctcccgtctcactgtggagcttgcccaggatctgctagccaacccacccgacctcaaggtagagccgccccctgccaagggcaagaagaacaaggtatccacgagccgtcagacctgggtggctaccaacaccctgagcaaggcggccttcctgttgacagtgctaagtgagcgtccagagcaccacaacctggccttccgagttggcatgtttgccttggagctacagaggcctccagcttctaccaaggccttggaggtgaagctggcataccaggagtctgaggtggctgccctgctcaagaagatccctctgggtccaagtgagatgagtaccatgcggtgccgggcagaggaacttcgggaggggacactctgtgactatcggcctgtgttgcctctcatgctggccagtttcatctttgacgttctctgtgctccaggtatgatgcctgaccctacagtaagtggggaactggggtaggggtagctttctctaagaaagaccaagagccccaagtttctgaatcacctttaggacccatcaggcagcttcatgggtaggtctgtgatgatgaggattttgggttcccctgtattttttcccatgcatgatacttctgtctgcctgacttaccccaacttttatacagtggtttctcccacaggttcccggcccccaagtcgcaactggaacagcgagacacctggggatgaggagcttggatttgaagcagcagttgctgccttgggcatgaagacaacagtgagcgaggcagaacatcccctcttatgtgaaggcacacgtcgggagaagggtgacctggcattagcactaatgatcacttacaaggacgaccaggccaagcttaagaagaaaattagccgggcatggtggcgcgcgcctgtagtcccagctactcgggaggctgaggtgggagaattgcttgagcccaggagtttgaggctacagtgagctataatcataccactgcactccagcctgggcaacagagcgagaccctgtctcttaaaaaaaaaaaaaaaagaaaa

SEQ ID NO: 464 - DNA, 1466 bp, Homo sapiens
ggcacgagctctacctgaatgttcccctagagtttcatacacaatgtgttggaaacctaaatgtatccttctcctcagttttgtatttcagtgtgtggcatcatcaacatttgaccccctaggtagtgagagaccttggagtcaacctcaatgtcccatctccttccctctccttatcacagggtgttgttggttctctatgtcccgggtctcttaaaaccacctcttctcctccgcctctacagacaccaacataaatcaagtttccatcttcgtttgcctggacaagtggcaaggcagcactgaaaggatactccttcctctagtcttctctgccttttgcctactgagcccactcttctgagctgctgataaaggaatttacataccacacatcctttgatgggattgccatgctacaaagcagaacctaaatcccatgcctggacgttaggcagtctacattctggcttctgtgacttttggcctaatttttgcatcagccccaaatttctgttgtgccaccatcccagtggattctagaatttagtcttacacaatcattccatattcctttaatgagtcctttagcatttgttcattcctttcatgtgccctatccccgtacctggaattacttttcctcttttacttactcaagtcctgcaaaagccagttccattatgctggtctcactgacctctttctacatatttctggtaagaatgaattactttctcctgaaatacctctgccatattgtttaaaaattgccatatggtgctggacatgagtatgtgttcacatgtttattatctactctagtctcaatttctaaggtcttgaatataggaaccaatttattcatcaccttattccagacatgatggaactcagctttattgagaatcaagtgattatagtagatagtgaccatcctgagtatgttcatgtgttacataacaatgttttggtcaaccaaggactgcatataggaaggtgggctcataagattaatatggagctgaaaaattcctaatgcttagccatatcgtagccatgatattgtagcacaatgctttactcacgcggtgatgctagtgtaaatgctgccttaccagtcatataaatgtatagcacaaggggccaggtggggtggcttacacctgtaatctcagcactttgggaagctgaggggggaagattgcttgagcacaggaatacaagtctagcctggttaatgtagggagggcacgtttctacaaaaactaaataaaattagcctggcatggtggcatgcacctgtagtcccagctactctggaggctgagacggaaggattgtttgagtccctggaggttgagctgcagtgagccatgatcatgccactgcactccagtctgggcgacagagcaatcccctttttcaaaaaaaaaaaaaaaaaaaacaaaaaaaaaaaaaaaaaa

SEQ ID NO: 465 - DNA, 566 bp, Homo sapiens
  misc_feature (1)..(1): n equals a,t,g, or c
ntcttgtgccaggcactgggatatggtgccgaattggatacaagggagatgggacgtcctcctgtgtgtcttgactgtcggtgtgttgccgagcattggtagcagagggggctggtttggcacccaggtaccctgcctcatccccggggccttggccagtctacacagaggaactgccctccagctgagttacccattttccatggcagggaggacagcagaaaggccgtgttccatgactaatcatagcttccatctattgagcatttactgggagctgggcactgtgctaagtgtgaaacgtgtgttgactcatttactacaacaacctggcaaggcaggttcttccgttagcccctgctcaaagctaggggacctggagcacaggcggtcaagtgcttggctcaaggcacacagctcagaagtgcagatcctctgcccctcctggcatcccagtctgggggggtcaggggtgggatctctgcagtcagtgcctgggggctggatgacaagctgcagcctccccgcaaccccacgatttccatagcgcagtggagccagaaaga

SEQ ID NO: 466 - DNA, 1274 bp, Homo sapiens
  misc_feature (722)..(722): n equals a,t,g, or c
agctgagtgtgcgagcgccaggggttccagctgcacgtcccaggctctccagcgcgcggcaggccggggcgggacgaggagagctgcggggacaacgcctgtggctgggtccggagtgcgggtgcggcgcgggacaagcgggcagcatgctcagggcggtcgggagcctactgcgccttggccgcgggctaacagtccgctgcggccccggggcgcctctcgaggccacgcgacggcccgcaccggctcttccgccccggggtctcccctgctactccagcggcggggcccccagcaattctgggccccaaggtcacggggagattcaccgagtccccacgcagcgcaggccttcgcagttcgacaagaaaatcctgctgtggacagggcgtttcaaatcgatggaggagatcccgcctcggatcccgccagaaatgatagacaccgcaagaaacaaagctcgagtgaaagcttgttacataatgattggactcacaattatcgcctgctttgctgtgatagtgtcagccaaaagggctgtagaacgacatgaatccttaacaagttggaacttggcaaagaaagctaagtgscgtgaagaagctgcattggctgcacaggctaaagctaatgatattctaagtgacaaagtgttcacctgaataccatccctgtcatcagcaacagtagaagatgggaaaaatagaatatttaccaaaatntctgccatggttttattttggtaacaagaagcacaatgtcttttttatttttattttttagtaaacttttactgaagtataccatgcattcaaaaagtggacaaaactgtatacagtctgatagatatttatgtcgtgaacacctgtgtaaccactgccaaagtgaagatgtagaatattggcaacacttcacagcctcattcctgccttttctcagccattacctcccaaacatagcagtttttctgagtttcatcacctttgattcattttgcctgtttttgaactttatataaatggatttatacattatgcacttgtgtgtgtggattatttacctgacagttataaggttaatccacaaattgtgtgtaccattagttcatccattgtcattgctgtattctgttgtataaacataccacaatttattttgatatttggcacagtttctggccactacatataatgctaaaatgagcacattgtatatgtcattaaaatgaggttgaactaaaaaaaaaaaaaaaaaaaaaaaaaaaaaaactcgag

SEQ ID NO: 467 - DNA, 1217 bp, Homo sapiens
cggcacgaggttgaatgttagccctggaggagatccatgtcttactcgctctttctggcccttctgtcttttgcctctgcaattctttttgtagctggcacgatagcagggactgggggtctatcctttcatggtattgctacaatatttgtccttactggaaaatggtaacatccgggtctgatttaattggcattacacttacacagggactctgagcacccccgtcaccacaccagacagtggaccagttttcacagctacaaagagctagaaatgtgtttaacatcatccagtgcatcccctaattcaaaaccatcctcactaatcaatcatattcacccataaatattacaaatgagattgattccatctcaagacaatttgtcaaatacttaattttcttcctggatgattctacttactggatattttagaaagagaaatgtctgagataaaatccctcacatttactcaatataacaaattactgtttctactcctattctgagtagtgcttctgaagattgtttgctgtagtgttgtctttgataaaatgaatgtcagtagtgagccttttagagataccatgctcagaaatcctctttgggatcagaagatacctaaaattctccccttttgcccacttggttagatgagtgatatattctttggatcctgcaaagaagagattggtttcttttcttttctggtggtggtagtggttgtatctgtggctgtgatggttgttgttacttgtctctctctctctctggctctggcttttgctttcctgctagtgttctttctctttccaaacaaatagttaaattaaacgtgagcttctgaattgtacttgttcatactttcaaaacataacagattaataaaaatagatgtgtcctgatttaaaacatgccccctggaaaggcatgctgtattatgaaatcatgataatataactgcattattacatggcagtataaatattagtctgttgaattcatttgtccaattgtataactttgtggagcagtgttttgacctttgatacataattctggagcaagtggagtggttgcaggcagatgagacagtgttatatcaggatttttcaatcaactttagttggaggcctggcaattacaaacatcttcagatgtttctgtaaccattataaatatgaaaaaaacctcttcaaaaaaaaaaaaaaaaaa

SEQ ID NO: 468 - DNA, 1656 bp, Homo sapiens
ggcacgaggttcacagcacctgatttgcaaggcagctatacaagttcctggactcttgtagttccggagtgtttcacctgaccttaagcccaccccatccatctttaatcaagaaaccatgtgctttcccgcatgcctgtgttcccccctcacgtgtctgctgtctgtgtggaagcctggcctggcgcatgctgtggtgcactgcatgctggaacccgtggagtttgcacgcgtggtacagtatgaggcgggtcacgttttgtagtgtgtgccgtgggctcccgagaaacaagttaaagtgtgtgctgaaatagattttattgacataaaataagccttattgctaaatttaagagaatgtgttacaaatgttttttgctaaacatcagtattgattattctacatgatgtacttattgacataacaacctgaaattcttgattttagacaatttctcctcaagttgattcagctgcatgactctcagaaatcagtcattttttattgtagattgctggttttcttcctctagtttgtatcgtgtattttcctcctgtggagaaaatgtggttggcaagaaatgccatattttaaagctgtatcgtggctgttaatgcagaaaacaccagtgtactgcaggctgtttggcagtggggctggggctgagtgtcctgccctcagtggcctgtgtctgtgctcttgttcgctgacatgcagatacaggggcagatctgagggtttgatggagtgcagaaggccacacgtgtggctttctgtaaatgcagaaacatggaatccttgagcagacacttgtcttctggagcaccttgcatggatttcgcctcctgatgcttcattgccgttaatagagtggtggtggttgtgttatgagaaattttgtctaacctggcttctgaaatttctcaaactaaatattcatgctgttttgtgtttttcttaatgactgaggctagtgatattactcagaaaagtaacagtaacttgggtcttctgagcgtcaggatgttcaccatttaacttgtttctcgttagtgtctagtacgtcggctttcggtagtgtaggtgtgtgttctgtgtcctttcccgtgtgtgcctgcactagtggcagcctctgcttccaggtcagtttagagtagactggctctggtattgctagcaagtagttgctgttacccagtgtagccatgaagcccagctccttggatcttgacatatatgttccaggcaaagtacgtaatccagacgtttctaactctttctagatgattgcaattgttctccatgttgtctgttaggcgttatgttaattctcgatctaacagtgtgcctgtaacatatatggtagtgaagagacatcacatgcagagaccgttttccttttatcaactacaggtccgctatcgacgagagcacctttctgctaggcagtcaccctacttcccgttgttggaggatttgatgagagacggcagtgatggtgctgctctcttagctgtgattcactattattgcccagagcagatgaaactggatggtgagtggagaatgcttcctgaaacagatccgaaaaggcttaaaggaaaattatagtgtacattgatccacatatatattaaaaaaaaaaaaaaaaaaaa

SEQ ID NO: 469 - DNA, 990 bp, Homo sapiens
  misc_feature (834)..(834): n equals a,t,g, or c
ttggaaagggtctagctctttctcattcaccaactatattagaagcacttgagggaaatttaccactccaaatccaaagcaatgaacagtcttttctggatgattttattgcctgtgtcccaggatcaagtggtggaaggcttgcaaggtggcttcagccagattcatatgcggatcctcagaaaacatctttgatcctggaataaggatgatattcgttgtggttggcctaccaccataactgttcaaacaaaagaccagtatggggatgtggtacatgttcccaatatgaaggtaattataactggattaaattagcagacatctatatactggctgcaatgactgataaaattttagaaatgccaagtgctgagrgtccatttgttctaccctctttatataaagggtgatgctgaaagtttgtttaaatgacttgtttatattaattagtccccaagtgtccaagttacacctgttttttttgtgagtttgttctttacattttgctacctgttacggggactcaaaggagggataagaaagtatccatctaaagagtgctagacacatacagtgaagcccctcaatatgtattgattgaataaatgcatgaaagaatacatttttaaattttgtgtatagttttgaaagactcaagtacgttctgtgtttggtattactgaaaccacattttaaaaataacactcattaagttagaaatatatgagtttagattgtaaaagaatgaggaattgaaatagttgtataccatattgatgaatatagagtttttaggatacctcttacctgaaatattaataataatgtttncagagcatattatacataattatttgtgatttaatctgttaatatgaatatctcatttaaaacttttatttctgaaaaaattatattgaataaaattttatataggcagtccccagccctttcctccttcaaagttgtcttatagagtgattggtt

SEQ ID NO: 470 - DNA, 2543 bp, Homo sapiens
  misc_feature (2538)..(2538): n equals a,t,g, or c
ctccgttggaaacttgggctgagtaccgcggcgggcgcgagcraggcgccctagacatcttctccctcccttgcctcagatttattgctaaacatgggtgcatttttggataaacccaaaactgaaaaacataatgctcatggtgctgggaatggtttacgttatggcctgagcagcatgcaaggatggagagtggaaatggaagatgcacacacagctgttgtaggtattcctcacggcttggaagactggtcattttttgcagtttatgatggtcatgctggatcccgagtggcaaattactgctcaacacatttattagaacacatcactactaacgaagactttagggcagctggaaaatcaggatctgctcttgagctttcagtggaaaatgttaagaatggtatcagaactggatttttgaaaattgatgaatacatgcgtaacttttcagacctcagaaacgggatggacaggagtggttcaactgcagtgggagttatgatttcacctaagcatatctactttatcaactgtggtgattcacgtgctgttctgtataggaatggacaagtctgcttttctacccaggatcacaaaccttgcaatccaagggaaaaggagcgaatccaaaatgcaggaggcagcgtgatgatacaacgtgttaatggttcattagcagtatctcgtgctctgggggactatgattacaagtgtgttgatggcaagggcccaacagaacaacttgtttctccagagcctgaggtttatgraattttaagagcagaagaggatgaatttatcatcttggcttgtgatgggatctgggatgttatgagtaatgaggagctctgtgaatatgttaaatctaggcttgaggtatctgatgacctggaaaatgtgtgcaattgggtagtggacacttgtttacacaagggaagtcgagataacatgagtattgtactagtttgcttttcaaatgctcccaaggtctcagatgaagcggtgaaaaaagattcagagttggataagcacttggaatcacgggttgaagagattatggagaagtctggcgaggaaggaatgcctgatcttgcccatgtcatgcgcatcttgtctgcagaaaatatcccaaatttgcctcctgggggaggtcttgctggcaascgtaatgttattgaagctgtttatagtagactgaatccacatagagaaagtgatgggggtgctggagatctagaagacccatggtagccttaaaaaccttctaaaatgcttttrattctgaaaattgggggaaaaaacttttaatcacaattttcttcaatacaaggggaaaatattcttgcggattcccaacgttttgtgatatgagcagaaaatcattagcatttcccatcatttgttcatatttgtgttttctgacagttgccacttgtagcattgcctgtactacagtattttttgccaacctcaggcatactcgttacatctgtattgaactttcggccctagaaaccagtggagttatttcaccacaaatcaacaatgtgcctgaggtgcatgggaaatatagttagctatactctgaaaatacattatgttttttttctttaaacaaaacacacaacatgtaagcatgtaagagtaaagaattgtatgatatgttccttttttcagttcaccaagttggaagccttttgcagctctgtggcttggaatttcatttgagcaatttctataggatatgtatttattattgattgttatttaawwwwwttccamttttacctgtattaccaaactgggttctccaataatgtccaaattgtaatgttgccttgcttcaagataaagtgtatttgggaataatattataaacccttmcaaattttatgcatgtatctactgcatccttcaactctcactagaaaatcttttgaaaccaaatggattaatttatggctatttataatttgctttgacatctcactgttggaaattttttaaagatgagatttgcctttataatgtaaattgtgatttttgttttacatgtgggtttctatagttttaattttttcagcttttaagatacgagttttgtgtaatttggtatttttaatcatttatgttattttaaaagctcagaatatcacattgaaattactataaatacatttaaaattatctattttagatctaaggaaatactacagagatattttcatgggttcagtaacttttcattttataacattgggcacggtacagagtgattgtcacataaggtacttgaagatttattagtttaattctatttttacagtaaccttgaattcttctgagttttgcatgtattaaattcaattaatgctgaacatgaagagtaaagtatttatctgaaagaagtttctgggttaggagaagtaatgaatgtatccatttgtacatggtttacatgttgtggatgctttgtaaacattttcctgtatgtttaaattgtgtttcagcaggatgtagttgcccttgtgnaggtt

SEQ ID NO: 471 - DNA, 1461 bp, Homo sapiens
aattcggcacgagccaaatgattatccttttaatcatgttctactccaaaaatatcagcctgatgatgaatttccagcctccgagcaaagcctggcgggcctcacagatgatgactttcttcatcttcttgctctttttcccatctttcaccggggtcttgtgcaccctggccatcaccatctggagattgaagccttcagctgactgtggcccttttcgaggtctgcctctcttcattcactccatctacagctggatcgacaccctaagtacacggcctggctacctgtgggttgtttggatctatcggaacctcattggaagtgtgcacttctttttcatcctcaccctcattgtgctaatcatcacctatctttactggcagatcacagagggaaggaagattatgataaggctgctccatgagcagatcattaatgagggcaaagataaaatgttcctgatagaaaaattgatcaagctgcaggatatggagaagaaagcaaaccccagctcacttgttctggaaaggagagaggtggagcaacaaggctttttgcatttgggggaacatgatggcagtcttgacttgcgatctagaagatcagttcaagaaggtaatccaagggcctgatgactcttttggtaaccagacaccaatcaaataaggggaggagacgaaaatggaatgatttcttccatgccacctgtgcctttaggaactgcccagaagaaaatccaaggctttagccaggagcggaaactgactaccatgtaattatcaaagtaaaattgggcattccatgctatttttaatacctggattgctgatttttcaagacaaaatacttggggttttccaataaagattgttgtaatattgaaatgagcctacaaaaacctaggaagagataactagggaataatgtatattatcttcaagaagtgtgtgcaggaatgattggttcttagaaatctctcctgccagacttcccagacctggcaaaggtttagaaactgttgctaagaaaagtggtccatcctgaataaacatgtaatactccagcagggatatgaagcctctgaattgtagaacctgcatttatttgtgactttgaactaaagacatcccccatgtcccaaaggtggaatacaaccagaggtctcatctctgaactttcttgcgtactgattacatgagtctttggagtcggggatggaggaggttctgcccctgtgaggtgttatacatgaccatcaaagtcctacgtcaagctagctttgcagtggcagtaccgtagccaatgagatttatccgagacgcgattattgctaattggaaattttcccaataccccaccgtgatgacttgaaatataatcagcgctggcaatttttgacagtctctacggagactgaataagaaaaaaaaaaaaaaaaaactcgagggggggccccgg

SEQ ID NO: 472 - DNA, 559 bp, Homo sapiens
gattcggcacgagctgaagccctgggtgccactgctggcccagcagggaggaggttgctgctgctcgggctgaagtgaggtgtgggtctggctgggcctccagtttcccacctgggccttgattgtgaggaaggcctggcctggctgcagaagcccagaagcacctgagtaggagagttcctttgtcccacctgcagctcattcaagcctgtgcatgggggttggggtcctcaggatcttgctttcctgtttaggggaggcagccccaaagagtgctgggaccagtttggagagtgctaaggaatgctggtctgcagcgaccctacttgtgctctgcgtcctctgccaactgcagcatgggtgaacatctgtacatctgtccccataatgaaaatggcctcagcaaataacaaaaatattaccatttagcaatcaggcacttattaaaagcctggcccaataaacttaaaaaaaaaaaaaaaaaactcgagggggggcccggtacccaattcgccctatagtgagtcgtattacgcgsgstcamtggccgtcgtttaca

SEQ ID NO: 473 - DNA, 803 bp, Homo sapiens
ggcagagctaggccaggcagagcctagctcttgccagggcagcaggaagccacacagtgtgttgaagccggagcaggagagggggccctgactcccatgtgtccttgcaggcaggagcagttcgtggacttgtacaaggagtttgagccaagcctggtcaacagcaccgtctacatcatggccatggccatccagatggcacctttcgccatcaattacaaagtaaggcctgggccctgccmaaacattcactgtctgcccacccagccccaccccatgaagccatctgtccctcatccccacagggcccgcccttcatggagagcctgcccgagaacaagcccctggtgtggagtctggcagtttcactcctggccatcattggcctgctcctcggctcctcgcccgacttcaacagccagtttggcctcgtggacatccctgtggagttcaagctggtcattgcccaggtcctgctcctggacttctgcctggcgctcctggccgaccgcgtcctgcagttcttcctggggaccccgaagctgaaagtgccttcctgagatggcagtgctggtacccactgcccaccctggctgccgctgggcgggaaccccaacagggccccgggagggaaccctgcccccaaccccccacagcaaggctgtacagtctcgcccttggaagactgagctgggacccccacagccatccgctggcttggccagcagaaccagccccaagccagcacctttggtaaataaagcagcatctgagattttaaaaaaaaaaaaaaaaaactcgag

SEQ ID NO: 474 - DNA, 819 bp, Homo sapiens
aattcggcacgagggaaactcatgcacaaacaaaacagcacatgctgtactcacagccagttacacagaatgctcatgcatgcatctgttgcttattaattttcttcctgctgtttgtatcattcttttgaagaatctccagcaagctttgtgctttgcccaattgtttataatgtctataaatcaggggcttggaccaaatgaaatgtcttagtagtgtttgcaaaatatttggatattctgattgcgttttattttcccagctttagaaaacatatagatagcctctgttgggaacttatattctcgttactccttgtctcttttcttttttcaggaattggtcactctttcagccaactcgtaggttcaaacaatgtttacatgtagtgctcagtttgttttaacttcckgctgtagacattgacagtttttycttccyaagagtcttatgaataggcaacaaaccaaaaccaaaacaggcaagtcccatctattactacgtacttacaaatccaggtgaaagtgcttggtgaacagtctatgttttagcaactgttttttaacgtttggttgtgacattttttaacaacagccattgttcaattgttaaactatgtttggatttgaggtctgaatgagctgaattcaaaatatgggactttttattagaaaccctggtaaagtggacactggggaaaaagcccaagatttcatgtgtttgatttattgactatgtgcgtcaacagcctgcttttaattctcagagtaaaataaaaatactcagaatctaaaaaaaaaaaaaaaaaaaaaactcga

SEQ ID NO: 475 - DNA, 1414 bp, Homo sapiens
ggcacgagccttgagctagcatttcattatgaccgtgatttttccccgcaccactttccagccttgtggtccacaattccactgggccttaagtatgtactgaactttcctgcctccctcattttgctctgcttgtgcaattttttccaccctccatctctgtcaaacgtaagccttcctgacctctaagacctacctttgtcatgtacctttaccctcaggcaaggagcaatctcttctcttcctcttctaccttgctgtagcttctccccaaggatttatcacattctgccttgaatcatagggaacagcatgtgtagtggaatgaacacaggcctctgaatccaagatacgagtttaaatcccagctttggaggtggttacttaaagtctcagtgccttcattcttcttcctatataaagtagatattacaatatctaacttacagagtcattgggagctatacatgcagcgattgggtaaagcacctggcacatggcaagcgattagcaaatgctggttacttctacttctttctcttcccttttcccagtctatcataatttccttgagagcaggcaccatgtcttatttacccttgtatttcccacagtacttcccatagtgagttacccttagtaaatactcagtaagttgaattgaatttaaattacctgtaagtcttaaaatgtgggattaaattaagaatatattgtcctggaaatacccaagtgtctattgatggatgaatggataaacaaaatgtggtatacacataatggaatattattcagccttaaaaaggaatgaaattctgacatgtgctacaatatgatgaacctggaagacattatatgtgaaataagccagacagaaaaggacaaatgctgtatgattccacttatgtgaagtacctagagtagtgtaattcatagaaacagaaagtacaggttgacatccaaaatctgaaatgagaaatgctccaaaaactgaaactttttcaatgccgacacgatgctcaaagaaaatgctaattggagcatttcagattttggatttttggatttgggatgctcaactggcataatgtgaatattccaaactctgaaaaaatctgaagtctaaaacacttctggtctcaaggattttggataaaggatactcaatgtgcaacatgtagaatggtggttgcaaggtgggaggagagaatggagagttactgtttaatgatacaatgtttccgtttgggaagatggaaagttttggagatgtgtgatggttatggttgcgcaacaatgggaaggtacttagtactgcttaactgtgcacacttaaaaatggtaaaaatgataaattttgtgtatgtcttaaaacaataaaagaagttttttaaaaaaaaaaaaaaaaaaaaaa

SEQ ID NO: 476 - DNA, 1340 bp, Homo sapiens
ggcacgagaaagaaaggcgagagaaaaatcaaggcaccaaatttagattggaggtctcagaggagcagtgttttccctccttcgtaacagttgaacaacttccagatgtagctagctgcaccccctgtaaagatgcaggctctttacaatgaagacacatcttctgatgttccttctctcctgtatggccagatgcacaggaatagtgcccaaaagacctcagcctgctttccctttaaggggaaggagaagaaaaaactcctttttatttttactttctttcagcattgaatttttgttgtgtgtatggtgacttctgtttttgggaaacggaagaagccagcagcatgctgaattgtcctgacaggcttccgctggctcttgccgaggttagcagtgctttttttgtatttaaaccatctcccgggcagtgtaaaaagtttgcaggtgcggacattctgtctgactggtctcggcagtgctctataaccctgttgtgtttcttgataaaacacagccccaccctttaataaagcaaagattgctatgaaaccagagagtctattcattactgtggagtaactagagcagtctgtagtgactagacatacggcaattaggaagtcatggagttgggatttttgtcttaattttggctgctcaaagtgccccctgtaggatattcttttttcgggaattgtttccaaacttgcctgtctttatctatggtgaaactcaagccgctttttaaggcaagcctgcaaacccaagtatcaacatgggctcctgaaggcacagggagcagattcacagttctgaccagtgttagggtccccacgagggccacccatttgaactcaaggttggcagactctggccccagcacttgccgtggtttcaggatggccagcggtgacacagggctatggaaccctgggtcttcatctcttcccatatcctttgtttcaccttctttttgcccatattttattgtgcttcagatagaaattttatttataagataaaaagtagctctgaggctgggcacggtggctcatgcctgtggtcccagcactttgggaggccgaggtgggtggttcacgagctcagcagatcaagaccatcctggccaatatggtgaaaccctgtctctgctaaaaatacaaaaattggctgggcgtggtggcgggtgcctgtagtcccagctactcgggaggctgaggcgggagaatcgattggacccaggaggcggaggttgcagtgagcctagatggcaccactgcgctccagcctgggtgacagagggagactgcctcaaaaaaaaaaaaaaaaaaaaaaaa

SEQ ID NO: 477 - DNA, 1676 bp, Homo sapiens
ggcacgaggggacttcagaaccacagaactgagatgataaatgagtggtgtttcaagttgctaagtttgtggtcatttgcttacagtaattgtaaactaatacacaagtgtaagtttgttttcttaaagaagaaaaaaacggggaaggaggtaagtgttaaaggatcaaaactctgacaaaaggctggttgcagaacatgacaggttgttgcactggaaactatttgtcatgcaagtttatgttaaaataagtagcttttgaggactttcatttttggtcttgtaaacatgccatttaatattgtccmactgataatactttttgcaaacagaaactgttaaaacctttaaagcaaatattactgtagagaagaagtaatgtgttatgaaactgtgaggatactaagaaggatcctacttaagtttcttcagcataaataaacttgagcgtttcgaccactgttactgagaatgaaattatttcttaatcacttttaatgaggtaaaatttacatacgataaaatgcaccaattttaaagtatagtttaatgagcttgcacagatgtaaatatctgtttaacttctacttaatcaagatatagaatatttccacaatgccaaaattgccattgacccccttccccttctttcacccaactgcagaccccaggtcaccaccaacctactcttgctcaatatagatttaatgtgatgtgtcttttctagagttttatgtcaatagaattgtacactatgcactcttccatgcctggctttctttgctcagcagraggtgtttagattaattcagtagttcatttctttctagtaatgaataggatcacattatacattataccacagagtgtgcatccattactttgtkgattgatatttgggtcatttccaggttttggctattgtgaataaaactgccttgactattcctgwacaagtctttgtattaaggaacatacgttttattttctcttgaggaagttcctagcaataagattgctgggtcatatggtaggtatatatttagctttaaaagcaactaagtgctttccaaagtgactgtacaatttaacattcctacctgaaatgtaagagaattccagttgctccacattcttgtcaacccttggtagcatcagtctctttaagaattctaatggatatgtaatatggactataggtttaatttgcatttctctgttgactaatgatgttgcacaacttttcatatgtctatcaaccattcttgcatcttcttttatgaaatgtctgttcaaatcatttgtccactttttattgtgtcattttattcagttgtaagagttctttacatattctggaaacaagtcctctgtcacatatataggtactttgaaaatctgtgctttgcctttacatttttttaatggtaactttttaagagtagatagttttggttttgatgaaattcaacttatcagtttttcagttatagtatgtatttttatgacccatctaagaagcatctgtctacccagagttgcaaagatatcccttttcttactagaaatattatagttttatttaccattgcttctatgatacattttaagttaatttttgtgtattaaatgaataaaaagttgaagttcaaaaaaaaaaaaaaaaaactcgtagg

SEQ ID NO: 478 - DNA, 1747 bp, Homo sapiens
ccacgcgtccggctacctgtgcatcgtgctgctcatgctgctgctgctcatcttctggatcgcgccggcccatgggcccaccaacatcatggtctacatcagcatctgctccttgctgggcagtttcaccgtgccttccaccaagggcatcgggctggcggcccaagacatcttgcataacaacccgtccagtcagagagccctctgcctgtgcctggtactcctggccgtgctcggctgcagcatcatcgtccagttcaggtacatcaacaaggcgctggagtgcttcgactcctcggtgttcggggccatctactacgtcgtgtttaccacgctggtcctgctggcctcagccatcctcttccgggagtggagcaacgtgggcctggtggacttcttggggatggcctgtggattcacgaccgtctccgtggggattgtccttatacaggtgttcaaagagttcaatttcaaccttggggagatgaacaaatctaatatgaaaacagactagattgcaataggagcttggatggttcgaggaataggcattggaggtggtttctggccgtgattggatgtgaagtagaagaggtcctcgatcatggtgttagaattgactggatagtaacaggtggtctggtggatagcggggagcatggctcagcaccagagcagaggcccagcagcctctgcagcccaaacgtcccaacggtgcctggaccatctcttctgatgagacgaatctcattttcatttccattaacctggaagctttcatgaatatttcttctttaaaacattttaacattatttaaacagaaaaagatgggctctttctgggtaggtggtacatgatagcagagatatttttacttagattactttgggaatgagagattgtgtcttgaactctgcactgtacaggatgtgtctgtagttgtgttagtttgcattaagcatgtatacattcaagtatgtcatccaaataagaggcatatcattgaattgtttttaatcctctgacaagttgactcttcgacccccacccccacccaagacattttaatagtaaatagagagagagagaagagttaatgaacatgaggtagtgttccactggcaggatgacttttcaatagctcaaatcaatttcagtgcctttatcacttgaattattaacttaatttgactcttaatgtgtatatgttcttagattagaataatgcaacttcgagtatgctttaatatttcaatattcaagttacaaatgtataaggcagttagaaataatacagtcacatgtcacttaatgatagggaaacattctgagaaatgcattgtaaggtgactttattgtgtgaacatcatggagtgcacttatacaaacctagatgggacacctatgacccacccaggccagatggtacagcctgttgctcctgggccacacacctgtacagcatgtgactgcactgaataccgcaggcaattgtaacacagtggtgagtatttgtgtttacaaacataggaaaggtacagtaaaactatggtattacaatgttatgggaccaccgtcatgtaagtggtatgtctttgacagaaacatggttacgtggttcatgactgtatattcactggaagatagtcaagactaaagacacattagagcaaattgacccctttaacatgtgattattgtccaattaaagacagttgatttaagtagcaaaaaaaaaaaaaaaaa

SEQ ID NO: 479 - DNA, 1251 bp, Homo sapiens
gacccacgcgtccgagcaaacccaggaaggtgtggcgtccccgcttcgcgccaagatggtgctggtgctgcgccatcctttgtgtgcccgggaaagggcgttccgggagccgggtcgggggctcctgactcgcactgggcagcatgacggtgcgccggctgtcactgctgtgccgggacctctgggcgctgtggctgctgctgaaggccggcgcagtacgtggggcgcgggcaggtcctcgcctccccggaaggtgttgtggggcgacatgcggggacgccgggcgggggtggacgttctgggcccagccctgtcctcagaggctgctggggcagaagcccggggctgggggatgccggggatgggtgttggggtgggtgcctccgagaccagaggagccctgttccttggcagggaaggtgtgcacgggccttgcccgatggatggtttagggccatggccctggggtccctggtgagcagtggggccgcctctgcccttggcctgtgagggactgtctgtgctggtcccagaaggctgggatcacctttccactggctcctttgttcgaggtttttcatagacaggctatgtggacaaatgagggcagcgcccacgtctggctggtggaggggctgcggctcctccttggaggggacgcctggccactgctgtccccacaatggggccacccgtggtgcaaggcgtgacaagctgccctctctaggtaagcaggacttgggaggcccctggccaagcctgtggacccggctgggcggcctctgtggtctcaggtttgggtgtgtttggtctggtcagggctcaggggctgctggtccacactggccccatcctgacaattggagctttggggcaaggtccctggagaaggggtcacgtcgggaggaaacagcctgggttttgttgatgcttttctaagaatggagtactcgttttcaagagatttgtcctaattatattttccagcgggtacttatgccaagtattgatgaataattcataaaataagcatctttgtgaattttagtgaatcagaccttaactatcaacggcaatgaatgaacatctaaagtttccaattttaaagtaaagaactggctgggtacagcagttcacgcctgtaatcccagcactttgggaggccaaggctagaggatcgcttgagcccaggagtttgagatcagcctgggcaacataccaagacctcatctgttaaaaaaaaaaaaaaaa

SEQ ID NO: 480 - DNA, 1539 bp, Homo sapiens
cgatggccccgcggccgctctagaaagtcccgttttttttttttttttttttttttttttttttagagtacgttctgcattttatttytgcaggcaacactttgctcaccagcaagaacacagcccraggaagggacccaataacctttcaaaacscaaactgctkcctgcggtgagggcccagggtcctccacggagaggacaggcatcttcctttcccaccaggaaggagtcagcccggagcctctgctatgtgcaaggcggtgtgcaagcaccggctgcrgctytttgctgtctcttctttctctttggggctgggctgggtgtgcgttctggtgctgatgctttggcctgtgaggctgagcttggcacctcgacccgttcaattacagcaacgaagaagccactgctgagtgtggtctcaggggaggcccggaggcagtgctcggcacccgggaacgtgctcaggcctcggtggggccaggcaggcagggcgggagctagcctgaaggcgcccgggttctgctgcagcgcatctcgcaccacgtcttcattctcctcctggcagagggagcacgtggagtagacgagccgctgcagggaagggaaagtgagcgcgtggcacagggctcgctgctggaaccctgccagggcatgcagacgcaccgggctaggtgtgcctgccccgggctcctccagctgtctgctcggcatacccgagccactgcaggaaggatccagcaggayrtagtggacctcaygrtagcgyggatcyragggggagaccgccaggaagtcctcctcagccagytcacagcargagacgccagcccrggccagcagcgtggccatggatgccagccgcttggcatccaggtcaaaggcaaagatcttcccttggttcttcagaagagcagccaagtgactggtcttattgcctggggcggcacaggcatcgatgacatgggagcctggcggggggtccagcagcatggctgggagacagctggccctgtcctgcagaatgaggtgtccggcccggtacagtgggtgttcatgcagatctgtctgggcgggaaacaccagcagctccggcatcaaggggtccaggagaaaatgcttccccttgagggctcgtaagtcatcgaggctggaagcccgaccctgataggagaaaccttgtctcttgaaataatcaactacatcatcggagcaggtcttgagagtgttcacacgcacaaatcgaggcagctgggaggctggaccaggcctggatcccacttccaacaggtcctcattccggctcacaccccgatgaaccttgagccgagccaactcagccttgagcctcgcctggtgccggcccaacagagccttccatcggcccccaccccctcgaaagccctttcccaacaacaactcatacactagcaccttggccaggtgcggccgctctagaggatccctcgaggggcccaagcttacgcgtgcatgcgacgtcatagctctctccctagagtgagtcgaatgaggttcata

SEQ ID NO: 481 - DNA, 1941 bp, Homo sapiens
tcgacccacgcgtccggggcgttcctggtcgtgagaggggagccccaggggagctggggcagcatgactggggtgataaatggccggaaatttggcgtggccacactcaacaccagcgtgatgcaggaggcacactccggggtcagcagcatccacagcagcatccgccatgtcccagcaaacgtggggcctctgatgcgggtgctcgtggtcaccatcgcccccatctactgggccctggccagagagagtggggaagccctgaatggccactctctgactgggggcaggttccggcaggagtcacacgtggagtttgctacaggggagctgctcacgatgacccaggtggcccggggtctggatcccgatggcctcctgctcctcgacgtggtggtcaatggcgttgtccccgagagcctggctgacgcagatcttcaagtgcaggactttgaggagcactacgtgcaaacagggcctggccagctgttcgtgggctccacacagcgcttcttccagggcggcctcccctcgttcctacgctgcaaccacagcatccagtacaacgcggcccggggcccccagccccagctggtgcagcacctgcgggcctcagctatcagctcggcctttgatccagaggccgaggccctgcgcttccagctcgctacagccctgcaggcggaggagaacgaggtcggctgccccgagggctttgagctggactcccagggagcgttttgtgtggatgtggacgagtgtgcgtgggatgctcacctctgccgagagggacagcgctgtgtgaacctgctcgggtcctaccgctgcctccccgactgtgggcctggcttccgggtggctgatggggccggctgtgaagatgtggacgaatgcctggaggggttggacgactgtcactacaaccagctctgcgagaacaccccaggcggtcaccgctgcagctgccccaggggttaccggatgcagggccccagcctgccctgcctagatgtcaatgagtgcctgcagctgcccaaggcctgcgcctaccagtgccacaacctccagggcagctaccgctgcctgtgccccccaggccagaccctccttcgcgacggcaaggcctgcacctcactggagcggaatggacaaaatgtgaccaccgtcagccaccgaggccctctattgccctggctgcggccctgggcctcgatccccggtacctcctaccacgcctgggtctctctccgtccgggtcccatggccctgagcagtgtgggccgggcctggtgccctcctggtttcatcaggcagaacggagtctgcacagaccttgacgagtgccgcgtgaggaacctgtgtcagcacgcctgccgcaacactgagggcagctaccagtgcctgtgccccgccggctaccgtctgctccccagcgggaagaactgccaggacatcaacgagtgcgaggaggagagcatcgagtgtggacccggccagatgtgcttcaacacccgtggcagctaccagtgtgtggacacaccctgtcctgccacctaccggcagggccccagccctgggacgtgcttccggcgctgctcgcaggactgcggcacgggcggcccttctacgctgcagtaccggctgctgccgctgcccctgggcgtgcgcgcccaccacgacgtggcccgcctcaccgccttctccgaggtcggcgtccccgccaaccgcaccgagctcagcatgctggagcccgacccccgcagccccttcgcgctgcgtccgctgcgcgcgggccttggcgcggtctacacccgtcgcgcgctcacccgcgccggcctctaccggctcaccgtgcgtgctgcggcaccgcgccaccaaagcgtcttcgtcttgctcatcgccgtgtccccctacccctactaaacgggagagggcattggc

SEQ ID NO: 482 - DNA, 1510 bp, Homo sapiens
  misc_feature (426)..(426): n equals a,t,g, or c
  misc_feature (454)..(454): n equals a,t,g, or c
cacgagaaacattctatcttttatcaaatgtgtgattcataacttttggataccaaaggaatctaacgaaataaccataatcatcaatccatacagggagactgtgtgcttctctgtggagcctgtcaagaagatatttaactatatgatacatgtgaatcgaaacatcatggatttcaaactcttccttgtgtttgtggcaggagtttttcttttcttttatgcaaggaccctggagtcaaagccctactttctattactcctcgggaactgtgctaggtgttctaatgacatagtctttgtcttgctgttggtgaaaagattcatccgaagtatagcaccttttggggctctaatggttggttgttggtttgcctcagtttatattgtatgccagttgatggaagatctgaagtggctgtggtntgaaaacaggatatatgtatcaggctangtcttgatagttggatttttcagctttgttgtttgttacaagcatgggccccttgcacacgacaggagcagaagtcttctgatgtggatgctgcgactcctctccctggttctggtctatgctggtgtggctgtgcctcagtttgcctatgcagccataatcctcctcatgtcctcctggagtctgcactacccactgagagcatgcagttatatgaggtggaaaatggagcagtggtttacatcaaaagagctggtggtgaaatatcttacggaagacgagtacagggagcaagctgatgctgaaacgaacagtgctctggaggagctacgccgggcctgccgaaaacccgactttccctcatggctggtcgtctccagactccacactcctagcaaatttgcagattttgttcttggaggaagccacttgtcacctgaagaaatcagtctgcatgaagagcagtatggccttgggggtgccttcttggaagagcagctctttaacccgagtactgcctgacatgcgaccttcaagttgacttcattctggacaaggaagtgggcaaagggcaggattctattaaagttaggcagaactgttctagtgaacggtggcaaaaacatttgctgtggagaaaaacaagtcagtctggaaaggaaaaccaacccattttgaagataacttagcattcttggtgacttctgctacttattgtactgtaggtggataccaaaattctgtgacagccactaccacttaccttgaatgaaggctttcattaggaacaggggaatggcgttgttcttaaggggctagtaagcatgaacaggtgctttgtcgacaccagggcactaaatctggtcttaatcccctgaacctgtgtcagaagactctgcaatactcttcctatagttcgtcagtataagtccttaaagagacctgagacatgctggaccagtgttttccaaagtacagctcacaggctactaccaagtgttggtcaataaaggtattctgaggtcaactaagattgataaaaaaaaaaaaaaaaaa

SEQ ID NO: 483 - DNA, 805 bp, Homo sapiens
ggcacgaggtccctaattgtcttgtacctagccctagggtgaccagggcaggggaatcatggcgagaagcgtaagggcctgatgaagaaggtgtgctgggtgtgggctctagcccacttggttttgtgtgagaggtggctgacagcaggttgtttgctgtatgtaggagttatccagccctgcaagggcagtccctccagtgtctgcaaagcccgaagatgtctgcatccaaaatacagaataaaaagatatggttactacaagtactcagtaagactgataatctgtcatcatcatcctcatgcccttaaagcagagctaactgatgattaatatatgcttctatgttaacagtcttggactttattaatggtgggtggaagttaacttaatgtatgtatgcaaactaaaaagtggcatccttttcattaatgacccaaccattattcaagagctatgtctagttagggacttcagacttttgaaagaaatgaagaaataatgccagatacatgggctcgcacttggaatcccagctacttgggggaccgaggtgggaggaccgcttgagcccaggagttcgagaccagcctgggcaacatagcgaaaccctgcctcagttttaaaaaagaaaaaaagaagtagtgaagaaattggaaaggattctgagaagaaatatgcaaggtggaaaagagcctagaaagaaaggtgacagatgctgggatttggtcgtcagaagagatatctaggaaatagcatggcagccctcaagtactagctccacttaaaaaaaaaaaaaaaaaaa

SEQ ID NO: 484 - DNA, 1182 bp, Homo sapiens
ggcacgagcccccagcacatggaagccctgttacagtccctcgtgatagtcttgcttgggttcaaatccttcttaagtgaagagctgggctctgaggttttgaacctactgacaaataaacagtatgagttgctttcaaagaaccttcgcaagaccagagagttgtttgttcatggcttacctggatcagggaagactatcttggctcttaggatcatggagaagatcaggaatgtgtttcactgtgaaccggctaacattctctacatctgtgaaaaccagcccctgaagaagttggtgagtttcagcaagaaaaacatctgccagccagtgacccggaaaaccttcatgaaaaacaactttgaacacatccagcacattatcattgatgacgctcagaatttccgtactgaagatggggactggtatgggaaagcaaagttcatcactcagacagcaagggatggcccaggagttctctggatctttctggactactttcagacctatcacttgagttgcagtgcctcccccctccctcagaccagtatccaagagaagagatcaacagagtggtccgcaatgcaggtccaatagctaattacctcaacaagtaatgcagaagcccgacaaaatcctccacctaacctcccccctgggtccctggtgatgctctatgaacctaaatgggctcaaggtgtcccaggcaacttagagattattgaagacttgaacttggaggagatactgatctatgtagcgaataaatgccgttttctcttgcggaatggttattctccgaaggatattgctgtgcttttcaccaaagcaagtgaagtggaaaaatataaagacaggcttctaacagcaatgaggaagagaaaactgtctcagctccatgaggagtctgatctgttactacagatcggtgatgcgtcggatgttctaaccgatcacattgtgttggacagtgtctgtcgattttcaggcctggaaagaaatatcgtgtttggaatcaatccaggagtagccccaccggctggggcctacaatcttctgctctgtttggcttctagggcaaaaagacatctgtatattctgaaggcttctgtgtgacaggaaacccaagcctaagaaacaattaagtggttctcatctctaaaaaaaaaaaaaaaaaaaaaa

SEQ ID NO: 485 - DNA, 600 bp, Homo sapiens
agaactagtgatcccccgggctgcaggaattcggcacgaggacctctgaccatcaggcttctgggaaccataggctatacccacaccacagagcatcgataaactattttgatgtttctcttgctttcagaaagacagcttccaagattcaagcccaggtggtgccggtctttttttggaggtgctaattaataatttaacttcatctaatgataattttatcttgttgcagtttgtggatttatgattatctcatccatccggtgcctagtgttgggcatagagtgtgtctctgctgtctgccagaatctgctactgggagaatttccccactgggagagggacccaggaaatggcatggtcttagaaggtctcctgaacacatttccttgggagggctcctgttatcttcaaggttgatggctttctgcaatctctcaagggctgttttgcctggaaacaggacgatggagacagagacctatcagctgtgggcatctcaatatcagcggaaatgggtatcaagaagtctcagccaggtgcagtgcttgcgcctgtaatcccaacactttgggaggctgaggtaggtagatcactcga

SEQ ID NO: 486 - DNA, 777 bp, Homo sapiens
  misc_feature (274)..(274): n equals a,t,g, or c
  misc_feature (278)..(278): n equals a,t,g, or c
  misc_feature (295)..(295): n equals a,t,g, or c
  misc_feature (676)..(676): n equals a,t,g, or c
ggcagagctcaggtaagargcaaaattactagaatattcactctcactgaaaatgagtaaaaacctaacttagatgaaaatccttatcttgttcatttttattcctggccttttggttgagaagaatgggccagaccatgtgtgtgtgtgtatgtgtgtgcgtgtgtgtgtgtgtgcgcacttgggtttatttatatgagccggtaaaatttcgttcaccattaatttatgttaatttaccaacttcttaaatgagaacagtgagaattttctncatngttaataatacactggncagtgcatatatgcatcacgaagagaggattttcccattgataatagatttccaaatacatcttcctgctttaagattttaatatatggatttatatataaaaactagttaagtcattggaaaagcaaactgtcawccttctcttatttgagawctcaactttagaaagtctatgttctcaactacagaaaataatttttagaccagctaactttcagatttctgcagtgcttattttctcccagttgagggttggtttttgtttgtttgtttgtttgtttgtttttcctgattaaaaagtaagaatacggccaggcgcgatagctcatgcctttaatcccagcattttgggaggccgaggagggcagatcacctgaggtncaggagttcgagaccagcctggctaacatggtgaaacccagtttctactaaaaaaaaaaaaaaaaaacttcgagggggggtcccggtacctaatcgtccct

SEQ ID NO: 487 - DNA, 1037 bp, Homo sapiens
cggcacgaggtgatacttctgaagactgcagggagaatccgttttccagcttttttcatccaccagaggccacctgtattccctatcccacaaccctagccccttcctctatctttgaagtggactatttcatcccctgtttctatcatgacagtgccttctctcatattgaccctcttgccttataagattccttgtgattacactgggtccacctgcataatcaaggctaatctctccatctggagatcttaatataatcacatctacaaagtccctttggccattgaagtaacatatttatatgtattcattattaggatgtgggacacttttgtcagggacagggatttttcagcctacctttttcttcaccttttgccaccactctcagcctgtggtctcaattgccagcctttacacttgctaccccattgtctgggtagttcataccagtcctcaagactagcctcaggcatgcctcttctgggaatacatcctcttacaggccaggatatgactcatgggtgcatcctaatagcacttcacttatttctactgtcaccacactgatctgtaattacttgatttgtctgactcttctgggggcttgtaagcattctggcacagagaactatgacttactggggcttacatctcttgctaaacacagtacctaaaatttagtaggcattccctcataaacatgaatgaatgaatcaaagaatgaataaacatttaggaaatgatgttgtgttggtcaacttctttcctcatcactgttaaagataaaagaatgccaagccaggttgttcagacagaagcaagcaccacatccctgagagagcagcacatctgggcagccatgtgtgagaagtcggttgcattccccatacacagttgtctttgcagctgtactcttaaccactgtaaccacagaagtggggaaacaatagggtggggtgaagtgaaaagaaaattttccaaaacttcatttatctaataaatacagatatttaaaaaaaaaaaaaaaaaac

SEQ ID NO: 488 - DNA, 727 bp, Homo sapiens
gaattcggcacgagagggttttagtttatgtctctaactttagcaaagctgcattcctattggaatgcatactggaaacagctctcattcctacctttaaagggctcttggaaagcagtgtgacaaccaaggtcactaaatggtgagatcatcaagccattttaagttctttctcatgttattcaccagcaccctgcaggacgttgggcacacatcacatccctcagctcagccatccagccgtctcagtgattcaccactcatttgcttaattaatagacaggtttgatcactttgtacatggaaggcactgtgccagtgaacaagcagttggacccagccctccagtagggaatggacagctgaaaatccatgagcaagaaagaaggaaaaagaaagagttctgagcagccaaaccatttctcgatgatttcagagccttcattctgagcatcagttatatgctctccagtgtaatgactttatagccaagcacagtaattgatattactgtgaaggcccttaacttatcaagaaatggttgaggccgggcacattggctcatgcctataatcccagcacgtgggaggccgaggcaggcagatcacttaagcccaggagttcaagcccagcctgggcaacatgatgaaagcccatctctacaaaaaaaaaaaaaaaaaactcgagggggggcccggtacccaattcgccctatagtgagtcgtat

SEQ ID NO: 489 - DNA, 600 bp, Homo sapiens
  misc_feature (553)..(553): n equals a,t,g, or c
  misc_feature (560)..(560): n equals a,t,g, or c
  misc_feature (589)..(589): n equals a,t,g, or c
gaattcggcacgagcggcacgagccgagatcgttctggggctgctggtatggacgcttattgctggaactgagtacttccgggtccccgcatttggctgggtcatgtttgtagctgtattttactgggtcctcaccgtsttcttcctcattatctacataacaatgacctacaccaggattccccaggtgccctggacaacagtgggcctgtgctttaacggcagtgccttcgtcttgtacctctctgccgctgttgtagatgcatcttccgtctcccctgagaaggacagtcacaacttcaacagctgggcggcctcatcgttctttgccttcctggtcaccatctgctacgctggaaatacatatttcagttttawagcatggagawccaggaccatacagtgatttaccattttgataattaaaaggaaaaaaaaaggaagactctcactgtaaaaacagctgtaggtataatgtatattcccagagaattgtatttaactaattaatgttttttatattcttaaatttgctcacaaattgtggtttgtnacaattnaactgggttactttatttggcaagtgttntaggcttttaa

SEQ ID NO: 490 - DNA, 1242 bp, Homo sapiens
  misc_feature (288)..(288): n equals a,t,g, or c
ttcgtatccactaggatggctctaatcaataacaaagtattgtcaaggatgtagaaaaattggagccctcctgccttggtgggagtgtaatatggtgccagatacaacctccatcctgaagctcatctgtatgcttcctgtttgtgtttttaaacttttactatatctttatgtcctcataagaatatgtactatcatttggtgttttaaagtgtacataaatgctgtcatcctgaacaaatcctctcgctaactgcatctttaactctatactatattttcaagatntgtccatgttgatccacgtagctccctagttccctttaactgctataagatattctgttgcgtcaatatatgacaatttatgcatgctttgttgacaggtaattggatttttagtgttttgcctttacaaaaatcactgcatcttttgcacatgtctacttgtgcatatgaactgaggtaaaattgctgggccttactgtaaatatgttgttttaattcactttgcgctgctgtaacagaataccatagactgggtgcttataaagaaaagaaatttatttctcatagttctggagaatgggaattccaagatccattcacaggttcggttgtctggggaaractttcttcacacatcctcacttggcagaacggaagggcctgggttgatgctgtgtgaamcctcttttataagggccttagtctcattcccaaggaggagctctcataacctaatcacctcttaaaggccccccactcaatactatgacattgaatttcaacatctgaattttagaggggacactgcaaacctgtcatatgtctttatctttactatcactaaattgtccaaagtgattgcaacagtgatttatatactcaacccacagagtataagaatttctcctttctagctgggcacggtggctcacgccagtagtcccagcactctgggaggccgagatgggcggatcacttgaggccaggagttcaagaccagcctggccaacacagtgaaaccccatctctgctaaaaatagaaaaagttagctagctatggtggcgcacacctgtaatcctagctatttggggggctgaggcaagagaattgcttggacctgggaggctgaggtagcagtgaactgagatcgtaccattgcactccagcctgggtgacagagcgagactctgtctcagaaaaaaaaaaaaaaaaaaaaaaaaaaaaaactcgta

SEQ ID NO: 491 - DNA, 970 bp, Homo sapiens
ctcgtgccgaattcggcacgaggtgcccaggctctcagggcagagggtccagtgtgatcactttgcatggcctctctcccctcctgagcttgtgccagggccccagggctgacctggagaggaaaawggcagagggtgaagatggggtgtctggtttggggaccatcctggccccccttgtcactgttggcatctcttctgcacagtggcattgctgggaggtgcttactgtgcctattcaaggggctggcagccgcagcctcactgcagatcagggacttggcttcccggttgaccacaggtccaagaacctgcagggtccagcctcccccccatccccagtcttccccaccctggcccggccctccaggtgcagaaacatgcaggcccctctccaggactgtgggaggagtgtgtccctcagactggcctgtgtcctggctcctcttaccacctcttccagaggttgtcacctgcagctgccccaggataaaggcaaggccagagaggactcctgaactcctgtgtgcctggggtggcaggggcaaacatagccaactggtggcctgagcggggccatggtgargacacccttggtggcttgtcccacatcaagctgggargtgacactgaggatgcattagtctgcagcgtatgataaaaacggcatttcaggccaggcgtggtggctcatgcctgtcaccccagcaccttgggaggccgaggtgggcagatcacatgaggtcaggactttgagaccagcctggccaacatggtgaaaactcatctgtactaaaaaaacaaaaattatgtgggttggtggtgtgtgcctgtaatcccagctacttgggaggctgaggcaggagaatcacttgaacctgggaggcggaggctacaacgagccgagattgcaccactgcactccagcctgatccgtctcaaaaaaaaaaaaaaaaaaaaaaaaactcga

SEQ ID NO: 492 - DNA, 1388 bp, Homo sapiens
ggcacgaggtaagttgcaaggtacacccacgggtgatttatcactcttacaaagatgataactaatgaagaccgcatctagaatgctcttactggagatggtttacagagcatttttaatcatcatacttagatttatattaatatttcttttcaaactaaattattccaaactgtgccctgagataccatttggcctcaagttcttttctttcgtctgtattaaggtgcaaataaaaaagactagtaggaaaagaaggccttatttatgaaggttgtctatagctctgagcttggtagctacataaaatgagtaataacctaaataagtaaaactaatgaagatctaactagattactttgcttaatattaacattttacccgccccccgccgtgaaacatttggcagatgttctgcaggactcatgaggacattggtggctacagctgcttctggcactgcccccccaaccccccagtgaggtgaacttctttacacatccagcaagctttagttatcttcttctcccatttgagataactgtggctacaagaatctcagttaaatcagatgtttaaattaggtgccaaaaaatcttacagacactgaactaatacttaaatcaaggaacacttcagttctccataaaatctggtgccattttccaaagaaacagaggatctttgtttcacacccgtggtactggaattgcaacagtgaggcattctagctctcacatgccaatgcgagtggcattcattcttgctcactcatttctgcttctcattgtcacacttggaggctctttgggggtatgtttcagttgatctgagaaactgggtgttaccaatttactagagagtttcttaaaatgtatctgaaacaaactattaatgggcattctgtggtggtaaaaccaggcaacgcctccctacactatctgtcctttcagagctaagaatctgttattttgaattgttcacgaagagtgattctgactctgcttcagtgcacactttacaaaccatcgagcctcatcaaaggagtgagttgagctgaggaattagagtaaagaatacaggtatagtgccgggcgtggtgctcacgcctgtaatcccaacattttgggaggacaaggagggtggatcacctgaggtcaggagttcgagaccagcctgaccaacatggagaaaccctgtctttactaaaaatacaaaattagctggacgtggtggcacatgcctgtgatcacagctactcaggaggctgaggcaggagaatcgcttgaacccaggaggcggaggttgtggtgagccgagatcacgtcactgcactccagcctgggcaacaagagtgaaattccatctcaaaaaaaaaaaaaaaaaaa

SEQ ID NO: 493 - DNA, 649 bp, Homo sapiens
ggcacagggaagtgtcaagcgggcgctcccccatctccgccgctattaccactgaacccggaccccctacccaggtccagggccagccgccatgacgaacgtgtactccttggatgggattctggtgtttggtttgctctttgtttgcacctgtgcctacttcaagaaagtacctcgtctcaaaacctggctgctatcagagaagaagggtgtttggggtgtgttttacaaagccgctgtgattggaaccaggctgcatgctgctgtggcaattgcttgtgttgtaatggccttttacgtcctgtttataaaatgaattccaaagcacccaagtcatcaactgccaaccaaggggacggggatgaagaacctgttggagacctgaacccagtgtaggagagttcagctgaaatcatcggtccccaggatgacaccacagcatctgcccctgctatatgtggggaaaactcatggtcacgaacattatttatgcttcaggggactacagaaagccagcttcctttgatctatgtgtaaatcagtccttggcagagtgcatataatgtccggataaattacacccctcggtgataagattacatacctccttcataaaaacctgtaaaaaaaaaaaaaaaaaaaaaaaaaa

SEQ ID NO: 494 - DNA, 1699 bp, Homo sapiens
  misc_feature (9)..(9): n equals a,t,g, or c
  misc_feature (1692)..(1692): n equals a,t,g, or c
ggcatcttntatttagcacaatgtttttaaggtttattcatgttgtagcaaggtacgcaattgtttttcatttaaagaaaaagtctcaatgctattacaattttccatattctttgcacctgtggtctgtctccctaaatatagcccctttatgaaggaggaatgcaaagctgatccaactagagactacaaattcctttatatttatatagaaaggggcacatagtaatgaattggaagccatatccaagctagaatcatctagatttagtgagattgactagtgcaacccaattttttgcactcatcccctgtccatcaggtacctggaaatgattryaawgattttgaactaggttactggtataatcatactgctgttgagattagcaggcaaattaccaagttagttttttattggagggggagaggtcaatgtgtgagggtgcatagtggagactggggaccaggctgacaaagatgaattgttttaggtagtgatgactttgaggtaatgggataagtgagtgaaaatgactggttggcgttggagatgggatggagatggagcttggagaaaaagaatagcactagtaaatggatttagctagacaaaggagatttaccctattccatttagcacagtgaggagaggctagacagctaggatgcaataaaaaaaattttaatgagaaatgtgtgtggtagattaattttattaatctcaagttatagattaaaaaatttaagtaccacataaatgccatttgcctttgctaatgttacatttttatgaagaaggagccttgcataaagaatgatataatggacttttgggacttgagggagaagcttgggagggggggtaaaggataaaagacatattgggtgctgtgtgtacactgcttgggtgacaagtggactaaaatctcagaaatcaccactaaagaacttatctacataaccaaaaatcacctgtaccccagaaactattgaaataaaaaaaaagaaggggacttggacagatagccgtattctttgccaaattatagttacattctgctcatgggggattaggaggttcaatggaagaaaggccccactcagctttctcccctcttaaaatgttgccttgtaaattagggaattttgcataaagctctgacctttacttccaaggcctttactgagaatgggtttggatacttggagatagatcctgactccctatccctcctagatctttatttatcctatttggaacccagggaaatggccttaaagctgatgaaccacagggtgtccaagtcatggagctattgaggttctccccaagtatcttttaaattgctgcatttgggatgggcgcagtggcttacacctgaaatcccagcactttgggaggctaagttgggaggattgcttgggtctgggagtttaaggccagcctgggctagatggtgagcctctgtctctatttaagaaaattagaaattagccaggcatggtgacacaccagctacttataatgctgaggcaggaggatcacttgagcccaggagtttgcggcagacagtgagctatgattgtgccactgtactccagcctgggtgacagagcaagaccctgtctcttatttaaaaaaaaaaaaaaaaaaaaaactcgagggggggcccgtacccaatcgccttncatgatg

SEQ ID NO: 495 - DNA, 433 bp, Homo sapiens
  misc_feature (424)..(424): n equals a,t,g, or c
  misc_feature (430)..(431): n equals a,t,g, or c
cggccgctctagaactagtggatcccccgggctgcaggaattcggcacgaggcgggaaggcttattccaaggtaagaggggctgtgtgaaggggcagtgggatggaatggggggtggcatgggacaggcacaagggaagcctccagccccttttctgccacaagcaagaggcactcagccctacctgagatgtgttattttttagaaatatctttattgatggtctttgcactcaatataaaggcagcatatggttgttgcaatataaatggtacagaagtccacagagcaaaagggccagtttctgtcccctttcctctctccaggcctctttctgggaccccattattggatagattaagacctttccagaccttgtaaaaaaaaaaaaaaaaaactcggggggggscccggaaaccaattngccccnnaa

SEQ ID NO: 496 - DNA, 1537 bp, Homo sapiens
atcatataggaaacggtagcctgcagtaccggtccggaattcccgggtcgacccacgcgtccggagcagcaagagatttgtcctggggatccagaaacccatgataccctactgaacaccgaatcccctggaagcccacagagacagagacagcaagagaagcagagataaatacactcacgccaggagctcgctcgctctctctctctctctctcactcctccctccctctctctctgcctgtcctagtcctctagtcctcaaattcccagtcccctgcaccccttcctgggacactatgttgttctccgccctcctgctggaggtgatttggatcctggctgcagatgggggtcaacactggacgtatgagggcccacatggtcaggaccattggccagcctcttaccctgagtgtggaaacaatgcccagtcgcccatcgatattcagacagacagtgtgacatttgaccctgatttgcctgctctgcagccccacggatatgaccagcctggcaccgagcctttggacctgcacaacaatggccacacagtgcaactctctctgccctctaccctgtatctgggtggacttccccgaaaatatgtagctgcccagctccacctgcactggggtcagaaaggatccccaggggggtcagaacaccagatcaacagtgaagccacatttgcagagctccacattgtacattatgactctgattcctatgacagcttgagtgaggctgctgagaggcctcagggcctggctgtcctgggcatcctaattgagctggaaaagcttcaggggacattgttctccacagaagaggagccctctaagcttctggtacagaactaccgagcccttcagcctctcaatcagcgcatggtctttgcttctttcatccaagcaggatcctcgtataccacaggtgaaatgctgagtctaggtgtaggaatcttggttggctgtctctgccttctcctggctgtttatttcattgctagaaagattcggaagaagaggctggaaaaccgaaagagtgtggtcttcacctcagcacaagccacgactgaggcataaattccttctcagataccatggatgtggatgacttcccttcatgcctatcaggaagcctctaaaatggggtgtaggatctggccagaaacactgtaggagtagtaagcagatgtcctccttcccctggacatctcctagagaggaatggacccaggctgtcattccaggaagaactgcagagccttcagcctctccaaacatgtaggaggaaatgaggaaatcgctgtgttgttaatgcagagaacaaactctgtttagttgcaggggaagtttgggatataccccaaagtcctctaccccctcacttttatggccctttccctagatatactgcgggatctctccttaggataaagagttgctgttgaagttgtatatttttgatcaatatatttggaaattaaagtttctgactttaaaaaaaaaaaaaaaaaaaaaactcgagggggg

SEQ ID NO: 497 - DNA, 1782 bp, Homo sapiens
tgccgagcctctttggtagcaggaggctggaagaaaggacagaagtagctctggctgtgatggggatcttactgggcctgctactcctggggcacctaacagtggacacttatggccgtcccatcctggaagtgccagagagtgtaacaggaccttggaaaggggatgtgaatcttccctgcacctatgaccccctgcaaggctacacccaagtcttggtgaagtggctggtacaacgtggctcagaccctgtcaccatctttctacgtgactcttctggagaccatatccagcaggcaaagtaccagggccgcctgcatgtgagccacaaggttccaggagatgtatccctccaattgagcaccctggagatggatgaccggagccactacacgtgtgaagtcacctggcagactcctgatggcaaccaagtcgtgagagataagattactgagctccgtgtccagaaactctctgtctccaagcccacagtgacaactggcagcggttatggcttcacggtgccccagggaatgaggattagccttcaatgccaggctcggggttctcctcccatcagttatatttggtataagcaacagactaataaccaggaacccatcaaagtagcaaccctaagtaccttactcttcaagcctgcggtgatagccgactcaggctcctatttctgcactgccaagggccaggttggctctgagcagcacagcgacattgtgaagtttgtggtcaaagactcctcaaagctactcaagaccaagactgaggcacctacaaccatgacataccccttgaaagcaacatctacagtgaagcagtcctgggactggaccactgacatggatggctaccttggagagaccagtgctgggccaggaaagagcctgcctgtctttgccatcatcctcatcatctccttgtgctgtatggtggtttttaccatggcctatatcatgctctgtcggaagacatcccaacaagagcatgtctacgaagcagccagggcacatgccagagaggccaacgactctggagaaaccatgagggtggccatcttcgcaagtggctgctccagtgatgagccaacttcccagaatctgggcaacaactactctgatgagccctgcataggacaggagtaccagatcatcgcccagatcaatggcaactacgcccgcctgctggacacagttcctctggattatgagtttctggccactgagggcaaaagtgtctgttaaaaatgccccattaggccaggatctgctgacataattgcctagtcagtccttgccttctgcatggccttcttccctgctacctctcttcctggatagcccaaagtgtccgcctaccaacactggagccgctgggagtcactggctttgccctggaatttgccagatgcatctcaagtaagccagctgctggatttggctctgggcccttctagtatctctgccgggggcttctggtactcctctctaaataccagagggaagatgcccatagcactaggacttggtcatcatgcctacagacactattcaactttggcatcttgccaccagaagacccgagggaggctcagctctgccagctcagaggaccagctatatccaggatcatttctctttcttcagggccagacagcttttaattgaaattgttatttcacaggccagggttcagttctgctcctccactataagtctaatgttctgactctctcctggtgctcaataaatatctaatcataacagc

SEQ ID NO: 498 - DNA, 574 bp, Homo sapiens
tagtagagcgcgtgtatagaggcagagaggagtgaagtccacagttcctctcctccaagagcctgccgaccatgcccgcgggcgtgcccatgtccacctacctgaaaatgttcgcagccagtctcctggccatgtgcgcaggggcagaagtggtgcacaggtactaccgaccggacctgacaatacctgaaattccaccaaagcgtggagaactcaaaacggagcttttgggactgaaagaaagaaaacacaaacctcaagtttctcaacaggaggaacttaaataactatgccaagaattctgtgaacaatataagtcttaaatatgtatttcttaatttattgcatcaaactacttgtccttaagcacttagtctaatgctaactgcaagaggaggtgctcagtggatgtttagccgatacgttgaaatttaattacggtttgattgatatttcttgaaaactgccaaagcacatatcatcaaaccatttcatgaatatggtttggaagatgtttagtcttgaatataacgcgaaatagaatatttgtaagtctactataaaaaaaaaaaaa

SEQ ID NO: 499 - DNA, 795 bp, Homo sapiens
  misc_feature (1)..(1): n equals a,t,g, or c
ngaactagtatattcaccgtctatgaggccgcctcacaggaaggctgggtgttcctcatgtacagagcaattgacagctttccccgttggcgttcctacttctatttcatcactctcattttcttcctcgcctggcttgtgaagaacgtgtttattgctgttatcattgaaacatttgcagaaatcagagtacagtttcaacaaatgtggggatcgagaagcagcactacctcaacagccaccacccagatgtttcatgaagatgctgctggaggttggcagctggtagctgtggatgtcaacaagccccagggacgcgccccagcctgcctccaggtgcagtacaatgacatttttaaaaatcgcccagcaaaggtctttgaattttatttcatccaagaaaatccacagctctttaagctctagatttgtccaaatttaaaatcctgaagttagagatggtatttcactccttcctctattcccaggacctagctttttttttttaacatacacaatagggatttgataagtttctgatggctgcaggcatgtaagagcatttcagtggtattgaatcaatgaagaattttgttgacatgtgaaatcttataaaaatattctttaccgaaggactgagttatgtggcagtgggtacattcattgtttcatccctcccctagtaactgggataaatatgttgatacatagtctctctgtttttctgcatttggaagctttcagaggaacataatgtagaggtgtttctttagcaaagtgcactgatagcaaaca

SEQ ID NO: 500 - DNA, 1742 bp, Homo sapiens
ggcacgagctcgtgccgctttgtagtctagggagtttaattaaagtaagtggagacaaaagtactcttttgagagctgtcatttctcttagtgtgacgctattaataatgtagtgtaatgctattttggaagtttggttctttccttttcttttgtcttcctctgactcttttctgtattctaaatgaaaggggaataatgcacttagaggggggcactctcctaaattcactgtctcatgtacgacattatctccgacttcggctctcatgttttgaaaaaatacctcttcatcgctctatttttatttttcttcttcttttattgtgaatctcttttaccaaaaacatttgtagggttcttcacaaagattttttttttcaatcaggatgaaaactagatcatgatgtgaccatttcactgtgagtgtaacttccctttttgacagctccattagatctgccaggttataaatcttcatatttctgacttgccttgaaatcagaaagtgttttcattatgctagtctctgtgagcaacaagcatgaaggaaggcatggcaggtatcatagcccctttgatgaacttacctgtttcaactcagtgccagggcagaacatttactgctaaccctgatgggtcaactttgattgcaaattatgtgtggtacattttgaatttaaagaatgtttctgagattattctacgatcacttgtcatttttatgtgtgcagtaatgtgttgtgtataacttggatttcaacaatatccattgtttgaaagttagaaaatattctaagaatactaattatcttgctcaaataatcatttaagtacaactgtcacttgattatggtgaatatttttaagtaaaattatatatttaaggtgtgctacctctaattttattgtcatacaaaaagcagattattgaacatgttaatgtaaattgtacttttaattttttccagtactctagaacatgtgtaaggttaaaagaatttaaattacccaggtttttctttttacataataaataagaagaaatcacaaaggaagcagatattatattgtttttaatatacacatgaaattgtttgactttattttgagacctcacacaagtataaacatggcagtggtgtgtatgatcaaagtaagaaattaaagagttaccggttctttataaaccagaagtccattgacttttaataatgctgtctcaaatatttgatagtaaattgtggaaataatcaaagctgagcctatgggactgtactttgtagtactgtttaatttaataactctaataatcccttaagaatattaggaaaaataggccgggtgcagtactcacgcctgtaatcccagcactttgggaggccgaggagggcggatcacctgaggtcaggagttcaagaccatcctggccaacatggtgaaaacccatccctacaaaaacacaataattaggcaggcatgatggtgagtgcctataatcccagctattcaggaggctgaggcgggagaatctcttgaacccaggaggcggaggttgcagtgagccaagattgcgccattacactccagcctgggcgacagagcgagactccctctcaaaaagaaaaagaaaaaagaaaaaagaatattaggaaaaatatcttaatgcaaaatatattaattagtaatctgccaacactgagatgtactataaggccaagaagaaaaaaaaaaaaaaaaaa

SEQ ID NO: 501 - DNA, 1443 bp, Homo sapiens
ggaaccattggcctatattgggttggatctattattatgagtgttgttgtttttgtgccaggaaacattgtagggaagtatggaacacgaatttgccctgcttttttcttaagcataccatatacttgtcttcctgtctgggctggtttcagaatctataatcagccatcagaaaattataattacccctcaaaggttattcaagaagcccaagcgaaagacctgctgagaagaccatttgatttaatgttggttgtgtgtctcctcctggcaactggattttgcctgttcagaggtttgattgctttggattgcccatctgagctctgccgattatatacgcaatttcaagagccctatctaaaggatcctgctgcttatcctaaaattcagatgctggcatatatgttctattctgttccttactttgtgactgcactgtatggcttagtggttcctggatgttcctggatgcctgacatcacattgatacatgctggaggtctggctcaggctcagttttctcacattggtgcatctcttcatgctagaactgcttatgtctacagagtccctgaagaagcaaaaatcctttttttagcattaaacatagcatatggagttcttcctcagctcttggcctatcgttgtatctacaaaccagagttcttcataaaaacaaaggcagaagaaaaagtggaataaaaatattacttcatgttcctcctttctaaattactaacttttgttatactggtactgatattttgtcccatttcactctcttctcatacgtgagtacttaagaatatgtacattcttgctctgcactgtatgtgtgagctatatggtattgtgtaaattttttttgaaggaaaatggaaattcttgagaaacagtttgtttaaagaaatatattcaaaatcatttgtgaataaacttgatcatccatctcaatattgtttgacatataaaataattataagtgtaaaaaattacaatttagtgccaacagtagtgagcatgaaatgaaactattcaaaagagaatatggcctgtgcatattaaaaaattcaaaacagtgaatgcagactggaggagtaacttttgcaaataagatgaatatgcttcattattaaactcaatataaaaggcaaatcatcagaatatttttaaatgttgtttgaaaaatgttttcccaaggaaagtttattatttgctgctgtttcaagaaaattacttttactaaatttttttgtgtgaatttaaacagctaaatagggatcagtaactttatctctatccttaatgaacatttgttttattggtggctggaaatatttctattgtatttctgtgtatatttttaataaaattatttttggcctcttaaaaaaaaaaaaaaaaaaaaaaaaaaaaaaaaaaaaaaaaaaaaaactcgag

SEQ ID NO: 502 - DNA, 462 bp, Homo sapiens
gaattcggcacgagctgggctcaagtgatcctcctgccgaggcctcccaaattgctgggactgcagctgtgagccaccatgcccagccttaacttggttttaagacctctgatttgccttgcctcaattacctcctttcttattttctttcctttgttgactctcatactctgttctcctaattctcccccttttccactccctgcccaccctgaaagacacacacacacacaataagtgggtggagtaagaagtcaacggagttggatataagcattcctgcttttctgacatctccagtgtcttggagaacaaggattctagaatgagggctcctcattatgcttcctttcaacattttttctctgtgttacttaagctttcaccccaagcatgtttgacagagagccagtgcattccccttactttttacaaaaataaaaaaaaaaaaaaaaaactcga

SEQ ID NO: 503 - DNA, 2541 bp, Homo sapiens
tggggaaacggtccctctagaactagtggatcccccgggctgcaggaattcggcacgaggagaaggtcactaccatcatggagatggcttccaagatgaaagacacagggttcatcgtgtttgctgtgcttctgctggtgtcatgcctcatcctcatctttgtcattgccccacgttacgggcaaaggaatatcctcatctacatcatcatctgctctgtgatcggggccttctctgtggctgctgtcaaggggctgggcatcaccatcaagaacttcttccaggggctgccagttgtccggcacccgctcccctacatcctgtccctcatcctggcactgtccctcagcactcaggtcaacttcctcaacagagcactggacattttcaacacttccctggtgttccccatctactacgtgttcttcaccacggtggtcgttacctcgtccatcatcctcttcaaggagtggtacagcatgtctgctgtggacattgcaggcaccctctcgggctttgtcaccatcatcttgggcgtgttcatgctgcatgctttcaaagacctggacatcagctgcgccagcttgccccacatgcacaaaaacccacccccttctcccgccccggaacccactgtcattagactggaagacaagaacgtccttgtggacaatatagaacttgccagcacctcatcaccagaagagaaacccaaagtatttataatccattcctgaagcttggaatatgtgagtgagaggatgagtccgatggtacagcctgccctcccaatttcaaaaccacctggttattttccagtgcaactgttaccaatgggctctcttttcttgagaagttcatttatacctcatcactgtttccaggagaaaaatctttacccaaatagcaatggtggcagaacttcctggaaacagattcagtgaccaaatacccaagtttacatcagtgcctgcaggttccctggaccttccttctcattcattctttcggtgccatctctatgccgttgggaagaagatggagtctgacccactgaatgtagcacagtccaaggacttctctaagatattggtcattggaagttccttcacaccaattctcctcctgagacggaatctccgttgttgttgttgttgttgttttctagcccaaggatgacatagagctggctcccagaggcccacagagcaattggccatgcctccctatccagagctgacagggacacaaccagtgtaaaatatcctgttgcctttgtcacttcctctttggaggcagaagcaagacctcagctgaccttcttactgtgaaagccacttgatgtctcagggaaaaatttcaaccagctcattccccgagcactccagcctggcagtcagcacctcggcatccacccagtccatcccaccatcaccccttccccctctacttacatcctaaggagtcggtcactgagacataaaggcagtaatcgcagaactggaaacaaaacaataacagagccacagccaaactctggtggccaaacccagtgttgcattttgtcttactctgaaagaagaacagcaaattcactgcttcaaagtggcctggctgccaagctagaatttggcagaacgcacttttctattcctcaaggagtcaaccaacctatgatctggggaggtgggaagaggatgaggagcaaagttgggatttggcagaaggcagtcccaggctctctggatactaggggctaacttttgtgttgactctggtgctcatctgggaacttaggagaaacgagctcaggggtaatttctgggttgcagccttaaaggcttggacagctgtgaatctcaatggccaactggaggtgcagacttggcatggggtgcattctagctgttgaccagattgctaccgagtcccytcctccactgatgagctgcccacactgggaagcagcatgccctgactgttccaacaccacctgctatggggagtacctttggtcccctcacatttggccagaggatacaaaaaaccagagcagctggagagggagataattactattccttcccttcccatctcctttctagccacaagagtgtgggggttggagaagaaccattagaaagggaaattagtgggctggtgtatctggaaagagggaagacttgatcctcagccccgaggttggtgcagggcctcccctgtgtgactctacctgcactctgtgtttatatcctgtgccctaagtgggccaagcccaggtaaattcctgctggccttggaactccaaggtttggctgaccagcagactggctccctgactcttcagcctcaaatccccagtttttgatgaatgtggatttctgtctgtaattaaaagcaatgcaacaagttggctcttgagaatggcagtaaactgagggccctaagagtgtggtctgcagggtcaagaataaagattacagattatatttacttgaaaaaaaaaaaaaaaaaaatttcctgcggccgcaagggaattca

SEQ ID NO: 504 - DNA, 561 bp, Homo sapiens
agggatcccccgggctgcaggaattcggcacgagtctactctcaaaaaattcagaaacatatatttgtgtgcatttgcatgtgcaacagtacacacaaacatacataaagagagcaattgataaggcaaataaggtaacatttaacaataatctgatacacataaatagagaaagagcaattgataaagtaaatgaggtaaaatttaacaataatctgagcaaaaggtatatgtgttttctttgagacagtctgattcttgcaacttattctgtaagttggaacttatttccaaacatgattgaaaaaaaaccccgcacttggcaacttcttctctttttcagcctagaaatgtctgtgttaagtggttttttatttattgttgttgtttgttgttattgttgttttgttgccaggctccaactcacaaaatacgagtttaaaaactgcgttgttatttttagagatttgtgataatacaacttgttataaaatttattcctcaataaatataatttctctactaaaaaaaaaaaaaaaaaaaaaaaaaaaaaaaactcga

SEQ ID NO: 505 - DNA, 809 bp, Homo sapiens
ggcacgaggagaatcatgggcctctggctgggcatgctggcctgtgtcttcctggcaactgctgcctttgttgcttatactgcccggctggactggaagcttgctgcagaggaggctaagaaacattcaggccggcagcagcagcagagagcagagagcactgcaaccagacctgggcctgagaaagcagtcctatcttcagtggctacaggcagttcccctggcattaccttgacaacgtattcaaggtctgagtgccacgtggacttcttcaggactccagaggaggcccacgccctttcagctcctaccagcagactatcagtgaaacagctggtcatccgccgtggggctgctctgggggcggcgtcagccacactgatggtggggctcacggtcaggatcctagccaccaggcactagcaaagaagcttggaaatagaaagccaggagtggctgtccccagtatgcaaacacaccacggtctgccctgcaaaaacaccaatggggtctagtgcaggtggacactttgaaccactcctcaaaaaaagaactttggctgattccttgtggtgacactcagaggggtctgaacagacttgacaattctgttctggtcaagctggagttttcttctgtgacttggactgctctacagaagacatcagccaactgcacgagtcagagtccagggattgtcactattattaataatgtaaatggcttcaaatgggacactgcagataaaatcacaaaaaccactgttatattaaagattacacatttcctggaaaaaaaaaaaaaaaaaa

SEQ ID NO: 506 - DNA, 1151 bp, Homo sapiens
ggcacgagtgtcaatgaaagtgtttctaatgcaactgcgattgactcccagatagctagaagtttgcacatcccactcacccaggatatagctggtgacccaagctatgaaattagcaaacagagactcagtattgtcattggcgtggttgctggcattatgacggtgattctaatcatcttaattgtagtgatggcaaggtactgcaggtccaaaaataaaaatggctatgaagccggcaaaaaagatcacgaagacttttttacaccccaacagcatgacaaatctaaaaagcctaaaaaggacaagaaaaacaaaaaatctaagcagcctctctacagcagcattgtcactgtggaggcttctaagccaaatggacagaggtatgatagtgtcaatgagaagctgtcagacagcccaagcatggggcgatacaggtccgttaatggtgggcccggcagtcctgacctggcaaggcattacaaatctagttccccattgcctactgttcagcttcatccccagtcaccaactgcaggaaaaaaacaccaggccgtacaagatctaccaccagccaacacatttgtgggagcaggagacaacatttcaattggatcagatcactgctctgagtacagctgtcaaaccaataacaagtacagcaaacagatgcgtctacatccatacattactgtgtttggctgaattccactctaatatgatgctccattatgcaccatactgtgatgacctttctactccgaaacctgctggagcctgcccttggccgtggggtgtcagccaatcactgcttgttccacttgttgtacattttatttttgagtctttttctttctcatatacagaaaaatagtatgaaaataaaataaatgtatgaaacagtattaatgcagaaatgtgctactaatggatgtctgagtcaccagaaattccattcttaaagaggcggttagcacctattagacgtaacagtgatgtcttttaaaaaatccaaaagcatattgcaacaataagtttgagactttgtgtgaacaaagggaaattcagcctcttatgtctttgtctttaatacattaaatactgattttgaataaaaatctaaattgatcaataaaaaaaaaaaaaaaaaa

SEQ ID NO: 507 - DNA, 308 bp, Homo sapiens
ggcacgaggcggcgctgcgaggacccatgcagctgacgctggggggcgcggccgtgggcgcgggcgccgtgctggccgccagcctgctctgggcgtgcgccgtgggcctctacatggggcagctggagctggacgtggagctggtgcccgaggacgacgggacggcctccgcggaaggccctgatgaggcgggtcggccgccacccgagtgagcgacacggccgtggggcctggcaggcgctggacagcgcccgaggactgggacattaaacctgacctcccctcctccaaaaaaaaaaaaaaaaaaa

SEQ ID NO: 508 - DNA, 1986 bp, Homo sapiens
ggcacgagggaaaactgttttatttgcatttgaagaagctattggatacatgtgctgcccttttgttctggacaaagatggagtcagtgccgctgtcataagtgcagagttggctagcttcctagcaaccaagaatttgtctttgtctcagcaactaaaggccatttatgtggagtatggctaccatattactaaagcttcctattttatctgccatgatcaagaaaccattaagaaattatttgaaaacctcagaaactacgatggaaaaaataattatccaaaagcttgtggcaaatttgaaatttctgccattagggaccttacaactggctatgatgatagccaacctgataaaaaagctgttcttcccactagtaaaagcagccaaatgatcaccttcacctttgctaatggaggcgtggccaccatgcgcaccagtgggacagagcccaaaatcaagtactatgcagagctgtgtgccccacctgggaacagtgatcctgagcagctgaagaaggaactgaatgaactggtcagtgctattgaagaacattttttccagccacagaagtacaatctgcagccaaaagcagactaaaatagtccagccttgggtatacttgcatttacctacaattaagctgggtttaacttgttaagcaatatttttaagggccaaatgattcaaaacatcacaggtatttatgtgttttacaaagacctacattcctcattgtttcatgtttgacctttaaggtgaaaaaagaaaatggccaaacccaacaaactaacattcctactaaaaagttgagcttggacatattttgaatttttgtaagtgaagatttttaaactgactaacttaaaaaaatagattgtaattgatgtgccttaatttgcataaatcataaatgtatgtcctctctgtaattgttttaatgtgtgcttgaaatatccagaaaacctatggagttagtaaattctgggctgtcatatgtaggatagccactttttaggtatatgtacatttatatttctatcaattccttagaaagtaaaataaatgaatagatcaaatgttgtgttcatgtttggggaaaatataatttgcagaaacctatgaagtagagcaaagatgctttaaaaagataagtttttttgaactaaattttttttagttctaataatgcacataggatattagtacatcgtacacgtgctaggaaaaaacagcttcagtgtctttgtttaatgtgttgaaactcatctttttaaatcttgaaaaaccaattgtttacttgaaacttgaaagtagcatatttttctgttttttggttgtttgttcatttgtattagcacaatttaatgtaattcctggtttggaggcagcaagacctatgagcaagaactatttacttgaccctcgtttttttctcttgttcttgtgtggtctgaaatctaaaactagactttattatgatagatttcctataagccaatttctaataacaaatagatttattatttaatctgtaccttctatcttctcataattcgtggtcttacagccttccaaaataactccagttgggcacccatgagctaggatcaaactttctttatatactttatatattttacattatttctgatttttaaagcaaatgattgccattatgattacactcaacctaaatagttatgaacagtttcagaacaatgaaaaattacaatactatgtgatagtattgtaactatttttctattttagtcatatgtcgcttatatcctaccagaactcttaaatctataatattcgatatattctacaaactgctttattgtagaagccatatttatgtttattttataatgttttctagtgtcaaactgtactgtggagaaaagaaatgttagatctgtgttctgtctgcattttttttgagtacatacccttcaccctcaaaaaaaaaaaaaaaaaaa

SEQ ID NO: 509 - DNA, 1781 bp, Homo sapiens
  misc_feature (1)..(1): n equals a,t,g, or c
ncagcactcggttccgtgcaactttcaagtgagttgcgaactccgccctgtaggccggtgctggtggcccggcgcgctggaaccgcggcgacccgctccagcgcgggaccagcagcaagggccgagcgccaggttctccgcggcagaaagggcgggtgggagctgtaactgccccggccgcggggcgcgcccgctcccaagtcggcttcctccccgccggggccgctttgcctcgggtctccccattctccaggtcccctgaactgcacagtcggaggccgtgggcggcgggctctgcctccgccgagggacagccggatcgcccctctgcttcccgcaactgccctgatcaccccccgtcccagcccttgagtgaacgtccttctgagcggcttcctggggtcctccccacgtcccaaaggccggcaagatggtgtcctggatgatctgtcgcctggtggtgctggtgtttgggatgctgtgtccagcttatgcttcctataaggctgtgaagaccaagaacattcgtgaatatgtgcggtggatgatgtactggattgtttttgcactcttcatggcagcagagatcgttacagacatttttatctcctggttccctttctactatgagatcaagatggccttcgtgctgtggctgctctcaccctacaccaagggcgccagcctgctttaccgcaagtttgtccacccgtccctgtcccgccatgagaaggagatcgacgcgtacatcgtgcaggccaaggagcgcagctacgagaccgtgctcagcttcgggaagcggggcctcaacattgccgcctccgctgctgtgcaggctgccaccaagagtcagggggcgctggccggcaggctgcggagcttctccatgcaggacctgcgctccatctctgacgcacctgcccctgcctaccatgaccccctctacctggaggaccaggtgtcccaccggaggccacccattgggtaccgggccgggggcctgcaggacagcgacaccgaggatgagtgttggtcagatactgaggcagtcccccgggcgccagcccggccccgagagaagcccctaatccgcagccagagcctgcgtgtggtcaagaggaagccaccggtgcgggagggcacctcgcgctccctgaaggttcggacgaggaaaaagactgtgccctcagacgtggacagctagggtctgctgcatctgcccccttcttacctcgtgccctgcagggctccagggctatttggagggaccttgggctgcacatctggcctgcctgcaccagctgcctgggccccaccctcctgactcctgctgatggttaagggccgggagcagatgctgccaaggccacatgcagggatgcacccacaatgtaccaaagcaggctgggcccagggttctatttattgccttgctctgccctctcccttccccggttgtgggacaagagccctccctgaacccctgcaaccctccctgaacccctgcaaatgaaaccaaacgtccacctgggtgtgttcattccttcctgtccttcaaagtacttgatagcctttcataaggcctggcacatgtgtcctggttgtgtgtgtgtgtgttggtgagtgaggtcaggtttgcgagtgttttgataaataaatacataaaggggcaaaaaaaaaaaaaaaaaaaaaaaaaaaaaaaaaaaaaaaaaaaaaaaaaaaaaaaaaaaaaggggcgggccgttttaaaggatccaagtttacgtacgcgtgcatgcaac

SEQ ID NO: 510 - DNA, 1410 bp, Homo sapiens
cagatcagggtcttaagaagattatctttcatagtgcctatttgatggtaatgatcataaatacagtataatagaaggaaaaatatctggtggcttatatgcattggtagtttctcatggtaataagcatttttttttctcttccttttagcacaagtgcatacaccttgatagcaccaaatataaaccggagaaatgagatacaaagaattgcggagcaggagctggccaacctggagaagtggaaggagcagaacagagctaaaccggttcacctggtgcccagacggctaggtggaagccagtcagaaactgaagtcagacagaaacaacaactccagctgatgcaatctaaatacaagcaaaagctaaaaagagaagaatctgtaagaatcaagaaggaagctgaagaagctgaactccaaaaaatgaaggcaattcagagagagaagagcaataaactggaggagaaaaaaagacttcaagaaaaccttagaagagaagcatttagagagcatcagcaatacaaaaccgctgagttcttgagcaaactgaacacagaatcgccagacagaagtgcctgtcaaagtgctgtttgtggcccacaatcctcaacatgggccagaagctgggcttacagagattctctaaaggcagaagaaaacagaaaattgcaaaagatgaaggatgaacaacatcaaaagagtgaattactggaactgaaacggcagcagcaagagcaagaaagagccaaaatccaccagactgaacacaggagggtaaataatgcttttctggaccgactccaaggcaaaagtcaaccaggtggcctcgagcaatctggaggctgttggaatatgaatagcggtaacagctggggtatatgagaaaatattgactcctatctggccttcatcaactgacctcgaaaagcctcatgagatgctttttcttaatgtgattttgttcagcctcactgtttttaccttaatttcaactgcccacacacttgaccgtgcagtcaggagtgactggcttctccttgtcctcatttatgcatgtttggaggagctgattcctgaactcatatttaatctctactgccagggaaatgctacattatttttctaattggaagtataattagagtgatgttggtagggtagaaaaagagggagtcacttgatgctttcaggttaatcagagctatgggtgctacaggcttgtctttctaagtgacatattcttatctaattctcagatcaggttttgaaagctttgggggtctttttagattttaatccctactttctttatggtacaaatatgtacaaaagaaaaaggtcttatattcttttacacaaatttataaataaattttgaactccttcctggtataaatgggtccat

SEQ ID NO: 511 - DNA, 1303 bp, Homo sapiens
aggttaaatgcgtacttttctaacctttgttattttgaaagttattctgatattcctatccagttgtgcctcatttactagaaatttgctcacatggccaaatgatgtatccacagaacaatttgaaactagaccttttggaagcgaactcctacaaactgtcatcaatgttagcagaacttgagcaaagacctcaacccagccatccttgtagtaattccatcttcaggtggagggaaaaggtaacatttaaggagactggttgtaatttcttgattgggcctgctgggtggagtggcttaaagtagcatcagggcaaaaaaggtgttaggaattctatgtgatattaatattcatgcagttagttaagaagataaatgttttwatttttcttttgagcacaataacaagagctagacaaaaccgaatacattctgtgtacaccaaacttctatgagaagctaaaaaacacttttgatttcttctttctcatcatacctgaatttcatcctttggatgtgcttttacagtaaaatttctattaaattgaaattttaatattcgttcagacctaaattataagattttgtggtatgtattagtctcatctgtttaagatggtgcctaatgcagataatgcatcagtacagctctgaaatgcttgtagctatttttattactgatcagaagggggaactgtaatcatcttgtgaagggacagttttctaaggctcaagagctcgaaaacaatctcaatcatttacagggttgtgatcatttcacttgcattaagccaactaaagttgtatttgtaaaagtaatgctatgaatattactatttgacctagacacataggttagaattggaaacacaggctataaagtatagtaattgtgtaattgtgaaaatattaaggcttcaactcaaaactgaaacacagtagggcttagaaatctttgaattatttatacccctcagtttaaaaacttccagtccaggcgcagtggctcatgcctgtaatcccagaactttgggaggccaaggcaggcggatcacctgaggtcaggagttcgagagcagcctggctgacacggtgaaaccccgtctctactaagaatacaaaaattagccaggcatggtggtgggcacctgtaatcccagctacgggggaggctgaggcaggagaatcacttgaacccgggaggtggaggttgtagtgggccaagatcatgccactgcactccagcctgggtgaacagggcaagactctgtctaaaaaaaaaaaaaaaaaaaactcgtagg

SEQ ID NO: 512 - DNA, 2118 bp, Homo sapiens
ggcacgagcataaattgataacattaaaagcaagcaaaactctaataataaaaggataaattgaattatggtacattctctggtgaatattgcatatcaaggaaaatgtgaaaaatgtaaatacagccgtgtaaatgaagaggaaaatgtaaagctaaacgggaaatagcgtatctatattttaggtaacatttaaatgatgataatagctaatatttttatgaaccccttactatgtgcagggtacttgttctgttttgcctacacattaattcatttaatcctcctaacaacctctgaggtatgtagtattactgccccatttttcacagctgtgctgcagtcgagtgcctgtccaagtacacactggcctgagtaggcccaggaggctgggtgatgtggctccgcagcctccactcctgtccactgtgcacactgcctctgttatattaattcatcaaatattgagggtccctttgatgccacgcactatccaccactggcaccctgacacttagaccctaacagatatggctgttgctcgtgaggatctttatttattaggaggtgatagaaagtaaaatcagataatgcatgccacgtggatcattaaaacagactgagttgcaaagagtgactccgtggtttctgtggcttgtttggtcagaaaggtgtttctgagatgaagctgagcagagctgtccaaagaacaggaaagaaccagctaggctgtgattgggggatagtggtttcaggcagaaagaacagctactgggtttcctagggtgtttggagcacagccggtgaggggcacatagctgggccagggcatgtagagcttgttcagcctctggaaggcattgggattttatgctaagtatgttggaaagcctttggagggagaatggattgtgtgtggctctggctggcagcagccagttaggctttcacagtagacaaggggagatgattgtggcttgggtgacagtgtattataattacggagaaaggtttggatatgattcagagatagggctgacagagcttgctgttggattagatgtaggaaattagcaaaggaaaggaatgggagagcagagattgggattcaactggagccatagtagccatgtgttgtttatcagacatccaaggggaggtgccaaattgctagttggctacagggatctggcattctgtgagaggccaaggcttgggtatataggttatgtgtggataactgcatctcccacatgcttaggaggccagataaaacagtgcaagaaaatattaacaataaggattatggacaatttgagtttccttctactttcctttgtgaaaatgtgttgctttaaaaatcaaaccaatgattcctttttccaagtctgataatatttgaagaatttttagagaaactaagttacaaagttatagtacttatataatcagaattggcatggtgtagagatgtcaaagtgggtgttttgctttttaatactttgtatcagggttatattttaacaaagagataagaatattagagacaggagtggtggctcacacgtgtaatcccagcactttgggatgccgaggtgggtggatcaccagaggtcaagagttcgataccagcctggccaacatggtgaaaccctgtctctactataaataccaaaattagccaggtgtggtggcgcacacctgtaatcccagctgttcagcggactgaggcacggaaatcgcttgaacctgggagctggaggttgcagtgagccaagattgtgccactgccgtccagtctgggcaacagagtgagactctgtctcaaaataataataataatagagtctagtcttcattttgccactaaaattatgtctctctatatatttatttattcaacacgtatttattgaaagcttgtcatgtgcctggcattgttctaggtgctaggaatatagcagtgaacagaatccacaagtcctcccctcagggagctttacattctagaaggggaagaagttctccccctcagctcaaaaaaaaaaaaaaaaaaaaaaaaaaaaaaaaaaaaaaaaaaaaaaaaaaaaaaaaaaaaaaaaaaaaaaaaaaaaaaaa

SEQ ID NO: 513 - DNA, 587 bp, Homo sapiens
ggcacgaggcggagcgaagctggataacaggggaccgatgatgtggcgaccatcagttctgctgcttctgttgctactgaggcacggggcccaggggaagccatccccagacgcaggccctcatggccaggggagggtgcaccaggcggcccccctgagcgacgctccccatgatgacgcccacgggaacttccagtacgaccatgaggctttcctgggacgggaagtggccaaggaattcgaccaactcaccccagaggaaagccaggcccgtctggggcggatcgtggaccgcatggaccgcgcgggggacggcgacggctgggtgtcgctggccgagcttcgcgcgtggatcgcgcacacgcagcagcggcacatacgggactcggtgagcgcggcctgggacacgtacgacacggaccgcgacgggcgtgtgggttgggaggagctgcgcaacgccacctatggccactacgcgcccggtgaagaatttcatgacgtggaggatgcagagacctacaaaaagatgctggctcgggacgagcggcgtttccgggtggccgaccaggatggggactcgatggcca

SEQ ID NO: 514 - DNA, 1251 bp, Homo sapiens
gcccacgcgtccgcccacgcgtccggcggtgcggagtatggggcgctgatggccatggagggctactggcgcttcctggcgctgctggggtcggcactgctcgtcggcttcctgtcggtgatcttcgccctcgtctgggtcctccactaccgagaggggcttggctgggatgggagcgcactagagtttaactggcacccagtgctcatggtcaccggcttcgtcttcatccagggcatcgccatcatcgtctacagactgccgtggacctggaaatgcagcaagctcctgatgaaatccatccatgcagggttaaatgcagttgctgccattcttgcaattatctctgtggtggccgtgtttgagaaccacaatgttaacaatatagccaatatgtacagtctgcacagctgggttggactgatagctgtcatatgctatttgttacagcttctttcaggtttttcagtctttctgcttccatgggctccgctttctctccgagcatttctcatgcccatacatgtttattctggaattgtcatctttggaacagtgattgcaacagcacttatgggattgacagagaaactgattttttccctgagagatcctgcatacagtacattcccgccagaaggtgttttcgtaaatacgcttggccttctgatcctggtgttcggggccctcattttttggatagtcaccagaccgcaatggaaacgtcctaaggagccaaattctaccattcttcatccaaatggaggcactgaacagggagcaagaggttccatgccagcctactctggcaacaacatggacaaatcagattcagagttaaacagtgaagtagcagcaaggaaaagaaacttagctctggatgaggctgggcagagatctaccatgtaaaatgttgtagagatagagccatataacgtcacgtttcaaaactagctctacagttttgcttctcctattagccatatgataattgggctatgtagtatcaatatttactttaatcacaaaggatggtttcttgaaataatttgtattgattgaggcctatgaactgacctgaattggaaaggatgtgattaatataaataatagcagatataaattgtggttatgttacctttatcttgttgaggaccacaacattagcacggtgccttgtgcakaatagatactcaatatgtgaatatgtgtctactagtagttaattggataaactggcagcatccctga

SEQ ID NO: 515 - DNA, 4412 bp, Homo sapiens
aacattagatctcaatgaaaaccagaatggaaccctttcactatcataaactcatttataaaagtgcccatgatgaatagcaagaagtacccagtggcccatctcattgaccaaacttagaaagccaaggtggggcatctgcagctctcccacaatctgagtttgtgttgatccttgtaccccacaacctgaaacatcttcttatatatatcgagcgagctctcagcccttctgttttcaaggccatcatggagaaactggagatgtccaagttccagcccactctcctaacactaccccgcatcaaagagactaagccagactatgggggaaagggagataagaaggatcctggaactttaaagagggaaagagtgagattcagaaatcgccaggactggactttaagggacgtcctgtgtcagcacaagggactggcacacacagacacacgagaccgaggagaaactgcagacaaatggagatacaaagacttagaaggacagctcctttcacctcatcctacttgtccagaaggtaaaaagacacagccagaaagaaaaggcatcggctcagctctcagatcaggacaggctgtggatctgtggcggtactctgaaagctggagctgcagcacaccccttttgtattgctcaccctcggtaaagagagagagggctgggaggaaaagtagttcatctaggaaactgtcctgggaaccaaacttctgatttcttttgcaaccctctgcattccatctctatgagccaccattggattacacaatgacatggagaatgggaccccgtttcactatgctgttggccatgtggctagtgtgtggatcagaaccccacccccatgccactattagaggcagccacggaggacggaaagtgcctttggtttctccggacagcagtaggccagctcggtttctgaggcacactgggaggtctcgcggaattgagagatccactctggaggaaccaaaccttcagcctctccagagaaggaggagtgtgcccgtgttgagactagctcgcccaacagagccgccagcccgctcggacatcaatggggccgccgtgagacctgagcaaagaccagcagccaggggctctccgcgtgagatgatcagagatgaggggtcctcagctcggtcaagaatgttgcgtttcccttcggggtccagctctcccaacatccttgccagctttgcagggaagaacagagtatgggtcatctcagcccctcatgcctcggaaggctactaccgcctcatgatgagcctgctgaaggacgatgtgtactgtgagctggcggagaggcacatccaacagattgtgctcttccaccaggcaggtgaggaaggaggcaaggtgagaaggatcaccagcgagggccagatcctggagcagcccctggaccctagcctcatccctaagctgatgagcttcctgaagctggagaagggcaagtttggcatggtgctgctgaagaagacgctgcaggtggaggagcgctatccatatcccgttaggctggaagccatgtacgaggtcatcgaccaaggccccatccgtaggatcgagaagatcaggcagaagggctttgtccagaaatgtaaggcctctggtgtagagggccaggtggtggcggaggggaatgacggtggagggggagcaggaaggccaagcctgggcagcgagaagaagaaagaggacccaaggagagcacaagtcccaccaaccagagagagtcgggtgaaggtcctgagaaaactggccgccactgcaccagctttgccccaacctccctcaacccccagagccaccacccttcctcctgccccagccacaacagtgactcggtccacgtcccgggcggtaacagttgctgcaagacctatgaccaccactgcctttcccaccacgcagaggccctggaccccctcaccctcccacaggccccctacaaccactgaggtgatcactgccaggagaccctcagtttcagagaatctttaccctccatcccggaaggatcagcacagggagaggccacagacaaccaggaggcccagcaaggccaccagcttggagagcttcacaaatgcccctcccaccaccatctcagaacccagcacaagggctgctggcccaggccgtttccgggacaaccgcatggacaggcgggaacatggccaccgagacccaaatgtggtgccaggtcctcccaagccagcaaaggagaaacctcccaaaaagaaggcccaggacaaaattcttagtaatgagtatgaggagaagtatgacctcagccggcctactgcctctcagctggaggacgagctgcaggtggggaatgttccccttaaaaaagcaaaggagtctaaaaagcatgaaaagcttgagaaaccagagaaggagaagaaaaaaaagatgaagaatgagaacgcagacaagttacttaagagtgaaaagcaaatgaagaagtctgagaaaaagagcaagcaagagaaagagaagagcaagaagaaaaaaggaggtaaaacagaacaggatggctatcagaaacccaccaacaaacacttcacgcagagtcccaagaagtcagtggccgacctgctggggtcctttgaaggcaaacgaagactccttctgatcactgctcccaaggctgagaacaatatgtatgtgcaacaacgtgatgaatatctggaaagtttctgcaagatggctaccaggaaaatctctgtgatcaccatcttcggccctgtcaacaacagcaccatgaaaatcgaccactttcagctagataatgagaagcccatgcgagtggtggatgatgaagacttggtagaccagcgtctcatcagcgagctgaggaaagagtacggaatgacctacaatgacttcttcatggtgctaacagatgtggatctgagagtcaagcaatactatgaggtaccaataacaatgaagtctgtgtttgatctgatcgatactttccagtcccgaatcaaagatatggagaagcagaagaaggagggcattgtttgcaaagaggacaaaaagcagtccctggagaacttcctatccaggttccggtggaggaggaggttgctggtgatctctgctcctaacgatgaagactgggcctattcacagcagctctctgccctcagtggtcaggcgtgcaattttggtctgcgccacataaccattctgaagcttttaggcgttggagaggaagttgggggagtgttagaactgttcccaattaatgggagctctgttgttgagcgagaagacgtaccagcccatttggtgaaagacattcgtaactattttcaagtgagcccggagtacttctccatgcttctagtcggaaaagacggaaatgtcaaatcctggtatccttccccaatgtggtccatggtgattgtgtacgatttaattgattcgatgcaacttcggagacaggaaatggcgattcagcagtcactggggatgcgctgcccagaagatgagtatgcaggctatggttaccatagttaccaccaaggataccaggatggttaccaggatgactaccgtcatcatgagagttatcaccatggatacccttactgagcagaaatatgtaaccttagactcagccagtttcctctgcagctgctaaaactacatgtggccagctccattcttccacactgcgtactacatttcctgcctttttctttcagtgtttttctaagactaaataaatagcaaactttcacctattcatgagttattattgaaacctcaaatcataaagacatttaaaagaattgtttttctaactggaggggctctagtgctaaataatagtactgaaaattgatattattttccttttcttatatgaaggaccttatttggcatataaaattttataaaatatgtatttaaagctttttcttattttttgtattaattggtaagtgaaaactctgttaaagatcacaccacaatgttttcaagaaacatctgaaaagataaaacaaagaacaaataacttataatacttacttaaattgacactttttgaaatgccagtctgaaaataattaagatatctctgctttgtatgagtttcttttatgaaacttgataccacgggagtccagtaatattggccacaaaagccagagaaagtaccaagcccagctttgttatcatagccacttcctgccctgcttctgttatttttagtgttttttcagatataaatcggggtccaggaaatcctcaccagaatctggcactgcagccaaaggcgatacttccagagttctagtaggctgctatggaatttctggcatgaaaattcttgacccctcacactttaccccctgtacagca

SEQ ID NO: 516 - DNA, 969 bp, Homo sapiens
ggcacgagtagcagcgtggcttccctggctcctctctgcatccttcccgaccttcccagcaatatgcatcttgcacgtctggtcggctcctgctccctccttctgctactgggggccctgtctggatgggcggccagcgatgaccccattgagaaggtcattgaagggatcaaccgagggctgagcaatgcagagagagaggtgggcaaggccctggatggcatcaacagtggaatcacgcatgccggaagggaagtggagaaggttttcaacggacttagcaacatggggagccacaccggcaaggagttggacaaaggcgtccaggggctcaaccacggcatggacaaggttgcccatgagatcaaccatggtattggacaagcaggaaaggaagcagagaagcttggccatggggtcaacaacgctgctggacaggccgggaaggaagcagacaaagcggtccaagggttccacactggggtccaccaggctgggaaggaagcagagaaacttggccaaggggtcaaccatgctgctgaccaggctggaaaggaagtggagaagcttggccaaggtgcccaccatgctgctggccaggccgggaaggagctgcagaatgctcataatggggtcaaccaagccagcaaggaggccaaccagctgctgaatggcaaccatcaaagcggatcttccagccatcaaggaggggccacaaccacgccgttagcctctggggcctcggtcaacacgcctttcatcaaccttcccgccctgtggaggagcgtcgccaacatcatgccctaaactggcatccggccttgctgggagaataatgtcgccgttgtcacatcagctgacatgacctggaggggttgggggtgggggacaggtttctgaaatccctgaagggggttgtactgggatttgtgaataaacttgatacactaaaaaaaaaaaaaaaaaaaa

SEQ ID NO: 517 - DNA, 1334 bp, Homo sapiens
tctcagtggtcagaggctgtgttggacccatagtagaattttccagtcacagacccaagcttccatgggttgttactgtgctgtaccacttggtggktctgattctgaacctgatgtgtgtgttaattatattttaagcaacacacacacacacacacgcctcatgtaatggacttttataacaaaagaaaaaatttggatttctaatttacaaatggcaaattatttatccctctctggatgcaccaaagaccagtaaagtttatagcttttccatctatatttataaagcaatactgtattataaaaatcaatatttttatcacatgcttgaaatttttattttgttgttttaaaatgtgcactctaaacatatcagaaccttatttcttcctatgaacttaagctgcctgcgcacaaaaaaaaaaaaaatttaccaaatggagatgcagtagagtccataggctctaaaaactaaaagaaatgggatgcagggggaacaagttatttgtcctgagttactgtacttgcttgacatggttgttgggtactaaatcacaaaagaatccattccaggtatgcatgtctgggggttgggctgtgtctagattagaaactgggtttcaagctttgcatgatgggagagcgtcctctcctctatcagctgcgtgtgttctggataggacagtagcccggagatggaaaccaccttcagtaccattagcccaccataccaagtaacaagttaggcaggaatcgtgggaatttattgagtcagctttgagtgtttgagagaatgtaaacaagattggctcgaattgtaaacgtttgtactttggatgagttcatggttctttaggtcaccttaataccagctatctttggtagaagctacagcattcagtttctctggaaactgtatcacatttttgcattttaaaaattttacagtatcaaaaaaccaaaatctgcttatgaaacaaaacatgaagcaggacatatttggattctatttatttaaaattaaattctttgcaaaattgaacttctcaactaaaacgtgtccatgtcagaattttaactgttagcaggtagtttgtggcaaagatggctaaataatgaagcaaattagaatctgtgtgtatactaatgagctgctttttttctgttgagactatcattatttgtcttattacccaagaggcaattacctgaatttggatgtctgaattataacttatgcaggaatagttctgtaaatacatttaaataaactgtaaagatatttaataaatatagtatttatactaaaaaaaaaaaaaaaaaaactcgag

SEQ ID NO: 518 - DNA, 1476 bp, Homo sapiens
  misc_feature (1)..(1): n equals a,t,g, or c
  misc_feature (69)..(69): n equals a,t,g, or c
ncctatttctgcttactgtgttaccagagagcctgggggtctggatcctatctggccccgtcaggtggnattgccaaatgagcagttctcttgccccagtccctttcctgtgctataaataagccccatgtttattttcttatgttattgaaatgagcacttgtgatttgggcctcttttgaggagtccagagagcgtccatccggtgcctggtgagggccctgcatggctggctgctgtctgaagctatttggagtcctctccctgtgttttctatgtggcttaatttcaatagaaagggttatatgcaaccctgtatctgctgattttcaggtttcaactttctgccagcgtcactgcctgcttagaagtaaagttatgtttctcattaaggggataacagccacaattgaggtaattaacgaaaattgtacattggtggcagcacctcctataggatttccaatagtctttctctagtagatcattgggggctcaccttgatctcctctcttctgtctaccctgcaccaaaataccttgtcctgttttctggatatagttccaataatttttttcctaacagcctttttgtcaccagttggtttgatatcttacaacttggccaaatgagggttccattaactccatcttgtctaatgcatggagaattcaaggattttttttttcctcttttcatagcaccttccagttgccagttgtaccctggcccttctttggaagtcataatgatgaatatccattaataagagattgatgctctttcaactctcatgtcatctataccatctcagtggagaggatgactttggatgaggttggaatagaaaggaaacatttggaagtccactgcagtgtattatatgctgtgtggaagtctgggggttaggaaatacctggagggagaacttcctaagaaatgatttttggttcttttaggccttaacagcacaataaaagtatcccatgagaccattatgagcaggacacgacattgtttcacaccttgggctgtgactatttacttctcggtacagattactctggttaaatcactcagtaaagaaatcttttcatgctcacaatctgaacctgaaggctattactgaagagaattgcatctgacaacaaaatttaatttacttccagagaaaggaccagaagaaagtaaattttcatttatgtttttaagtctattgtcttaaaaagattcttttcccttaaaaaataaaaaaacctgatgtgatgggttccttcagtcaacaaatacttattgagcagttattgtgtgccagatactgttcttggtgtgaggatatggcactgaacaaaacaatgtacctactttcgtcaagcttacattctagtgaggaagataaccaaaacaagtgactgaatataatttcaaatgtcaataaatgctgtgaagaaaataaagcagagtattatatgtaaa

SEQ ID NO: 519 - DNA, 2126 bp, Homo sapiens
ggcacgagttgctaagttgattaaaggttggtcttccactctgccactggccacagcacaaagtgaaaacagatgtcacaagcaccttgtagatctgtcccttttttcttctgatgttcaccctccttttgagctctttctttctccaacattgcttacaaaataatctttatgcatctgagagggagcaaatattcagtaactttctgcagctgtcctcactaaagaggagaatctgttgaatgccactggaaatgtaaggatctcttgtgacagtaacatctcaaggggaaactagtggttaaattgttaattctttgagtctgaaacttttttcatttgcagtgcagataagtgcctgatcttgcagtatcacgtttctgacttctttgttctggcttcattttttttttcccaaaatgccattttcatttgttcttagagttcagaacatgtcaaagagcttctttaagcagtaggtggttttacagagcccacagagaaggaaaactaaatatcatcccggatgcagtccactacgatcgtggaggagtcagattactctccgggctttgctgtgtctgcttgtgaaacaggaaagggagaactgaggcaatgagtcacctcacttgggcccaaagcaccacctacgttgaatatggagaaaatgtgaagcaagagtttctttttatacataatcaccatttgtacataatcaccattttctccatggttcttatccaattcagtgcatcttaaaggatggtttgtggaatcatgacatagcagaaaaatccaggtactatcagtcttgcctgtttctacctaactctttcatttaaactctcactagaatctataggaactgttagcatcaattttaataagttgtcaactaagtgattagtggtatttattggttatttttgacaaaataatggaatcatcaaattttgaagttgagaagtaaagtaaaaatttgtgccaaaccccaaatgtagacaaggtcatattataaacattaatgctgtcccaaactgccaatgcattgcgtagaactgaggttagcaggttaccattgatttcctctacttatgctttaagaggttggcattggtaagccgctacactttcttggtcaatgaggcagaaacccctttgcaaaactctcaactgatgaaaagattagctagaatgactctaggaactgttttctaaggatctgactcattgattcctttttttggtagggttctctgggccaagttagttcgagtatttatcatttaaattaggatattaccatcaccatcatcatgtacattcataaatcaaagcaagattagagaaggaatatggtggatcacagagcaactcagaaagacgacagcaacaactaggaaatgaaacaccatggttgtatttcaggaaccctacccagcagataggaattaccatagctcctaaaattccatctgggtggttgatggagcctcaattaatctgacaccatagcccatgctcccctcttgctacctgctgaagttagcagggaaaagtcaaagagggtgctgtcagtggggtcaattcttagggatcatagtgaaccaccctccattgcactgactctttcccacaaaatgggctagagatagcagctctccttatgtatttaagaaagaatggtcaaaaaatacaattcacattttattctggtatataccattttgacagtgtttcacaatgtaggtaatatgaatgggagtatttaaacacaatcctgtttaatattcttagccagtacttattaaatgcctaccaagcctggcattgttctagagacctcaaaatacacctttaaaaacatattttattgacagttgtataaatgaagaaaacaagtctcagaaaattaaagtgacttgcacagatacacaagctagaaagtaataaaactgaattttgaacccaggtttgtcagactctaaagtccatgattttctgctccatgtggccaacccagttagaaaggttataaaaaatcttaacagtttttcagcccttctcacacttagctttaggattaaaagtattggtcatgatttgcaaaaaaaaaaaaaaaaaaa

SEQ ID NO: 520 - DNA, 1370 bp, Homo sapiens
cagcatcagcagtgtgatggtacaccaagaaggggctgttgatataaatttttttaaaatattggtatagttaaatacttatattttaaaatattggtgtgttttttggtgctataaattactaacttgtgtgttcctaaaatcaagttgaaactaggataattgtctagttcttgctttgataagaacgcagtagttctgatgcttgtgtccatgtgtatgggtctgttattcttgcaagtgggtaagcaatgcatagcttttttttatactgagagcactagaaggccaaagcatctcaaaaccatgggttctgggtatgcataatttttggaaaggcacgataagcaaatctcacagtctggctggtcagcagctgcagggataaggagactaattgccaaggccatgcaaatgcaaagaggaaggtgaggaggattcccagatgtgatcatagcttgcaaagatggtcatctcatggggccagaattcgtgcatgcccacacctacaaagctgagaactggtagtggtcatgtgtccgcttcaagcaatgcatgtattcacagccgccagcatcaagaggggccatcttttgataggatgacacatgcatgttcaaacatattttaaaagattagggagaaaagaatactgtgaacaaatagaacccaattatgagcaaattcacgaattcgggtatgtactattgtggctggcaaaagccacttaaactaggctctctagcctgattttcagccatcattacccctcactaagaatccttgtaaaatttcttccgtaaaagttaattacactcatcaccactgtttgctaatgggagcaaacccctagccaatattttttagaataatatggttgggataactttttttttttttttttgctaaatgaatgcatgattatcttatacaataaaagtataacacaaaatactgttttaagatagtcgctgggactctccttacccttgaagtgtccccctttccctcctccacatccagtcaaccgcaggttcctcccaggtttactatctgacatgttttagctctcttccttcttttccattcctctacaacttctctagttctggctttcattgtttctcaaccaaaacagtctccccttctctctcctccattcttgcgtccttccaaaacatcctctccaccctgccagagcagctcaccttagtcacagtctgactgcaactgcatgtgcttatcaatcctctcatttctcctcatcacctataacagtgcttttgacgctgcaacttgtgagccatttcgcgggttagaaaataagtttcatgggttgtaaccagtagtttaaaaaaaaaaaaaaaaaa

SEQ ID NO: 521 - DNA, 1397 bp, Homo sapiens
  misc_feature (1383)..(1383): n equals a,t,g, or c
  misc_feature (1396)..(1396): n equals a,t,g, or c
ggtccctaggagttgagcaggaacaggcatctgtggtttacggcgacctggctctccgcrggccacgtgggtggtgagggcacacgagtgggaagcggcaccgacgtgtttctccccgaccgtggctttgccaaagacttttaatagcattttttaagtgcaaaacgtctaggtaaaaatctttatcatcagtgaccaaattagaatgtatttaatatagtaggtggtttaagaactgttttaacgtaagacaaactgatagcaacattctgttgttttaaaggaagtgggtccgtgacattctgcagctagtccactactccaaggtaactatcgacttggtttcagtgaatctattttgtttttaactacagtgatttattagctcagtatctagaaattacgtatattttgtgctactgtcatcgatgtgtaaactctgtttttatttgtatttatgcacttggttcccatttggagcctctggtcttttctgggataagtggtgtctgccgagacatctcccggttgtcagtggtcaggagcagctgagctctagtctgccagctgctctgctctttctgggaaggaggtggcgcccgcccctcagggtgtctccagggctcagcttccggggtggtagagctggggagccccaggggtggggggacagctgggagatggaggtggcacctgctcccctagatcagtactggctctgaggacaggtgagcagtgggaagaccaaagaatggctggcagcgctgccarggttggaaatgggggcaagatcctggggctgtgtgccctggggcctccctcacctgtcttggtggccatggcctcagggatggctcctaggtggctgaggcacagcagtggctggaaggtgccccgtggaggctgaggtggaggcgcgcccagcagctcccccctgtggccatggcgggcacgggscgtaggagctggctggcggccggctctgcatgttcttgttgcctgtcgtctgtaactctagtgttcgacattcgccgtgatacagtggtgtcacgacgtgtgtaactgtggtcagcagaccttgttccgcgtggacgcctcaagtggattaatttctggaagcctcaatctgtatgtttgagtatttacatgagaatgttatttgaatggaattttcttaacccagaaggtagtatttataatcatttacttgtagcgaactgtttaaagttaacacttgtttaaatttttttacactatagcatttatgcaatggtttacagaattcatggagttatttttatcagtatgggaattaattaaaaccttgaatcttaaaaaaaaaaaaaaaagggcggccgctctagaggatccaagcttacgtangcgtgcatgcgana

SEQ ID NO: 522 - DNA, 931 bp, Homo sapiens
ggcacgagcggccgcgggacatccacggggcgcgagtgacacgcgggagggagagcagtgttctgctggagccgatgccaaaaaccatgcatttcttattcagattcattgttttcttttatctgtggggcctttttactgctcagagacaaaagaaagaggagagcaccgaagaagtgaaaatagaagttttgcatcgtccagaaaactgctctaagacaagcaagaagggagacctactaaatgcccattatgacggctacctggctaaagacggctcgaaattctactgcagccggacacaaaatgaaggccaccccaaatggtttgttcttggtgttgggcaagtcataaaaggcctagacattgctatgacagatatgtgccctggagaaaagcgaaaagtagttatacccccttcatttgcatacggaaaggaaggctatgcagaaggcaagattccaccggatgctacattgatttttgagattgaactttatgctgtgaccaaaggaccacggagcattgagacatttaaacaaatagacatggacaatgacaggcagctctctaaagccgagataaacctctacttgcaaagggaatttgaaaaagatgagaagccacgtgacaagtcatatcaggatgcagttttagaagatatttttaagaagaatgaccatgatggtgatggcttcatttctcccaaggaatacaatgtataccaacacgatgaactatagcatatttgtatttctactttttttttttagctatttactgtactttatgtataaaacaaagtcacttttctccaagttgtatttgctatttttcccctatgagaagatattttgatctccccaatacattgattttggtataataaatgtgaggctgttttgcaaacttaaaaaaaaaaaaaaaaaaa

SEQ ID NO: 523 - DNA, 1044 bp, Homo sapiens
ggattttcagagacaaaggtccaagttaggagacgtaattactcagtgctttgaagggacatccaaggtgctcactcttagccatagccgttggtttcctggatgctgactgtgaagattctaaagtgcttcctagggtgggcggtggtggcaggaggccttggacggagtcaggccagacccagcctcctgtttaataggctgagcccaagcgtccctcagatgcgaatccaacagccttggtgagttgtaagatttcatggaaactttccctgacttctgtctcccccttgctccccattacctgggaaaggcagctttgtgggccatgtgtcccggaagggcctgggctggctgtggcccagtgctcaggaccagccatcttggccctcacagcgccctgcccagttggtgtaatatttgtyttcaagccattgttggagcaggcaggcaaagggggctttctgaggatccaacgtgtgccagccactgggatacaaagacaggcctggttcctagctgtggggctgggaagggtatctgacatcaatggtggcacctggcagaggacacacagacaacagcaggcagcatggacttttatgtttgtagcttgagctggttttaattggaagctctgtgatttacataatcacttacaatctctgtaaataaggaactatttatgaggaattgtaaatttcctctctcccccttcttaccctgtctgtgatcttgtctgtgatgcagtaatgatattccactctaggttcccatgatcagtggtgaaatatagtgattttcacctgtgcttccattctgaagttctggaaagaagtactggatggactgaagtccaggacaacgtyccaaagaaaggcagagtccaggtaggcttggaggaccaagccctggatgagcactggagggcagaggcctcagtgtccagcactgtgccctgcacatggaaagcccctacgtttgtggaatgaatgaataataaaaatgttttcataagtgaaaaaaaaaaaaaaaaaactcgag

SEQ ID NO: 524 - DNA, 1143 bp, Homo sapiens
  misc_feature (1100)..(1100): n equals a,t,g, or c
ggcacgagggctggggtcagcaaatatacagggggccgaggcgtcacgtgggccccatcctcagcagcagtgcctcggatatcttctgcgacaatgagaatgggcctaacttccttttccacaaccggggcgatggcacctttgtggacgctgcggccagtgctggtgtggacgacccccaccagcatgggcgaggtgtcgccctggctgacttcaaccgtgatggcaaagtggacatcgtctatggcaactggaatggcccccaccgcctctatctgcagatgagcacccatgggaaggtccgcttccggggacatcgccttcacccaagttctccatgccctcccctgttccgcacggtcatcaccggccgactttgacaatgaccaggagctggagaatcttcttcaacaacattgcctaccgcagctcctcagccaaccgcctcttccgcgtcatccgtagagagcacggagaccccctcatcgaggagctcaatcccggcgacgccttggagcctgagggccggggcacagggggtgtggtgaccgacttcgacggagacgggatgctggacctcatcttgtcccatggagagtccatggctcaaccgctgtccgtcttccggggcaatcagggcttcaacaacaactggctgcgagtggtgccacgcacccggtttggggcctttgccaggggagctaaggtcgtgctctacaccaagaagagtggggcccacctgaggatcatcgacgggggctcaggctacctgtgtgagatggagcccgtggcacactttggcctggggaaggatgaagccagcagtgtggaggtgacgtggccagatggcaagatggtgagccggaacgtggccagcggggagatgaactcagtgctggagatcctctacccccgggatgaggacacacttcaggacccagccccactggagtgtggccaaggattctcccagcaggaaaatggccattgcatggacaccaatgaatgcatccagttcccattcgtgtgccctcgagacaagcccgtatgtgtcaacacctatggaagctacaggtgccggaccaacaagaagtgcagtncggggctacgagtcccaacgaggatggcacatacgggcttgtc

SEQ ID NO: 525 - DNA, 791 bp, Homo sapiens
ggcacgagctgcatttgatctcattctttagtccaatgtaagtaagagtaaaacaatgacatttaaggccaccaggctattctcatttttggaaaaatgctggattacattaccagcatattaaatgagaatatcaaggtgtaatatctccctagaaattgtctcaccttcaatactattgacatttttggacctgataattttgttgtgggctctagcctcatgttataggaggtttaccagttttcctgccctaaacttaccggatgtgaatagcacactccactacctacagcagtaaaaactaaaattgtctctaaacattgacaaattgtccctggtagtgaaaatcacccctggttgagaccgtgttgttgaaaataaaacaaaaactttcacatcaataaatatgttaggctgtgtatgttaaggattaacattaagacaatatggagcaagcactacatgaaagcagtgacgattggggaattagtggcacattatcctaatagttaatatagtgactgtaatatctaaatatcatcctatagagtttttcttagattttttcattagtataacaggatgttgtgtatgttacactgtatatactgttattttgagagacaattttgggaattttgccaaggtattttcaattataggtctttaatacattctaagcaagtgggtctcaaaaatgggaattttacaccccacattcttcttcccatccggtggacatttgtcaatgtgcgcaaatatttctgattaaaaaaaaaaaaaaaaaa

SEQ ID NO: 526 - DNA, 2425 bp, Homo sapiens
cgctgccgatcgccgggaggacccccgcctcgccgaagacgggcggggcaagccgagcctcacggggtccccggagctgggccgggcctccagatggagaaggcgcaacggggagttcttgagtaagccagagcggtgtccagcgcggtgtagccgcagccgccgctgtcaggcgcagcaacggacaaccccgtagaagtcggtcggcaggtcctctccaacccgccgctaccgcgccgctgtgggagagaccccagcaggagcccaagggcagctacgggggcgcgaaggccgctggcgccgcctcggccagcccttcccgcgcggttccactgccttaaggatgacagtcgtagggaaccctcgaagttggagctgccagtggttgccaatcctgatactgttgctgggcacaggccatgggccaggggtggaaggcgtgacacactacaaggccggcgaccctgttattctgtatgtcaacaaagtgggaccctaccataaccctcaggaaacttaccactactatcagcttccagtctgctgccctgagaagatacgtcacaaaagccttagcctgggtgaagtgctggatggggaccgaatggctgagtctttgtatgagatccgctttcgggaaaacgtggagaagagaattctgtgccacatgcagctcagttctgcacaggtggagcagctgcgccaggccattgaagaactgtactactttgaatttgtggtagatgacttgccaatccggggctttgtgggctacatggaggagagtggtttcctgccacacagccacaagataggactctggacccatttggacttccacctagaattccatggagaccgaattatatttgccaatgtttcagtgcgggacgtcaagccccacagcttggatgggttacgacctgacgagttcctaggccttacccacacttatagcgtgcgctggtctgagacttcagtggagcgtcggagtgacaggcgccgtggtgacgatggtggtttctttcctcgaacactggaaatccattggttgtccatcatcaactccatggtgcttgtgtttttactggtgggttttgtggctgtcattctaatgcgtgtgcttcggaatgacctggctcggtacaacttagatgaggagaccacctctgcaggttctggtgatgactttgaccagggtgacaatggctggaaaattatccatacagatgtcttccgcttccccccataccgtggtctgctctgtgctgtgcttggcgtgggtgcccagttcctggcccttggcactggcattattgtcatggcactgctgggcatgttcaatgtgcaccgtcatggggccattaactcagcagccatcttgttgtatgccctgacctgctgcatctctggctacgtgtccagccacttctaccggcagattggaggcgagcgttgggtgtggaacatcattctcaccaccagtctcttctctgtgcctttcttcctgacgtggagtgtggtgaactcagtgcattgggccaatggttcgacacaggctctgccagccacaaccatcctgctgcttctgacggtttggctgctggtgggctttcccctcactgtcattggaggcatctttgggaagaacaacgccagcccctttgatgcaccctgtcgcaccaagaacatcgcccgggagattccaccccagccctggtacaagtctactgtcatccacatgactgttggaggcttcctgcctttcagtgccatctctgtggagctgtactacatctttgccacagtatggggtcgggagcagtacactttgtacggcatcctcttctttgtcttcgccatcctgctgagtgtgggggcttgcatctccattgcactcacctacttccagttgtctggggaggattaccgctggtggtggcgatctgtgctgagtgttggctccaccggcctcttcatcttcctctactcagttttctattatgcccggcgctccaacatgtctggggcagtacagacagtagagttcttcggctactccttactcactggttatgtcttcttcctcatgctgggcaccatctcctttttttcttccctaaagttcatccggtatatctatgttaacctcaagatggactgagttctgtatggcagaactattgctgttctctccctttcttcatgccctgttgaactctcctaccagcttctcttctgattgactgaattgtgtgatggcattgttgccttcccttttgccctttgggcattccttccccagagagggcctggaaattataaatctctatcacataaggattatatatttgaactttttaagttgcctttagttttggtcctgatttttctttttacaattaccaaaataaaatttattaag

SEQ ID NO: 527 - DNA, 1543 bp, Homo sapiens
  misc_feature (76)..(76): n equals a,t,g, or c
cttgactgtgttttattatttcatggcttgtatgagtgtgactgggtgtgtttctttagggttctgattgccagtnattttcatcaataagtcttgcaaagaatgggattgtcattcttcacttcagcacagttctagtcctgcttctctggagtagggttgttgagtaaggttgcttgggttgtgcattgcacaagggcacatggctgtgaggtgtatcctggcggggggctgtctacctgcagtgaggggcaccttttctgttttgctcaaaggcatgtataagccaatgggtgaccttatttcctgtgtcttcaggtgtgtggcagggggcctggggtggggaggtggggcgagcgagcagtgtgtggaaagccttgttgtcacctgaagcacgccaggtccagattgaccaatggttttctcacttcagggccmacccacgccccctttctgctgaggtttgggtgccatctagtggtgggatgggacttggttgactacatttaaggtaaggtggacccagcaactcccagaaacaactccggggacaccactccccatcacactccacaccgagcctggtgcccggtctgtgcccgagctcagcgggaccaggaagggatgggccctgccagggttgcccctgcactgtgcattctcgcctgggaggcacaagttctttcatctgcttttccttcagaggtgctgagcccacgccatagcccctgtgggatggtgggggagggggcgacccgaacaacagtgcagtcggtatcgagattggggagaggagcgagtccaaggagaaggtcatgagtttctttttactcgtgttgaataataacaataacaataacaatatggaaaccaccgcaaacttggagaaaagttgtaagcacagtaaagagaagcttccttctgagtcacttgagtggttgccgttctggccctgcaccctctgtgctttgggacggcgtccaacccgcattcatgtcaggagtgagtcgcacgtggctttgtggtcatggcgacttaatctgcctggacggtggctccgtctccctgggcttagacgaccttggcacttctggagataagcccatggctcccaggttgtgttcatgtgacgtttccttgtggtaggttctgggtctgcgttttgtctaggagtgtcacaggatggacactgcctcctggcaggggctgcccaatgcagttagcctcctgctggtgttctctcttgttgcttggtgaaggtggccctggtcagcttctccactgcccagtgaacgacccctttgtaatgaatgagtggggaggtagtgtgaagcgatgccaatatcccatccctgtcaaactgcctttactttttccttccttccttgctcccacctgtgtggatcctggtcccttcttgtattcagggctgtggtctgttatgacatttactctcaggctcaggtcctgcttgtttggcccgtgggagccccttcttctgccttttgtgttkttttggtatgtacctacattatttaactgg

SEQ ID NO: 528 - DNA, 1174 bp, Homo sapiens
ggaattcggcacgagctggctgcagggtctctggggagagaaggggcctcggcttcacaggatggggctgccagtgtcctgggcccctcctgccctctgggttctagggtgctgcgccctgctcctctcgctgtgggcgctgtgcacagcctgccgcaggcccgaggacgctgtagcccccaggaagagggcgcggaggcagcgggcgaggctgcagggcagtgcgacggcggcggaagcgtccctactgaggcggacccacctctgctccctcagcaagtcggacaccagactgcacgagctgcaccggggcccgcgcagcagcagggccctgcggcctgccagcatggatctcctgcgcccacactggctggaggtgtccagggacatcaccggaccgcaggcagccccctctgccttcccacaccaggagctgccccgggctctgccggcagctgcagccaccgcagggtgcgctggcctcgaggccacctattccaacgtggggctggcggcccttcccggggtcagcctggcggccagccctgtggtggccgagtatgcccgcgtccagaagcgcaaagggacccatcgcagtccccaagagccacagcaggggaagactgaggtgaccccggccgctcaggtggacgtcctgtactccagggtctgcaagcctaaaaggagggacccaggacccaccacagacccgctggaccccaagggccagggagcgattctggccctggcgggtgacctggcctaccagaccctcccgctcagggccctggatgtggacagcggccccctggaaaacgtgtatgagagcatccgggagctgggggaccctgctggcaggagcagcacgtgcggggctgggacgccccctgcttccagctgccccagcctagggaggggctggagacccctccctgcctccctgccctgaacactcaaggacctgtgctccttcctccagagtgaggcccgtcccccgccccgccccgcctcacagctgacagcgccagtcccaggtccccgggccgccagcccgtgaggtccgtgaggtcctggccgctctgacagccgcggcctccccgggctccagagaaggcccgcgtctaaataaagcgccagcgcaggatgaaagcgaaaaaaaaaaaaaaaaaaaaaa

SEQ ID NO: 529 - DNA, 1766 bp, Homo sapiens
cggcacgaggagcactgaagtattcactacatgaagtatattttgcactgtggacacaaattagaaaaattgcaagtagtggtatattgtaattggcatgcactatatgagcagagtcaatgtgtctccttgtagaatattctctgatgatactcactattatcccctctctgctaagctttgttctgtgtctgaagggcataaagcatggaaactacatttttcagactccattaccagaaggatatggttggatttcagcaatgagtgggctttgcataaaatttggaagacgaaagagaagaaaaacctggctgctgcaggttggaacactggcaacaatagatacggagtttgcaagaagctgctaagcttcctcaggaaaattatttgtttcaatatttctggcatatgggatcatcaattattgttttcagtggttctggctgaaaattggttcaattcttctatctgagaattgttcatttctgtgcttcaggaaactaagaccatcactggcagtttttgttgagggatccttgtgcattcatttttccttaaaacagccttcctaacttttactcccccagcctctatggttgtgtaagtctttaattcttagagttacatttctcttactcagtatatcctagtgcggcttctgttttccagacccaaccctgactgatatagtctccatgtgtttcagatggtgggatagtttggatatttgtccctgcccaaatttcatgttgaactctaatccccagtgctgtaggtggggcccaatgggaggtgttcggatcatgggggcagatccctcacggcttggtgctgtcttcgtgatagtgagttcttgtaagatctggtcattttaaagtgtttggcacttgtaccatttcactgtgtcttgctcctgctttcaccatgtgaagtgcctgctccagcttcacttttcaccatgattgtaaacttcctgaggcctccctagaagccaagcagatgccatcaccagggttcctgtaaagcatgcagaactgttagccaattatacctcttttctttacaaattaaaaacctcttttctttacaaaatggaaagaataaaggtatttctttatagcaatgcaagaacggcctaatacagatggctctgccattagtgagaaaattgagacgctttctctagatggcaaaaaagttgtaaaaataaaaggaaattattaatataccgtctattgtgatcatttactaagttaagcatattattaagaagacaagcataagtttaacacaatttggcaatgaataaaattgaaggagagagagcatatgttggctttgctctgtgaaactcaaatgaaatggtcacctgttctagcagctcatgaaaaattctgcattgtttattatgtgtcaggatcaaccttaaattcagttataaaaagtttgatgattacaaaaaaaagggaagcactaagtaatataggtacagagagggaagagtgtcaaatagaattttcaatctgtgtataaggatacttaagcattttttaaggaaagcagaaagaagcatgagaaagtctacaatgacatctatgtcaatataacaagctggatatttagagaagaaactcttgattaaatactttttatgatatgaacacacacatataatatgacatgactgtgttcatggaacataaagaaattcctctgaccaaagagaactggaaaaaaaaaaaaaaaaactcgagggggggccc

SEQ ID NO: 530 - DNA, 1021 bp, Homo sapiens
  misc_feature (248)..(248): n equals a,t,g, or c
  misc_feature (1004)..(1004): n equals a,t,g, or c
  misc_feature (1014)..(1014): n equals a,t,g, or c
ttcggcagagcccttgcgcgctcttgaatacctgckttctgtagcgctagttctcttcaagatttgcttagtgtcatttcatttcggtttcttttctcgccatgtttttctgtcggaattacggttcgttttggttctatgtactctctaaaatgttatcgtttttcatttgtctactaattttcgtgcatttgttactactgagtttcttaatatctgactggcctccgcccacgggctctgcagancataaaatactcaggctgatggtagtgcagagactctccctccttgatcagcgcaaacgttggtctgaggcttgagggatggagcaacattttcttggctgtgtgaagcgggcttgggattccgcagaggtggcgccagagccccagcctccacctattgtgagttcagaagatcgtgggccgtggcctcttcctttgtatccagtactaggagagtactcactggacagctgtgatttgggactgctttccagcccttgctggcggctgcccggagtctactggcaaaacggactctctcctggagtccagagcaccttggaaccaagtacagcgaagcccactgagttcagttggccggggacacagaagcagcaagargcacccgtagaakargtggggcaggcagargaacccgacagactcaggctccrgcagcttccctggagcagtcctctccatccytgggacagacagcaggacaccgaggtctgtgacagcgggtgccttttggaacgccgccatcctcctgccctccagccgtggcgccacctcccgggtttctcagactgcctggagtggattcttcgcgttggttttgccgcgttctctgtactctgggcgtgctgttcacggatctgtggagctaagcagccttagatagcagcagaaggctttttggattctcctccttgaaaagattctcagttaccaaacgtctccacctagaaaataaaaatacattaagatgttganaaaaaaaaanaaaaaaa

SEQ ID NO: 531 - DNA, 433 bp, Homo sapiens
  misc_feature (309)..(309): n equals a,t,g, or c
  misc_feature (408)..(408): n equals a,t,g, or c
  misc_feature (418)..(419): n equals a,t,g, or c
ggcacagctcaccttcctaccctccactggaaaccactcctctccatgttgacctcctggattgcctccatcccctcccgctgtggggttctgtgtatctgcttgtgttttggattggttcactgtctggatctgtcaaggaagataaccattttttcaggagctgtgtacatggtgaaaaatatacagttctggttgtaaggaactctcacttgggaatattattatttaaaaacttatacgttgagctcagtgctgtcacagaggtaagaatactgtggaaaggctataaatatttttccccaaagncaggggttggaaacatttttctttcctaggctgttgagactcacagggaaaaaaaaaaaaaaaaatccgggggggggccccgtacccattggcccctangggggggttnnaaaaagggcccgtt

SEQ ID NO: 532 - DNA, 1155 bp, Homo sapiens
ggcacgagtggaagtgtaagcagaaatacagcgagggctcaggaaatactagaataggcaacatgctcttcctctctgcttctatctgcacatctgctttatttctttgcctcagcagactcaccatctctgctcctcatcccgcatggtggggaaggatgcccacccacacctccccaggccatctgttagagctccaaccacgtggaatgacggaatccattctgttctctatctctgctctagtttcaaattcctggggaaaaatgacccagctcacttcaggctcccactcttggtccagtgggctgcaaaatttccaagcgtagcttctgtcagttccttgctttgggttaggtgaaaatgaagggaataattgtgagctgttcagattcaccaagaaattatctactattgttgggggagaatgcccaggggacagatgcatttgggtaagggacaataacaagacactagaaaggaaaatcccaattttattttcctacagagtcagcatcccacacattttccttcacagaaactgacaaataatccatgggggcagcttagcagatgggttgaaaaaagcgacaggctcatcatcagttttcaacaccttgatacatcaggcttggcccttgctacctcatgcattatttaagcacaatgcatctccctctaattgtgtcatgtgctggaggagaatgtgaagttctgtctgtctttagcaaacatgtttcaagtactgtctgtctgaaaaccaaatggaagagggtaaacttgatgatccacttgattttagttttaggacctggatgcataggcagatgtcagtttacaaggattctgtgtactttaaggaatgttttctgagcatgtccagtacaacagacgctctgttaggtagctgtagttaggattttttggttgtaagtatgtgaagatttaaatgtatcagctcacttactcagaaaatctgaggcagtgctagccaaaccaaatggttcaagcaaatgtcatcagtatttggcctcttccagtctttttactcctctatcctctgtgtctgcttcacttctacacaagctttctctatgtggtggctccagattttatatcttctagtagatatttttttaaaaaaaaaaaaaaaaa

SEQ ID NO: 533 - DNA, 727 bp, Homo sapiens
gctggtatctccagtgtttgggtttagctccaacttacaggttaggaccagcttttctgcaggtgttgaccagcaatttcctgcggcatttacttcttgataacaagagtgagaagatagagacagggcagatagacacttaagagtaaaatgtattaacacaaaggctctggccgcccccctacaaaggaggccatggaaccgatggaactgatggaggaaatgctgggactgtgggtcagtgctgacacacccatggccatacgtttggtcttcttggccttggctgggctggtggatgggaagccagtatggatcaccttgtggatggatgcaaagagaccaaacttggcgggcactggaagtacctggggaagcaggagagactcacactgctgtcatggccccacagcctggagcctcccctgcctcctctgcctcttcagagcccagcagaaagacagagaaagaagcctccttggggttccattacccacactccaaggtggaaatctttcagatggttagatgatgaaggtagtagaaggcaaggatgattgggagtagaaggaagagtgacaggctagcatgagctgtgcagcagcaagattccatatgagcaaagttcagaaagtgrgmmaaaaggaccaagttggatctcctcctaaccctgacctgcatgatatgggtgtgagaagcttcaactgagaaagctgctgagaaagta

SEQ ID NO: 534 - DNA, 2112 bp, Homo sapiens
aaccccagttcaatacgactcactatagggaaagctggtacgcctgcaggtaccggtccggaattcccgggtcgacccacgcgtccgggagttcaaagccatgctgatcgctgtgggcatccacctgctgctgctcatgttcgaagtcctggtctgcgacagggyggagaggggcacccacttctggctgctggtcttcatgcctctcttcttcgtgtcccccgtgtccgtggctgcctgcgtctggggctttcgacacgataggtcgctggagctggagatcctgtgctcggtcaacatcctgcagttcatcttcatcgccctaaagctggacaggattattcactggccgtggctggtggtgtttgtgcccctgtggatcctcatgtcgttcctttgcctggtcgtcctctattacatcgtctggtccctcctgttcctgcggtccctggatgtggttgccgagcagcggagaacacacgtgaccatggctatcagttggataacgattgtcgtgcctctgctcacttttgaggtcctgctggttcacagattggatggccacaatacattctcctacgtctccatatttgtccccctttggctttccttactaactttaatggccacaacatttaggcgaaaggggggcaatcattggtggtttggcattcgcagagacttctgtcagtttctgcttgaaattttcccatttttaagagaatatgggaacatttcatatgatctccatcacgaagatagtgaagatgctgaagaamcatcagttccagaagctccgaaaattgctccaatatttggaaagaaggccagagtagttataacccagagccctgggaaatacgttcccccccctcccaagttaaatattgatatgccagattaaactcctagagaggacccaggcacacacagactccacttggccttcgcctcttgttcattcatcccaaacctggaaatggaaacaggcttcaaacactcgtctcacgccgtgtttgagatcaccgcctcatcagtatgcatcatagatggaggtggtttcagtatgtgggtgtgtgtgrtgtgtacctgggtaagagacttgctttccaggttcgcactttcaggtgtagctgggggcagtaagtcgaattgttttagtaggtcctcaaaaggaataaccacacagctgtttgtttaaatgctactgtacctatcaaaactattgtttaaaaagtatttttatacactgctaatctaaaattgtatttcagattgtgcctgtcataacaatagcaaatgtaaaaagttctctttcccaccacttgtttataaacctcatagttgatatttttagtgttcctactgttaaaatactctctccttgggctttgctgatactggtctttaatattctgataggtgaatttttctaatggaatgaacccatgcatatatagtatttatatgaatattttagcagtgtaatatgttgaattctagttctctgcattaccattattacgttaaagtattttttaaagcttargtgtgaagatatgtgkctattgcagatgtccttggaaaactgcataaaacagtatgtgccyggtgtggatcttaccaaagtactaggcatgaatgtagggactgcaaatcccatgggtcttaatatttaggtgttagtaaccaaggtctctggtagtacccgttagtagaggaagaggccactgcccttgggaacttgtgacaggctctagtgtggtaccaggccataaagtgacactgttatttagcaacttgaatttytccacacaggtagtaactgtgtggaaataagcaacaagtggtttgtccatttctaagaatcttaaactattagttggctgtagtgtgaagcattacttgtcattggaaagatggagagagtggccttaaccggaagtggtcagtagaagcaggtgtcattttaagggccaaactttaatctgtcagcaatagggaaacaactgttcaaattatctttgtagataagaacagtgkttcttttttcttttcttttgkttttttgkttgkttgktttgktttgttttgagacagagtttcactctt

SEQ ID NO: 535 - DNA, 1598 bp, Homo sapiens
ggcacgagggactggggaggcgtgtcttgaaaaagcaactgcagaaattccttatgatgattgtgtgcaagttagttaacatgaaccttcatttgtaaattttttaaaatttcttttataatatgctttccgcagtcctaactatgctgcgttttataatagctttttcccttctgttctgttcatgtagcacagataagcattgcacttggtaccatgctttacctcatttcaaaaaaatatgcttaacagagaggaaaaaaatgtggtttggccttgctgctgttttgatttatggaatttgaaaaagataattataatgcctgcaatgtgtcatatactcgcacaacttaaataggtcatttttgtctgtggcatttttactgtttgtgaaagtatgaaacagatttgttaactgaactcttaattatgtttttaaaatgtttgttatatttcttttcttttttcttttatattacgtgaagtgatgaaatttagaatgacctctaacactcctgtaattgtcttttaaaatactgatatttttatttgttaataatactttgccctcagaaagattctgataccctgccttgacaacatgaaacttgaggctgctttggttcatgaatccaggtgttcccccggcagtcggcttcttcagtcgctccctggaggcaggtgggcactgcagaggatcactggaatccagatcgagcgcagttcatgcacaaggccccgttgatttaaaatattggatcttgctctgttagggtgtctaatccctttacacaagattgaagccaccaaactgagaccttgatacctttttttaactgcatctgaaattatgttaagagtctttaacccatttgcattatctgcagaagagaaactcatgtcatgtttattacctatatggttgttttaattacatttgaataattatatttttccaaccactgattacttttcaggaatttaattatttccagataaatttctttattttatattgtacatgaaaagttttaaagatatgtttaagaccaagactattaaaatgatttttaaagttgttggagacgccaatagcaatatctaggaaatttgcattgagaccattgtattttccactagcagtgaaaatgatttttcacaactaacttgtaaatatattttaatcattacttctttttttctagtccatttttatttggacatcaaccacagacaatttaaattttatagatgcactaagaattcactgcagcagcaggttacatagcaaaaatgcaaaggtgaacaggaagtaaatttctggcttttctgctgtaaatagtgaaggaaaattactaaaatcaagtaaaactaatgcatattatttgattgacaataaaatatttaccatcacatgctgcagctgttttttaaggaacatgatgtcattcattcatacagtaatcatgctgcagaaatttgcagtctgcaccttatggatcacaattacctttagttgttttttttgtaataattgtagccaagtaaatctccaataaagttatcgtctgttcaaaaaaaaaaaaaaaaaaaaaaaa

SEQ ID NO: 536 - DNA, 1256 bp, Homo sapiens
ggcacgagccgtgtggccaggtaccatccagtctgctggggaccccaggaagaacagaagcagagaaaaggtgaaaatgtcaatttatgtgcgaaggctggctacatccaatcttcctctattgttgtttttggacaacgaccccaagctgctcagcctttggaatcctggatttacaccagcagcaccctatccccaccccttcctcctggttctcaggcctttgtccttggactgagttacatcattgtcttcgctgattctaaaccttgggacttggactgagctaccagcatctcagggcctctagtttgcagatggcctgtcaagggacttagtctccaaaattgcaggagccagtttccctaataaatcccaatgtgatagttcttatcccacaggcccactttagttcagtttagttttgctttgtttttagaaatggggtcttgctctgttgccccagctgtagtgcagtggctcactccagcctcaaactcctgggctctggcgatcctcccaactcagcctcctgagtagctgggattacaggtgcacaccaccatgcccagctactttttaattttttttttttgagacagagtcttgctctttcacccaggctggagtgcagtggcgtaatctcagctcactgtaacctctgcctccctagtggctgggaccgcagatgtgtgccactgcacccagctaattttttgttttcggtagagacagggctttgccgtgttggccgggctggtcttgaactcctggcctcaagtgacccacccacatcgacctcccaaagtgctgggattacaggcgtgagccatctcacctgcctactttttaaattttttgtagagacagggtcttgctatattgcccaggctaatctcgaacacctggcctcaagcgatcttcccatctgggcctctcaaagtgctgggattacaggcaggagccccttaaccaacttcgagaacttgggaaataagatgtggtgggttcttgccaccgtgagccaaacctgggtcagaacttcatgtgtgatctggcccctacatacacccactctgataggatattatgacactttggataacaatgtcgatttggaccttgtgtcccacaggtcttaaaatatttggttattccacttttcccagtgtatagttaccagagcaaatgatagttccctttggagaagtattaagggatcattaacaaatactaacaaaaaaaaaaaaaaaaaa

SEQ ID NO: 537 - DNA, 2801 bp, Homo sapiens
ccacgcgtccgcgagcccggggcgggtggacgcggactcgaacgcagttgcttcgggacccaggaccccctcgggcccgacccgccaggaaagactgaggccgcggcctgccccgcccggctccctgcgccgccgccgcctcccgggacagaagatgtgctccagggtccctctgctgctgccgctgctcctgctactggccctggggcctggggtgcagggctgcccatccggctgccagtgcagccagccacagacagtcttctgcactgcccgccaggggaccacggtgccccgagacgtgccacccgacacggtggggctgtacgtctttgagaacggcatcaccatgctcgacgcaggcagctttgccggcctgccgggcctgcagctcctggacctgtcacagaaccagatcgccagcctgcccagcggggtcttccagccactcgccaacctcagcaacctggacctgacggccaacaggctgcatgaaatcaccaatgagaccttccgtggcctgcggcgcctcgagcgcctctacctgggcaagaaccgcatccgccacatccagcctggtgccttcgacacgctcgaccgcctcctggagctcaagctgcaggacaacgagctgcgggcactgcccccgctgcgcctgccccgcctgctgctgctggacctcagccacaacagcctcctggccctggagcccggcatcctggacactgccaacgtggaggcgctgcggctggctggtctggggctgcagcagctggacgaggggctcttcagccgcttgcgcaacctccacgacctggatgtgtccgacaaccagctggagcgagtgccacctgtgatccgaggcctccggggcctgacgcgcctgcggctggccggcaacacccgcattgcccagctgcggcccgaggacctggccggcctggctgccctgcaggagctggatgtgagcaacctaagcctgcaggccctgcctggcgacctctcgggcctcttcccccgcctgcggctgctggcagctgcccgcaaccccttcaactgcgtgtgccccctgagctggtttggcccctgggtgcgcgagagccacgtcacactggccagccctgaggagacgcgctgccacttcccgcccaagaacgctggccggctgctcctggagcttgactacgccgactttggctgcccagccaccaccaccacagccacagtgcccaccacgaggcccgtggtgcgggagcccacagccttgtcttctagcttggctcctacctggcttagccccacagcgccggccactgaggcccccagcccgccctccactgccccaccgactgtagggcctgtcccccagccccaggactgcccaccgtccacctgcctcaatgggggcacatgccacctggggacacggcaccacctggcgtgcttgtgccccgaaggcttcacgggcctgtactgtgagagccagatggggcaggggacacggcccagccctacaccagtcacgccgaggccaccacggtccctgaccctgggcatcgagccggtgagccccacctccctgcgcgtggggctgcagcgctacctccaggggagctccgtgcagctcaggagcctccgtctcacctatcgcaacctatcgggccctgataagcggctggtgacgctgcgactgcctgcctcgctcgctgagtacacggtcacccagctgcggcccaacgccacttactccgtctgtgtcatgcctttggggcccgggcgggtgccggagggcgaggaggcctgcggggaggcccatacacccccagccgtccactccaaccacgccccagtcacccaggcccgcgagggcaacctgccgctcctcattgcgcccgccctggccgcggtgctcctggccgcgctggctgcggtgggggcagcctactgtgtgcggcgggggcgggccatggcagcagcggctcaggacaaagggcaggtggggccaggggctgggcccctggaactggagggagtgaaggtccccttggagccaggcccgaaggcaacagaggcggtggagaggccctgcccagcgggtctgagtgtgaagtgccactcatgggcttccaaggcctggcctcagtcaccccttcacgcaaagccctacatctaagccagagagagacagggcagctgggccgggtttcagccagtgagatgccagccccttcctgctgccacaccacgtaagttctcagtcccaacctcggggatgtgtgcagacagggctgtgtgaccacagctgggccctgttccctctggacctcggtctcctcatctgtgagatgctgtggcccagctgacgagccctaacgtccccagaaccgagtgcctatgaggacagtgtccgccctgccctccgcaacgtgcagtccctgggcacggcgggcctgccatgtgctggtaacgcatgcctgggccctgctgggctctcccactccaggcggaccctgggggccagtgaaggaagctcccggaaagagcagagggagagcgggtaggcggctgtgtgactctagtcttggccccaggaagcgaaggaacaaaagaaactggaaaggaagatgctttaggaacatgttttgctttttttaaatatatatatatttataagagatcctttcccatttattctgggaagatgtttttcaaactcagagacaaggactttggtttttgtaagacaaacgatgatatgaaggccttttgtaagaaaaaaaaaaaaaaaaaaaaaaaaaaaa

SEQ ID NO: 538 - DNA, 1407 bp, Homo sapiens
  misc_feature (353)..(353): n equals a,t,g, or c
gcttaagatgaaaagttccttttcttgtgttaatggatggcacaactggcataaaaggtcattaaatgctaatagacccacttgaggtatgctcgcttaatggaggattagagcaaaacagacttaaaagaccaacatgccagttgtgccatcccttaagatgaaaagttccttttcttgtgttaatgtacaaagcttttcttttggcactgacaactgtgttctacctgggaattttgaatagccattttcatggctgtgtgttgtgtaacacaaatgtttttaaatggtattctcacccagtaggccagctctccaaacgttgcttagatgcttcaaaattagcatatttnaagtttaccagtataaaataccaatgcaactactctacatagccaaatgtttgtaaatcacgtcttattttcctgakgtttttcactccaccaaatcttacaaatsrttgaaagaaatatattctaacagtacgcactgaatagtgaaaataattagacattttaagaaccagagccatagaattattttaaattagtagaaaagaggagctatttccgaatctatagaataaagtaccacctaaaactgaattttatcatataascaagtaatacctattagtcatacctaaatttttcagcacttcattcaattaaaatmcatgaattttaaatattttacatgatgtgaataggcatgataatacttttagtataaaatctaaactttttccatttatcagaaatgataaaatccagttaccacatatcacgtttataaaatccttaattaaatgagtaacttctaaaatataacaatactaaatatcacactgcgatggaggtcccaaatatgtggtctatcaccactgaattcatgtaatagataagaaaaaaattagaggtggatgtcttgttttgtgtcatgaattactaaaatctcttagtagttgtggtatatttttgagtaaaattaccatttccagatttgagtttgaagggcttttatagtkgtattttcctcctcactgttaataatcataatcctttttcagtattttagtggcctgaacaactggtttatctacaatctcaaatcctaagtgtataattatgtgcatgttcaatacctcatataatacttgctcaacagtatagtggtaccatggcattaagatggtgtttttgttctacatatttttcaatatttattctttctatgttgaaattatatcaggctttaccggtttttttagttgtttaaataagtaatattttcaaaagaataaaataaccaatgatatctcttggaataatctgtaaaacgtagttataaaattctattttctacttagaaaaaaaaaaaaaaaaaaaaaaaaaaaaaagggcggcc

SEQ ID NO: 539 - DNA, 1097 bp, Homo sapiens
ccacgcgtccgcccacgcgtccggaagttgcctcctaggcagaaatcaagaaatccaactataacataggttagagtccattttggtttttatatccttccacagaggaaagaggaggaagaatctggagatgcgtttttggtttttggttttttgtttttttttttttccagaggctcatgtatatcctacatcatggtcagtttcagagcagggctgtgccaccatctcagtgactcctggaatactaaattggatctttgtagaggaagaaaataacacagttctagattttccctagctgttaattagttttatggcataattaaaatagctcaggagtaaaaacaaagtccagccttaacagcctgttaagtcttcttttcttatcttgaaaagaggtaagataatgaagtttaaacagttgaagaagttaaccggaaaggaattaacatttcaaggccttgccgcttcttcctcctcttgtgatatgaaccagaattgagggaaaataggcaggagggaacccacactgaattttccagactctactgctgaaagacattgtatatttttattgtaatcatatgtgatgcaagataatattgctcatatctgaatcccaaaagaaaagaagatgtttgtctgagcatcccatgaggtaagcagccccatggaaggaccagctgcatccagcaaagggctccaggtccctgacgtagttgacggtgatggcagaagtaaatctttgtattcttgcagagactttgtttctgaaagaggccaaaagtcatttcaaactgaatctgacggataagataggggccatagctgagaaaaataagtagcgaagccgatctaaaccaaggtgtaactgtgaaatagtaaccatcttctttgcacgtttcaaaattggccctggacgccatcgcaagaggaaaattccaaagctgtgcagcagcggcagtaccattggaagagtttacagcctaccaggactacttagaaggggatcatgtttatttggatatataacccctgattggtttgttttaaaaataaacgttattatgttagtgtcaaaaaaaaaaaaaaaa

SEQ ID NO: 540 - DNA, 3466 bp, Homo sapiens
  misc_feature (3462)..(3462): n equals a,t,g, or c
  misc_feature (3466)..(3466): n equals a,t,g, or c
acatgaacgaggttgcaagttagatgttaagtagatcctctccctgtgttttcacctgggaatgctgggttggtagtaatcctccccagatgtggaggactgaagaggggskggccttggggggggtgtggttctggtctgctcagcgcatggactgttccctgtgtgtctgtgcgtgcctgcaattgggggtggtgtccaggggctcagcaaggcatgtacacctgggctggggtgtgtcagacgctgtcagtgacaagcaccttccctcagagcccggttcctggagaatgtggcggcagcagaaacagagaagcaggttgcgctggcccagggccgggcagagacacttgccggggccatgcccaatgaggcgggtggacacccaggtgagtaggtgggtgagcaggcagagcctgcctgttgytttgttgccccacagggggcatggcaytgacagctccttccctttctttagatgcccggcaactctgggactccccagagacagcccctgcagccagaacaccccagagccctgccccctgtgtcctgctccgggcccagcgaagccttgcaccagagcccaaggagccactgataccagcaagccccaaggctgagcccatctgggagctccctacccgtgcacccaggctctctattggggacctggacttttcagatctaggggaggatgaagaccaggacatgctgaatgtagagtctgtggaggctgggaaagacatcccagctccctcacccccactgcccctgctctcgggagtacccccccctcccccacttccacctcccccacccatcaaaggccccttcccaccacctccacctctacctctggctgcccctcttccccattcagtgcctgacagctcagccctccccactaagaggaagacagtaaaacttttctggcgtgagctgaagctggctgggggccatggagtctctgcaagccgctttgggccctgcgccaccctctgggcttcactggaccctgtctcagtggacacggcccgactggaacacctctttgagtctcgtgccaaagaggtgctgccctccaagaaagctggagagggccgccggacaatgaccacagtgctggaccccaagcgcagcaacgccatcaacatcggcctaaccacactgccacctgtgcatgtcattaaggctgctctgctcaactttgatgagtttgctgtcagcaaggatggcattgagaagctactgaccatgatgcccacggaggaagagcggcagaagattgaggaagcccagctggccaaccctgacatacccctgggcccagccgagaacttcctgatgactcttgcctccattggcggcctcgctgctcgtctacaactctgggccttcaagctggactatgacagcatggagcgggaaattgctgagccactgtttgacctgaaagtgggtatggaacagctggtacagaatgccaccttccgctgcatcctggctaccctcctagcggtgggcaacttcctcaatggctcccagagcagcggctttgagctgagctacctggagaaggtgtcaraggtgaaggacacggtgcgtcgacagtcactgctacaccatctctgctccctagtgctccagacccggcctgagtcctctgacctctattcagaaatccctgccctgacccgctgtgccaaggttagcacctgccagaatcaaccaaggccggacaaggcatgaggagcgctgcttcctgggcctggctcctcccccttctccccatttgggctgctgtgccagggcttgctccagccacctgggtgtgagctatgccctctgccagaaatgctctttcctctattggcctggccacacctactcagtctttgggtctgtttaactgccacttcccccagtaaaccttctgctccccattcacatcagatggacttgtgtctcttgcactagtctatgagatttggatgtctgtgtccttagggcccaagctggccactctggcccagaagcagcctcgggccatgtyttgtytacagggtgtggggggacagtatgtgcacccccttgctttctcaggtggactttgaacagctgactgagaacctggggcagctggagcgccggagccgggcagccgaggagagcctkcggagcttggccaagcatgagctggccccagccytgcgtgcccgcctcacccacttcctggaccagtgtgcccgccgtgttgccatgctaaggatagtgcaccgccgtgtctgcaataggttccatgccttcctgctctacctgggctacaccccgcaggcggcccgtgaagtgcgcatcatgcagttctgccacacgctgcgggaatttgcgcttgagtatcggacttgccgggaacgagtgctacagcagcagcagaagcaggccacataccgtgagcgcaacaagacccggggacgcatgatcaccgaggtgggtgcccttccaggtcttagtcttgactgccacctccttggtttccttcgctcctcccagctcacccttcttctttctccagacagagaagttctcaggtgtggctggggaagcccccagcaacccctctgtcccagtagcagtgagcagcgggccaggccggggagatgctgacagtcatgctagtatgaagagtctgctgaccagcaggcctgaggacaccacacacaatcgccgcagcagaggcatggtccagagcagctccccaatcatgcccacagtggggccctccactgcatccccagaagaacccccaggctccagtttacccagtgatacatcagatgagatcatggaccttctggtgcagtcagtgaccaagagcagtcctcgtgccttagctgctagggaacgcaagcgttcccgcggcaaccgcaagtcttgtaagtaaccccccacaatcccactgcccacctgaaccccatcaaccccctccaaccctgctctgtccctgcagtgagaaggacgttgaagagtgggctcggagatgacctggtgcaggcactgggactaagcaagggtcctggcctggaggtgtgaaggtgctgtatcccggaaatctatctggaccctggactgcagtgcaggagatgacagagtgaggagggcccagagcagaattctggccccagaactctgtgcccaggagccatgccttgagcagtattagccgtgtgtgtatgcatgtgagtgtgtgtgtatgtgtgtgtgtgcatgcatatgcatgtgcatgtgtgtgagctccttgaacgcacggagcaaaataaaattttcttagctaatccaaaaaaaaaaaaaaaaaaaaaaaaaaaaaaaaaaaaaaaaaaaaaaaaaaaaaaaaaaaaaaaaaaaaaaaaaaaaaaaaaaaaaaaaaaaaaaaaaaaaaaaaaaaaaaaaaaaaaaaaaagngggn

SEQ ID NO: 541 - DNA, 1238 bp, Homo sapiens
ccacgcgtccgcccacgcgtccgcccacgcgtccggctgcggcgcgatggcggcggggctggcgcggctcctgttgctcctcgggctctcggccggcgggcccgcgccggcaggtgcagcgaagatgaaggtggtggaggagcccaacgcgtttggggtgaacaacccgttcttgcctcaggccagtcgcctccaggccaagagggatccttcacccgtgtctggacccgtgcatctcttccgactctcgggcaagtgcttcagcctggtggagtccacgtacaagtatgagttctgcccgttccacaacgtgacccagcacgagcagaccttccgctggaacgcctacagtgggatcctcggcatctggcacgagtgggagatcgccaacaacaccttcacgggcatgtggatgagggacggtgacgcctgccgttcccggagccggcagagcaaggtggagctggcgtgtggaaaaagcaaccggctggcccatgtgtccgagccgagcacctgcgtctacgcgctgacgttcgagacccccctcgtctgccacccccacgccttgctagtgtacccaaccctgccagaggccctgcagcggcagtgggaccaggtagagcaggacctggccgatgagctgatcaccccccagggccatgagaagttgctgaggacactttttgaggatgctggctacttaaagaccccagaagaaaatgaacccacccagctggagggaggtcctgacagcttggggtttgagaccctggaaaactgcaggaaggctcataaagaactctcaaaggagatcaaaaggctgaaaggtttgctcacccagcacggcatcccctacacgaggcccacagaaacttccaacttggagcacttgggccacgagacgcccagagccaagtctccagagcagctgcggggtgacccaggactgcgtgggagtttgtgaccttgtggtgggagagcagaggtggacgcggccgagagccctacagagaagctggctggtaggacccgcagggaccagctgaccaggcttgtgctcagagaagcagacaaaacaaagattcaaggttttaattaattcccatactgataaaaataactccatgaattctgtaaaccattgcataaatgctatagtgtaaaaaaatttaaacaagtgttaactttaaacagttcgctacaagtaaatgattataaatactaaaaaaaaaaaaaaa

SEQ ID NO: 542 - DNA, 1304 bp, Homo sapiens
  misc_feature (1)..(1): n equals a,t,g, or c
nctggtaccaaagcaagtttttcactgagctctcatgaaagatcctcagtctcttgtggatttagaatcctgcagcagcccaccatctaagagcaagagccaaagatgtttgtcttgctctatgttacaagttttgccatttgtgccagtggacaaccccggggtaatcagttgaaaggagagaactactcccccaggtatatctgcagcattcctggcttgcctggacctccagggccccctggagcaaatggttcccctgggccccatggtcgcatcggccttccaggaagagatggtagagacggcaggaaaggagagaaaggtgaaaagggaactgcaggtttgagaggtaagactggaccgctaggtcttgccggtgagaaaggggaccaaggagagactgggaagaaaggacccataggaccagagggagagaaaggagaagtaggtccaattggtcctcctggaccaaagggagacagaggagaacaaggggacccggggctgcctggagtttgcagatgtggaagcatcgtgctcaaatccgccttttctgttggcatcacaaccagctacccagaagaaagactacctattatatttaacaaggtcctcttcaacgagggagagcactacaaccctgccacagggaagttcatctgtgctttcccagggatctattacttttcttatgatatcacattggctaataagcatctggcaatcggactggtacacaatgggcaataccggataaagaccttcgacgccaacacaggaaaccatgatgtggcttcggggtccacagtcatctatctgcagccagaagatgaagtctggctggagattttcttcacagaccagaatggcctcttctcagacccaggttgggcagacagcttattctccgggtttctcttatacgttgacacagattacctagattccatatcagaagatgatgaattgtgatcaggaccaagatccctgtggtaaacactctgattgaatctggggttccagaaggtggaacaagcaggaatgggatccaaagagactcccactcagattctaaagcatttaaagacaattctagcagaatttatcaaaacaagatgaaacacagaaaagttgaaaccacaacaaaatgaattctattaaagaatagccccagatataaattctcttgaaagcaatgttcataaatatttaagcaaattaaagacaatgttaacaaattttctattaaatgccctgagtgataaaaccagttggcaataatattgccttattaaatcttc

SEQ ID NO: 543 - DNA, 1926 bp, Homo sapiens
gaattccccgggctaaaagcttctaaccactagcagtggttgtaaatttggatttcaaagaacagactcatcgtgctgacactttctgtctggtaggaaaggatatggcttctcccagtcttgggcttctgagcagacacctaggttcctggaaggttctgggctgacagggcaggtgttagtatggccacagtggggctgagttggaaaaaagagctggtgatcttgcttgtggggcctggagctgcagccctccagcccactcatacttgctgttccctacctagcctcagctctcttttcccccttaggttgaatacaaagacttccccaaaaacaacaagaacgaatttgtatctcttatcaattgctcctctcagccacctctgatcagccatggtatcggcaaggatgtggagtcctgccatgatatggctgcgctgaacatcttaaagttgctgtctgagttggaccaacaaagtacagagatgccaagaacaggaaacggaccaatgtctgtgtgtgggaggtgctgaaccttttctggccatgaaccattataaaatcccaacatatatactgaaaatactgaaactgctttgaaaatttggaatttctgatacctccagtgggccgagagacacggtgggtaaaggatgtgggcagcagcagggaagacaacagaaacacaaggaggcggctgtggccgggctggactgtgcgggggtttgttgtgatggccactcggtgacctggcggtccctacgcaatagcagctgcctgtggggaagaggggctgcccagccagctggttctcccgggacaccagcagatccacaccctgggcacctccgtgtttggtcttttttttcccctgtgtgaaagaagaaacggcacgaccccttctcaagctggctcactcagacacattgggacaaaccctggacagccatgccagagagaggcctttgaccggccccagagctaaaagcaccagagaaaatcaaatgcttcctactcagcgtgacccaacttttctagtgtgccacggccccaccacctcctgcagtacccacaccatcaccactgctttctcttccaacagtgatctgtattcttagtttcattattttcttttgattgatatgacactatataaaattttcatttgagaatttctcaattgtatctagttaaatagcacagtttggaaacttgtctgagactgactttatcaataatctaaccggcaaagatcatatccatgtgtatgtggttagacatttttatttcattgactaacccaggacagtttcagtgatgcaaattgtgtgccctctggttcagctgaaacagtcctggactttcaaaaaccttgaataagtctcccacagttgtataaattggacaatttaggaattttaaactttagatgatcatttggttccatttttatttcatttttatttttgttaatgcaaacaggacttaaatgaactttgatctctgttttaaagattattaaaaaacattgtgtatctatacatatggctcttgaggacttagctttcactacactacaggatatgatctccatgtagtccatataaacctgcagagtgattttccagagtgctcgatactgttaattacatctccattagggctgaaaagaatgacctacgtttctgtatacagctgtgttgcttttgatgttgtgttactgtacacagaagtgtgtgcactgaggctctgcgtgtggtccgtatggaaagcctggtagccctgcgagttaagtactgcttccattcattgtttacgctggaatttttctccccatggaatgtaagtaaaacttaagtgtttgtcatcaataaatggtaatactaaaaaaaaaaaaaaaaaaaaaaactcgagggggggccc

SEQ ID NO: 544 - DNA, 1773 bp, Homo sapiens
cccggggttggcatcagcttgggcaggtgtgcgggctcattggggcggccgtggtgaggaaccctggactctcagcatcacaagaggcaacaccaggagccaacatgagctcggggactgaactgctgtggcccggagcagcgctgctggtgctgttgggggtggcagccagtctgtgtgtgcgctgctcacgcccaggtgcaaagaggtcagagaaaatctaccagcagagaagtctgcgtgaggaccaacagagctttacggggtcccggacctactccttggtcgggcaggcatggccaggacccctggcggacatggcacccacaaggaaggacaagctgttgcaattctaccccagcctggaggatccagcatcttccaggtaccagaacttcagcaaaggaagcagacacgggtcggaggaagcctacatagaccccattgccatggagtattacaactgggggcggttctcgaagcccccagaagatgatgatgccaattcctacgagaatgtgctcatttgcaagcagaaaaccacagagacaggtgcccagcaggagggcataggtggcctctgcagaggggacctcagcctgtcactggccctgaagactggccccacttctggtctctgtccctctgcctccccggaagaagatgaggaatctgaggattatcagaactcagcatccatccatcagtggcgcgagtccaggaaggtcatggggcaactccagagagaagcatcccctggcccggtgggaagcccagacgaggaggacggggaaccggattacgtgaatggggaggtggcagccacagaagcctagggcagaccaagaagaaaggagccaaggcaaagagggaccactgtgctcatggacccatcgctgccttccaaggaccatttcccagagctactcaacttttaagcccctgccatggttgctcctggaaggagaaccagccaccctgaggaccacctggccatgcgtgcacagcctgggaaaagacagttactcacgggagctgcaggcccgtcaccaagccctctcccgacccaggctttgtggggcaggcacctggtaccaagggtaacccggctcctggtatggacggatgcgcaggatttaggataagctgtcacccagtccccataacaaaaccactgtccaacactggtatctgtgttcttttgtgctatgaatttggattcctaattgctattgttggttgctggggttttaaatgattgataagcttgtacagttaacttatagagggggagccatatttaacattctggatttcagagtagagatttctgtgttgtctcctagaaagcattacatgtagtttatttcagcatccttgttgggtggggccctggctctcttcccctttggtgggacctcccctttctttgggcttcagttcactcaggaagaaatgaggctgtcgccatctttatgtgcttccagtggaaatgtcacttgctacagacaatagtgcatgagagtctagagaagtagtgaccagaacagggcagagtaggtcccctccatggccctgaatcctcctctgctccagggctggcctctgcagagctgattaaacagtgttgtgactgtctcatgggaagagctggggcccagagggaccttgagtcagaaatgttgccagaaaaagtatctcctccaaccaaaacatctcaataaaaccattttagttgaaaaaaaaaaaaaaaaaaaaaaaaaaaaaaaaaaa

SEQ ID NO: 545 - DNA, 1481 bp, Homo sapiens
gcgcactggatggctggggccgcccggatcgccgccgccgccgccgcacgtacgtggcatgcctggatgtccctgccctggctgtggcatggcgggcccaaggctcctcttcctcrctgcccttgccctggagctcttgggaagggctgggggttcccagccggccctccggagccgggggactgcgacggcctgtcgcctggacaacaaggaaagcgagtcctggggggctctgctgagcggagagcggctggacacctggatctgctccctcctgggttccctcatggtggggctcagtggggtcttcccgttgcttgtcattcccctagagatggggaccatgctgcgctcagaagctggggcctggcgcctgaagcagctgctcagcttcgccctggggggactcttgggcaatgtgtttctgcatctgctgcccgaagcctgggcctacacgtgcagcgccagccctggtggtgaggggcagagcctgcagcagcagcaacagctggggctgtgggtcattgctggcatcctgaccttcctggcgttggagaagatgttcctggacagcaaggaggaggggaccagccaggcccccaacaaagaccccactgctgctgccgccgcrctcaatggaggccactgtctggcccagccggctgcagagcccggcctcggtgccgtggtccggagcatcaaagtcagcggctacctcaacctgctggccaacaccatcgataacttcacccacgggctggctgtggctgccagcttccttgtgagcaagaagatcgggctcctgacaaccatggccatcctcctgcatgagatcccccatgaggtgggcgactttgccatcctgctccgggccggctttgaccgatggagcgcagccaagctgcaactctcaacagcgctggggggcctactgggcgctggcttcgccatctgtacccagtcccccaagggagtagaggagacggcagcctgggtcctgcccttcacctctggcggctttctctacatcgccttggtgaacgtgctccctgacctcttggaagaagaggacccgtggcgctccctgcagcagctgcttctgctctgtgcgggcatcgtggtaatggtgctgttctcgctcttcgtggattaactttccctgatgccgacgcccctgccccctgcagcaataagatgctcggattcactctgtgaccgcatatgtgagaggcagagagggcgagtggctgcgagagagaatgagcctcccgccagacaggagggaggtactcagctggcccactccacagccaggcctggccctgcccttcaccgtggatgttttcagaagtggccatcgagaggtctggatggttttatagcaactttgctgtgattccgtttgtatctgtaaatatttgttctatagataagatacaaataaatattatccacataaaaaaaaaaaaaaaaaaactcga

SEQ ID NO: 546 - DNA, 1147 bp, Homo sapiens
ggcacgagctaggagcctcctaatgcagtcttctgcacagtcctggggactgactgactgaatcacacctctggggctgggggctgctgacatgtgtgcctttccttggctgcttcttctcctgctgctccaggagggcagccaaaggagactctggagatggtgtggatccgaggaagtggttgcggtccttcaggagtccatcagcctccccctggaaataccaccagatgaagaggttgagaacatcatctggtcctctcacaaaagtcttgccactgtggtgccagggaaagagggacatccagctaccatcatggtgaccaatccacactaccagggccaagtgagcttcctggaccccagctattccctgcatatcagcaatctgagctgggaggattcagggcttttaccaagctcaagtcaacctgagaacatcccagatctctaccatgcagcagtacaatctatgtgtctaccgatggctgtcagagccccagatcactgtgaactttgagagttctggggaaggtgcctgcagtatgtccctggtgtgctctgtggagaaggcaggcatggatatgacctacagctggctctcccggggggatagcacttatacattccatgaaggccctgtcctcagcacatcctggaggccgggggacagtgccctctcctacacctgcagagccaacaaccccatcagcaacgtcagttcttgccccatccctgatgggcccttctatgcagatcctaactatgcttctgagaagccttcaacagccttctgcctcctggccaagggattgctcatcttcttgctcttggtaattctggccatgggactctgggtcatccgagtccagaaaagacacaaaatgccaaggatgaagaaactcatgagaaacagaatgaaattgaggaaggaggcaaagcctggctccagccctgcctgactgctccttgggaaccccagtcctgagcttggtttcttcccagcacccagagaatccttcctcagctctcttctttccaggggaaggaggtgctcaggggtgggtatccagagagccatacttctgagggaagactggctggcaataaagtcaaattaagtgaccaccaaaaaaaaaaaaaaaaa

SEQ ID NO: 547 - DNA, 1341 bp, Homo sapiens
caggaattcggcacgagagtctgtggtcctctgtatctcaactttttcatcttaaaaaaacaaatagggttgtgtgtgtggctggtggtcataaggtcctttctggctctaataacctgagcttctgttatgaagctgggacccttagagcctcaggatgatcctctgtttgtttgtgaagccccaatcaggtgctaagcaccatagtggcacttagctgaagctcctctgtaactcctgtgggccctgccttgcccacccccgacagctgctgcagtgctcctgagcagcacaggcctgatggagcttctggagaagatgctggccctcaccttggcaaaggcagattctcccaggactgcactcctctgctctgcctggctgctcactgcctccttctctgcccagcagcacaagggcagtttgcaggttcaccagacactctctgtggaaatggaccaagtattgaaggctctcagctttccaaagaaaaaggctgcactactctcagctgccatcttatgcttcctgcggacagccctgcgacaaagcttttcctctgccctggtagccctggtgccctcaggggcccagccactgccagccaccaaggacactgtcctagctccactgcgaatgtcgcaagtccggtccctggtcattgggctgcagaacctcctggtgcagaaggaccctctattgtcccaggcctgtgttggctgcctggaggccttgcttgactacctggatgcccggagcccagacattgctctccacgtggcctcccagccttggaatcggtttttgctgtttaccctcttggatgctggagagaattccttcctcagacctgagattttgaggctcatgaccctgtttatgcggtaccggagtagcagtgtcctctctcatgaagaggtgggtgatgttctgcaaggtgtggctttggctgacctgtctaccctctcgaacaccacactccaggccctgcatggcttcttccagcagctccagagcatgggacacctggctgaccacagcatggcccagaccctgcaggcctccttggagggccttccccctagcacctcctcaggccagccacccctgcaggacatgctctgcctgggaggggtggctgtatccctgtcccacatcagaaactgatcctcaggacttgaaggcccagaagtggagagagaatgagacctggagacaaagggcataattgttggggaaatggatgacagctgaagctattcatatggagccatatactctattgttgaaatagaataaggaaataaaatgatacactcacataaaaaaaaaaaaaaaaaa

SEQ ID NO: 548 - DNA, 912 bp, Homo sapiens
tcgacccacgcgtccggtcagccagtcgcatccagccatgacagccttctgctccctgctcctgcaagcgcagagcctcctacccaggaccatggcagccccccaggacagcctcagaccaggggaggaagacgaagggatgcagctgctacagacaaaggactccatggccaagggagctaggcccggggccakccgcggcagggctcgctggggtctggcctacacgctgctgcacaacccaaccctgcaggtcttccgcaagacggccctgttgggtgccaatggtgcccagccctgarggcagggaakgtcaacccacctgcccatctgtgctgaggcatgttcctgcctaccatcctcctccctccccggctctcctcccagcatcacaccagccatgcagccagcaggtcctccggatcacygtggttkggtggaggtctgtctgcactgggagcctcargarggctctgctccacccacttggctatgggagagccagcaggggttctggagaaaaaaactggtgggttagggccttggtccaggagccagttgagccagggcagccacatccaggcgtctccctaccctggctctgccatcagccttgaagggcctcgatgaagccttctctggaaccactccagcccagctccacctcagccttggccttcacgctgtggaagcagccaaggcacttcctcaccccytcagcgccacggacctytytggggagtggccggaaagctcccsggcctytggcctgcagggcagcccaagtcatgactcagaccaggtcccacactgagctgcccacactcgagagccagatatttttgtagtttttatkcctttggctattatgaaagaggttagtgtgttccctgcaataaacttgttcctgag

SEQ ID NO: 549 - DNA, 563 bp, Homo sapiens
ggcacgagtacagctttgccattcatagatacatacccttcatcctgtggcccatttctgacctcttcaacgacctgattgcttgtgcgttccttgtgggagccgtggtctttgctgtgagaagtcggcgatccatgaatctccactacttacttgctgtgatccttattggtgcggctggagtttttgcttttatcgatgtgtgtcttcaaagaaaccacttcagaggcaagaaggccaaaaagcatatgctggttcctcctccaggaaaggaaaaaggaccccagcagggcaagggaccagaacccgccaagccaccagaacctggcaagccaccagggccagcaaagggaaagaaatgacttggaggaggctcctggtgtctgaaacggcagtgtattttacagcaatatgtttccactctcttccttgtcttctttctggaatggttttcttttccattttcattaccacctttgcttggaaaagaatggattaatggattctaaaagcctaaaaaaaaaaaaaaaaaaaaaaaaaaaaaaaaaaaaaaaaaaaaaaaa

SEQ ID NO: 550 - DNA, 413 bp, Homo sapiens
  misc_feature (407)..(409): n equals a,t,g, or c
gaattcggcacgagtgcagcttcattttgggctgccttagccatgaagctccttttgctgactttgactgtgctgctgctcttatcccagctgactccaggtggcacccaaagatgctggaatctttatggcaaatgccgttacagatgctccaagaaggaaagagtctatgtttactgcataaataataaaatgtgctgcgtgaagcccaagtaccagccaaaagaaaggtggtggccattttaactgctttgaagcctgaagccatgaaaatgcagatgaagctcccagtggattcccacactccatcaataaacacctctggctgaaaaaaaaaaaaaaraaaaaaaararaaaaaaaagaaaaaaaactcaagggggggcccggtacccattcgccctatgtnnntcgt

SEQ ID NO: 551 - DNA, 1306 bp, Homo sapiens
gaagctcgaaattaaccctcactaaagggaacaaaagctggagctccaccgcggtgggcgggccgctctagaactagtggatcccccgggctgcaggaattcggcasrrggcaagctgagatcttcaacgcttcctacaagaagtacctagatagggagtgggaggaagagccactcaggaccaagactctgccagcagctctccttgccagggagtctacatggctctgaactcgtgtgtctttctttcccagtacggccaccttctatttccttcttcctagctgcctatttgcaatgccaccggaagtcaagggcccctcaggcaaggagaatagcacttcataaagagaaggatgatgaccccgagggtgtgtggccctgtgctgcgcccattgcagtctctcagctcagctgctcctcctcctacctggtgctggcctgcgaggaatggtgtgctcacgctgtgggacctggccaaaggattccctcttggggtcgctgctcttcctcaaggatgtttctgccaaagcattcacttcctaaaatatttctcggtccacaaaggacagaatatgtatcctgaaggtcaagtgaaatcccaaatgaaatgtgtggtgctgtgcacagacgcctccctccatctggtggaggctagcgggacccaaggacccaccatcagtgtgcttgttgagatgtgctcatcttttccaagaatggctctgtgtgccttatggatgtggccaagcgtgaaatcatctgtgcctttgcccctccgggagcctttcctctggaggtcccctggaagccagtgtttgctgtgtctccagaccatccatgtttcctgctccgaggcctgcccactcctggaaaatatctcaaaaaattgtaccattcctcaaagggacttggataacatggccttcccccaagcactgccactggagaagagatgtgagcgtttcctccagaagagctatcggaagctggagaagaacccagagaaggaggaggagcactgggcccggcttcagaggtactccttgtcgctccagagagagaacttcaagaagtgaggctgccaccgccctgggatctctgaaaaggaggtttcagccacgaggcagctgcttccaggacactgaggccaagagaaatgtaacagarccacagctccacaggcctgcactcggagtctggggcctctgcagaaccagcaaggggaaaagtataatctgggggaccttcaaccactaagcctcttgtcagaaccctcaggcagggcagatgtgtcaccaaataaaac

SEQ ID NO: 552 - DNA, 754 bp, Homo sapiens
  misc_feature (1)..(1): n equals a,t,g, or c
natcctccacatccttccatggctctgaagaataaattcagttgtttatggatcttgggtctgtgtttggtagccactacatcttccaaaatcccatccatcactgacccacactttatagacaactgcatagaagcccacaacgaatggcgtggcaaagtcaaccctcccgcggccgacatgaaatacatgatttgggataaaggtttagcaaagatggctaaagcatgggcaaaccagtgcaaatttgaacataatgactgtttggataaatcatataaatgctatgcagcttttgaatatgttggagaaaatatctggttaggtggaataaagtcattcacaccaagacatgccattacggcttggtataatgaaacccaattttatgattttgatagtctatcatgctccagagtctgtggccattatacacagttagtttgggccaattcattttatgtcggttgtgcagttgcaatgtgtcctaaccttgggggagcttcaactgcaatatttgtatgcaactacggacctgcaggaaattttgcaaatatgcctccttacgtaagaggagaatcttgctctctctgctcaaaagaagagaaatgtgtaaagaacctctgcaaaaatccatttctgaagccaacggggagagcacctcagcagacagcctttaatccattcagcttaggttttcttcttctgagaatcttttaatgtcatttatatacaaaagaaattctcaaatgtt

SEQ ID NO: 553 - DNA, 1028 bp, Homo sapiens
gcatgatcctgtggaacacagtttgggatcatagatgtgaattaagacaccaccgagatacgggctgtgaggttcataccgtgctgatagcactcgtggtgtctgtgaaatgtgggtaagacattcaaacctggttttgatactggaaactcttcctttaaaactgtgaccatgatttcattcagcccctccacacccctatgtctgccttgtttcagagtgagttttctatggagcctgtggcccttttgcagcccacctggtggcttcttaatgtaactcttcccctggtcgcctggagtggaccactcatctgcaggcctctcctgcatggggagggtaggcagggagcagcatgtctgcaggggtgaacctttgctcttctgtcaggcgaggcccaggctgcaccagccacctgccacatggtgacagtgccacgggccctgcgtatggcccctgcaaccgtgctctggcgggcacacctggctgctgcaggccaaggccgctgttcagtgaagagtcccatgtttagtatggactaaagtcccatgtttagccaytgccccagtctcccgtgaccccagaaaccaggtcactggaccacagtgccagatcctcatcacgccggtgagcacctagaagtgagaacactgtattcctacaatgtacacttggatatttctccttatttagtttctagtgaaacaaatcaagtaaggaactatctttagtttagatggaattatttgtttttaattgttgccgtattcatctatatagctaatatttcaagataagtaatgaacaaaacctgtctaaaccttttgtttccaatgaatgaaagtcatgcactttatttataggctctatgttttggcttctgcagtacttttattatctatacataatttggccaaaaataagaaattggaaagaatgaaatgtttagtttatagtagaagaaagatgatgacactaagttgtgaaaatatgttgtgatttttatgaaataaactcacggcacgtag

SEQ ID NO: 554 - DNA, 450 bp, Homo sapiens
tttttttactcgaaaaaatgtttaatagaatttaaaattttaacttcagggaatttggaagttcaatcattctcaaagaggctgtaaggatgattaaaatcctgaaggaagccattgaagaaacttccttctgctctttctggaggatctcttttcaattatctattcatcatatatttcttatcttctgtgcacaattgacaactcttctttacagcacattcctcttyattcccatctcttggtttctgattgttcctggggctgtggataaaaccattctctgagaagctgataagcaattggatgagaaagarggagargaaaactggcaggargatctggscccatgcccgcagccagcacatctctcttcagacctggtgaccccagccactgggaacctggcaggcaccagctacagtgttggacactgctcgtgccgaattc

SEQ ID NO: 555 - DNA, 978 bp, Homo sapiens
ggcacgagcggtttccgcggtggccatgactgcggccgtgttcttcggctgcgccttcattgccttcgggcctgcgctcgccctttatgtcttcaccatcgccatcgagccgttgcgtatcatcttcctcatcgccggagctttcttctggttggtgtctctactgatttcgtcccttgtttggttcatggcaagagtcattattgacaacaaagatggaccaacacagaaatatctgctgatctttggagcgtttgtctctgtctatatccaagaaatgttccgatttgcatattataaactcttaaaaaaagccagtgaaggtttgaagagtataaacccaggtgagacagcaccctctatgcgactgctggcctatgtttctggcttgggctttggaatcatgagtggagtattttcctttgtgaataccctatctgactccttggggccaggcacagtgggcattcatggagattctcctcaattcttcctttattcagctttcatgacgctggtcattatcttgctgcatgtattctggggcattgtattttttgatggctgtgagaagaaaaagtggggcatcctccttatcgttctcctgacccacctgctggtgtcagcccagaccttcataagttcttattatggaataaacctggcgtcagcatttataatcctggtgctcatgggcacctgggcattcttagctgcgggaggcagctgccgaagcctgaaactctgcctgctctgccaagacaagaactttcttctttacaaccagcgctccagataacctcagggaaccagcacttcccaaaccgcagactacatctttagaggaagcacaactgtgcctttttctgaaaatccctttttctggtggaattgagaaagaaataaaactatgcagatatgcaaaaaaaaaaaaaaaaaaaaaaaaaaaaaaaaaaaaaaaaaaaaaaaaaaaaaaaa

SEQ ID NO: 556 - DNA, 1075 bp, Homo sapiens
  misc_feature (79)..(79): n equals a,t,g, or c
  misc_feature (604)..(604): n equals a,t,g, or c
  misc_feature (656)..(656): n equals a,t,g, or c
gtgtcgcagctctcttcgacgtacctgtcctcaggagccgcggcggcgactgcgcctcggacggccgtcggggccgagnaaccatgagccccaggggcacgggctgctccgccgggctgctgatgactgtcggctggctgcttctggcgggcctccagtccgcgcgcgggaccaacgtcaccgctgccgtccaggatgccggcctggcccacgaaggcgagggcgaggaggagaccgaaaacaacgacagcgagaccgcggagaactacgctccgcctgaaaccgaggatgtttcaaataggaatgtcgtcaaagaagtagaattcggaatgtgcaccgttacatgtggtattggtgttagagaagttatattaacaaatggatgccctggtggtgaatmcaagtgtgttgtacgggtaraagaatgccgtggaccaacagattgtggctggggtaaaccaatttcagaaagtcttgaaagtgttagattggcatgtattcacacatctcccttaatcgtttcaatatatgtggaacttytaagacagaccacaatccattatacttgtaaatgattcagcaatcctagaagtacgcaaggaangtcaccccttgctttcgagtgtgacacactggataataatgaaatagtagcnactattaaattcacagtctatacgagcagtgaattgcagatgagaagatcaagcctaccagccactgatgcagccctaatttttgtgctgaccataggagtcattatctgtgtatttataattttcttattgatcttcataatcataaattgggcagcagtcaaggctttctggggggcaaaagcctctacacctgaggtacaatccgagcagagttctgtgagatacaaagattcaacttctcttgaccaattaccaacagaaatgcctggtgaagatgatgctttaagtgaatggaatgaatgatgtttgaatgatatataacaaaccaaaggatattacagaatattagattcattattacaaaaataaaatacacattgaaatactttaaaaaaaaaaaaaaaaaaaaaactcga

SEQ ID NO: 557 - DNA, 738 bp, Homo sapiens
ggtacaggactgagaagcagataacaagagtgacgctcacagggctgggctgacgctaacaggaggcagtgtgtggctcgaagattcttgaacccacagcagcagctgcggccaccccatcctgcccacagctccagccctgagacgacgaggaggagagtcgactttgcctcttgcccaagggaccatgcccaggtgccggtggctctccctgatcctcctcaccattcccctggccctggtggccaggaaagacccaaaaaagaatgagacgggggtgctgaggaaattaaaacccgtcaatgcctcaaatgccaacgtgaagcagtgtctgtggtttgccatgcaagaatacaacaaagagagcgaggacaagtatgtcttcctggtggtcaagacactgcaagcccagcttcaggtcacaaatcttctggaataccttattgatgtagaaattgcccgcagcgattgcagaaagcctttaagcactaatgaaatctgcgccattcaagaaaactccaagctgaaaaggaaattaagctgcagctttttggtaggagcacttccctggaatggtgaattcactgtgatggagaaaaagtgtgaagatgcttaatggtgttttgaggcatccctccaacctctgtgactactttatccatgaaaatgaagcaatggcaggtgggaggctcttcccaatgtgctttcttcaaaaaaaaaaaaaaaaaaaaaaaaaaa

SEQ ID NO: 558 - DNA, 752 bp, Homo sapiens
gatcaaatcctgaagtggtacatgtcactactgttcatagtctctttgctggaacttggtcctatggccctactggcagagaggaaggctatgaaacccagtctaggcctgcgcctagaagaagaagaagaagaaacaccttttgaagaacagagagcagtctctgtcataccaggrgtacctgtcacatacttgtagaacaaaaataagtaacattttaattattgaaacaatgtaacaactttaaacacagtttcataactaggagtgaatcacccataatctcatacccggaacaaaatatctgttagtatgatgcacctttacatagctgtaatcttaaagggcatgtacttccttctttgctttcctttttttttttcttcatcctttccctctctccctctctccctctctccctttctcccttccttctttcttttcttcctttctttctgattttctaacttccttctttaaacattccttgatcgtctgtgggtctggacagcaacatggagatcaattaggcgcagcattttaaatttgccctcaagaagttccactagtgtaagagtaggcaagtaaccaattattacaatagtgggacaagcgctgtgatagaaataaatacagagtactgtggcagtccttacccagaaaaagatatctagggtagatggtatctgaactgagaattaaagaataaatagaagatagcatggcaaaaaaaaaaaaaaaaaaactcgtag

SEQ ID NO: 559 - DNA, 1748 bp, Homo sapiens
ggcacgagtaaagacaaaataaattcttctgtccacttatttacctaacatacacttgcttccttggaagtcataggcatccacatatcttcagccacaacttggtatttctaatataattcttatttttgaactcctaaactttctggtagaaatcttcagttgaaaatatcctggcaagtaaaattagaaactcccagaaatgtacttatttctattatgttgttttatttctgaacattgtgcccaacattcttttccacatacttgcccaaattggaaaactagggttctaagtttccccctccatccatgcccacatttaattcaccctaataatacctgacatctttcaagttcattttctactatctatccccacgcaggccatatctgggttgaagcttcattatctctatagattaaaaacaaaaacaaaatgcatacaagcaaaacaaataacatacaaacaaaacccacctaactcatctttatgtagtcagtcctccctcaatagtttggccaaacttcctaaaccgaaatctgattgtgactatccccttctaaatgtatttaatcagcataccccttcaataaatccattaaccgttcttgttatccaagacagtttgtcatctgtcttggataacaagttgcagactccatccaatgccattttcccctagaaatatagataatggcactataggaacaatgatctccacatgcctcatgcattggtaatttttttaacctttgctagaaatgttctgctccactctactcatccaccacccattctactccaccttacactacctcttttcccatttagatcttccattctatatctccttgcatgaaattgtccatacctgcttagtactcatctcattattttgtcattgtgcgcatatctgttcatatgatttcttatggaagttattaagtattttgatttctgtttcagtcagatttccaacagagaagtagaaccagtagaaaatatatcttaagatacttattggagggaattaacttacatggttgtgggaaccggcatagccgacctaaaatttatatggctgactatcaaaaaagacaggctggaactcttaggcacaggcagaagttgcagttcacaggtgaaatttgttctttatcctggaagcctgggctctgctctttagatttagcagctgactgaatcaagtccacctagattacctaggataatcttgtttacgattatgattatcactaccagttatcaactgattttgaacttcattcacatctacaaaataccttcataggaacatctagatcagtgttggattaaataactatcagctgtagcctagccatgttgacccatcaaaagaccatcacaattgctgatataactttaataaaatttgcaacattttcagatggaagaattgagaaaagggaagcgggctgacttttcattttagaatttattatgcattaacttaaagtaagtaataattatgtaggtgatcattttgatattttaacctacttaatttagaaaatcatttaaaatcatttttgttaagactacaaaatgattttgggtaaaaaaaaattttaccaaatatcaagatcacaataatcacttaaaatagttacatatgtaactaacctgcacaatgtgtacatgtaccctaaaacttaaagtataataaaaaaaaaaaaaaaaaaaaaaaaaaaaaaaaaaaaaa

SEQ ID NO: 560 - DNA, 1094 bp, Homo sapiens
  misc_feature (1)..(1): n equals a,t,g, or c
nacccattgagcagaaggaggccaggtgggaaagctcctgggaagagcagccagactggacactgggctgcttgagtcctgagtcacaattcagaattcctgggctccctgggtgcattctatcattccagttgaaagtttgcttccttccagtcatgtggctcttcattctactctccttggctctcatttcagatgccatggtcatggatgaaaaggtcaagagaagctttgtgctggacacggcttctgccatctgcaactacaatgcccactacaagaatcaccccaaatactggtgccgaggctatttccgtgactactgcaacatcatcgccttctcccctaacagcaccaatcatgtggccctgagggacacagggaaccagctcattgtcactatgtcctgcctgaccaaagaggacacgggctggtactggtgtggcatccagcgggactttgccagggatgacatggattttacagagctgattgtaactgacgacaaaggaaccctggccaatgacttttggtctgggaaagacctatcaggcaacaaaaccagaagctgcaaggctcccaaagttgtccgcaaggctgaccgctccaggacgtccattctcatcatttgcatactgatcacgggtttgggaatcatctctgtaatcagtcatttgaccaaaaggaggagaagtcaaaggaatagaagggtaggcaacactttgaagcccttctcgcgtgtcctgactccaaaggaaatggctcctactgaacagatgtgactgaagatttttttaatttagttcataaagtgatgctacaacagaataatcaccatgacaactggcccacacctcagagactgattctgatctcccaggaattctgaaggaccctctatccttgacaacaatcatttgcagccaggtagcaacggcggtagtcagaggagctatgatagaccacacccaagcaaggctgccctcaaataacatctcaagatcttagttcttatgcattccatcagtcagaagtgaagaagaggtggagaatctggattggggaccaggaaatcacttgtattttgttagcca

SEQ ID NO: 561 - DNA, 531 bp, Homo sapiens
gttctaattcactgcccacagccctgctgataaaagcaaagctcatctctgccgtgctgcagggaaccctatttccttcccctgcagctcagccacctcctcctctcaggtctgccagccatgaaacttctttacctgtttcttgccatccttctggccatagaagaaccagtgatatcaggcaaacgccacatccttcgatgcatgggtaacagtggaatttgtagggcctcttgcaaaaagaacgaacagccctacctctattgcagaaattgtcagtcctgctgcctccagtcctacatgaggataagcatttctggcaaagaggaaaataccgactggtcttatgagaagcagtggccaagactaccttgagtgctggtgattaccattctcaagctctctgggcacagagacctgctgtcaacccccctcattaaaattcatgtgcctgctaaaaaaaaaaaaaaaaaaaaaaaaaaamaaaaaaaaaaaaaamamaawaamwaaamawaaaaaaaaaaactcgag

SEQ ID NO: 562 - DNA, 813 bp, Homo sapiens
  misc_feature (16)..(16): n equals a,t,g, or c
gaatccccccgggctncaaggaatttcggcaacgagggactacagtgaggacgaaatctaccgcttcaacagccccctggacaagaccaacagccttatctggaccacgaggaccacaaggaccaccaaagactcagcctttcacatcatgtcccacgagagcccaggcatcgagtggctctgtctggagaatgccccatgctatgacaatgttccccaaggcatctttgcccctgaattcttcttcaaggtgttggtgagcaatagaggagtggacacgagcacctactgcaactaccagctcaccttcctgctgcacatccacgggctgccactcagtcccaagcgggcccttttcatcatcatggtgtcagctagcgtgtttgtgggcctggtgatcttctacatcgccttctgcctcctgtggcccctcgtggtgaagggctgcacgatgatccggtggaagataaacaacctcattgcctcagaatcctactacacctacgcctccatttccggaatctcgagcatgccatctctgagacattccaggatgggctccatgttcagctccaggatgacagaggacagggctgaacccaaggaagccgtggagagacagttgatgacctgagtgtcccacctgccccagcccccagttactgtcacgcctctcttatgaggcccatcttgaagatgcaacctgtcacccagcccaggcctctctttctgttttgcttgatgtttacttctcgttcagactcaaataaagccttttttcaggaccaaaaaaaaaaaaaaaaaaaactcgag

SEQ ID NO: 563 - DNA, 1713 bp, Homo sapiens
ggcacgagcacagataaagataagttttactgtcatgctgcttttaacataacagagcaacatcacctaggaaaaaagtttgtaggaggatttttaatccatatatttgtcttatggctagataaagatttctctgaaaaaaagaagcatgtcaggaatctctgggtgcccctttttcctctggggacttctagcattgttgggcttggctttggttatatcactgatcttcaatatttcccactatgtggaaaagcaacgacaagataaaatgtacagctactccagtgaccacaccagggttgatgagtattatattgaagacacaccaatttatggtaacttagatgatatgatttcagaaccaatggatgaaaattgctatgaacaaatgaaagcccgaccagagaaatctgtaaataagatgcaggaagccaccccatctgcacaggcaaccaatgaaacacagatgtgctacgcctcacttgatcacagcgttaaggggaagcgtagaagcccaggaaacagaatactcatttctcagacaaggatggagatgagcaactacatgcaatagatgccagcgtttctaaaccaccttagtagacagtttctccccgaaagccaggcgtagaggaaaacattcatgatgatcccatcgactgtttggattgatccgtgctaagagaaacctattaactagctggaccatgatctgttcaatgattggctcctattgaagatggcttctaagaaaacaagatgcacagaggacacagaaggacttggcagcagggtgatgacctgatcatttgttgatgggatggtggcttacctcttattcacagcttacacttatgcatgccaaatgtaaggccatgaaaatcagtatttcaaataacttaaaaaatgctttactactaaaatgtaaaaaattaatgtgctcacctcggcagcacatatactaaaaattaataagacccagcttgaaaattgagcctgataacaagattacaaattcacaatacctaatacttagggaaatataaaaatttaagcatgaatgtgttctggaacacgttagaagaaaaataaaagccaatgagtttttttttaattctcctttctcaccaatgggcaatagcccataattgaaataaatttctgattgaaaggtataggaaacattaaaatgcattactaagagaagtaatataattttcttacaaagtatttttcccaaagatagctttactatttcaaaaattgtcaaattaatgcatgctccttacaacaaacaaatatcaaaaagagtttaggaattctactagccagagatagtcacttggagaaactttctatatatccttctaaatatttttctgggcatgcttatgtatgtacatcagttgtttctttttattttgaaccaaaaatgtggtttcttttgtacacattacttaaactttctttccagtcaacaatatattgtggatttattttcactgttatatttaactatatataaatacgcatatattgtaattttaatgtctgcttagcaccccactgataaccaaatcacagtttatttaaataattttaatgacttttcaaaaacaatttattgatgcaaaaagcaaggttgagatgacaatgtttctttcaataattaaaaaatactgcttcactgtcaaaaaaaaaaaaaaaaaa

SEQ ID NO: 564 - DNA, 703 bp, Homo sapiens
gaattcggcacgagtgcgcgggcaccacggcggtttttcgacgctggcggtggacgcaggcagcatggaccacggttgctgggcggatggggagcgtctatggtcagttgccttagaagtggtgagatgggaagctgcagttggaagaccctggaggatgcctgacaaggggatgtctgacacatgattggagctctttttgaaatgtttcttgcccttcctggagcagaggagccattatttatgcaggtacatcgaagtcttttgacctccatacagtgattatgcttgtcatcgctggtggtatcctggcggccttgctcctgctgatagttgtcgtgctctgtctttacttcaaaatacacaacgcgctaaaagctgcaaaggaacctgaagctgtggctgtaaaaaatcacaacccagacaaggtgtggtgggccaagaacagccaggccaaaaccattgccacggagtcttgtcctgccctgcagtgctgtgaaggatatagaatgtgtgccagttttgattccctgccaccttgctgttgcgacataaatgagggcctctgagttaggaaaggtgggcacaaaaatcttcatgagcaatacttcttagtagattgttttgttattcaaatcaagttctagtgtttttatgtgagattatataatttacagtgttgttttatatacttttgaataaa

SEQ ID NO: 565 - DNA, 848 bp, Homo sapiens
ggcacgagcactactgtaagagctggtcagtgaatgtggttgcagcatggcctttgggcaagaagtaacccatttaactaaaaccagctggttggccccactcagatttatcaaagggttactgggtccctgggggtggatattgcttatattagacttagaatagcatactgttttaatattatatgaactaaaatgtttctttaaaaaaagagtggtctgttaatggatttatgtagtggtcaagaatttagacttcagagtcaaataaacctatatcagtcctagtcctacagtttactaattgtgagatgtcaagcaagtttttgaactcctctaagcctctgttttcttatctataaattaataaatgaatgaatcgggttgagtgaatatttagtaaattcttagtacatactagttatttgtaactgtgagactggttttttggtatggttttcacatttgggagtagaaataccacttcctaaagtctgttttatctcaaattctctatccaggcatagtgtaaagtgaaatacctagatttcttgattaatatacagataatggccagacgccatggctaaaacctgtgacgctagcacttcggaaggctgaggcgggcggatcacttgaggtcaggagttggagaccagcctggcaaacatggcgaaaccctgtctctactaaaaatacaaaaattagctggatgtggtggcaggtgtctgtaatcccagctacttaggaggctgagacaggagaactccttgagaattgctccactgccctccagcctgggcaacagagtgagacacttcatctcaaaaaaaaaaaaaaaaaaaaaa

SEQ ID NO: 566 - DNA, 1818 bp, Homo sapiens
ggcacgagtctcaaacatgcacgtgtacctttaggatgaatttctgcaattggatgtgccaaggccagagcgtgtgcatttgtggctttggttgacatcaccaagtcgcccttcctggggcctgtgctggtgtactctgaggcgcgattgtgtgaaaggtgggctaaggtgcctgttcgaccacatcctcactggtagactgggtcaccacagttttggaaaggtgagaaatggtatctaaacatagtttgaatttgcatttcttttactggaagggaggctgcgcgtgtttcacatcagagccacgtgtgtttgtggttgttgaactttctctcttggattgctaggagtgctttatgtattagggaagcagacttccctaatgcgtgataacgcatgcagatactgtttccaagtttttgttatttgtcttttaaatttgtttttgcatttgtcttttcactttgatttttgccaggctggagttttgatgtttatgtggtcataggtgtgaatattttcttttgtggcttctggattttgagacacagtggctatagaaccactatagccaaaagttatgtttgcttttggtttcatatactttgctttggtcctgtcttcttgactttatttaaaatagtaagatattcttactacatttttccattgcccatagctggaaggagattgcaattatcaccaaagatgaaaaactaaggcatgttctcagcagaggcagattagactttaagttagaggcttgtccttggtgcagaggcctgtgagcgacccggccccacttgccctgcacaccatggcgtggattgtgggcagtcacagggaagatctctggctttgctgggagctggggtacggttcttagagtgccattctagagtggcttcgcgtactggtaatgaacgcccatcaagtggccttgggaattcatgagccggatgatgatgacttcgccggtgaaaagcaaatcccaaataggttgttttctgtgcattccagtcccaatttctcttccaagtaattattagatgtgccaagcctgttacgtttattacttacagaattgtttttgtctgtgtgagtttactgaggacttaggggttggtatgtgaggaggggagccccccttctcctgtgggcactctagcactcttaataatcagtattaaacatgttgaaggccataaaggaaataaccttctcttaaaaacaagttagagtcagtcataaaactgtttgcctagaccttgatcacttaaaataagatcttagatgtgatgtgtctttgtggagtatttcctgtggctcgggaggtgtgcatgagagtggggtctgagggacagtgaggggtgaaggaaaggtgggagagagggccttcagtgactgtaccaaagactcacagacactgggtgtcttggtgatgggtgcacatagcccttcttttgtgactgaagctgtgtggccttcatcccacagggtctgccctctccagataattctgtcactgaacttcaaactgtcaatggaacgatagcgcagtctcttaacaatgcttcaggacagataatagagctgtgcgggcagcctcggtgacagtgttgggaatctgcagaatggctttgtccacttctttcctttcagaggagacattgagcctcggcatggtgtctcacgccaggaatcccagcatgttgggaggctgaggttgggggatcggattgcttgaggctaggagcttgaggtcagcctgcgcaacatagtgagacccctgtctctaccaaaaaaaaaaaaaaaaaa

SEQ ID NO: 567 - DNA, 1632 bp, Homo sapiens
cccgccccgcggcgcattgtgggatctgtcggcttgtcaggtggtggaggaaaaggcgctccgtcatggggatccagacgagccccgtcctgctggcctccctgggggtggggctggtcactctgctcggcctggctgtgggctcctacttggttcggaggtcccgccggcctcaggtcactctcctggaccccaatgaaaagtacctgctacgactgctagacaagacgactgtgagccaccacactctggggctgcctgtgggcaaacatatctacctctccacccgaattgatggcagcctggtcatcaggccatacactcctgtcaccagtgatgaggatcaaggctatgtggatcttgtcatcaaggtctacctgaagggtgtgcaccccaaatttcctgagggagggaagatgtctcagtacctggatagcctgaaggttggggatgtggtggagtttcgggggccaagcgggttgctcacttacactggaaaagggcattttaacattcagcccaacaagaaatctccaccagaaccccgagtggcgaagaaactgggaatgattgccggcgggacaggaatcaccccaatgctacagctgatccgggccatcctgaaagtccctgaagatccaacccagtgctttctgctttttgccaaccagacagaaaaggatatcatcttgcgggaggacttagaggaactgcaggcccgctatcccaatcgctttaagctctggttcactctggatcatcccccaaaagattgggcctacagcaagggctttgtgactgccgacatgatccgggaacacctgcccgctccaggggatgatgtgctggtactgctttgtgggccacccccaatggtgcagctggcctgccatcccaacttggacaaactgggctactcacaaaagatgcgattcacctactgagcatcctccagcttccctggtgctgttcgctgcagttgttccccatcagtactcaagcactataagccttagattcctttcctcagagtttcaggttttttcagttacatctagagctgaaatctggatagtacctgcaggaacaatattcctgtagccatggaagagggccaaggctcagtcactccttggatggcctcctaaatctccccgtggcaacaggtccaggagaggcccatggagcagtctcttccatggagtaagaaggaagggagcatgtacgcttggtccaagattggctagttccttgatagcatcttactctcaccttctttgtgtctgtgatgaaaggaacagtctgtgcaatgggttttacttaaacttcactgttcaacctatgagcaaatctgtatgtgtgagtataagttgagcatagcatacttccagaggtggtcttatggagatggcaagaaaggaggaaatgatttcttcagatctcaaaggagtctgaaatatcatatttctgtgtgtgtctctctcagcccctgcccaggctagagggaaacagctactgataatcgaaaactgctgtttgtggcaggaacccctggctgtgcaaataaawrkgctgaggcccctgtgtgatattgaaaaaaaaaaaaaaaaaaaaaaaaaaaaaaaactcgag

SEQ ID NO: 568 - DNA, 1061 bp, Homo sapiens
aattcggcacgagagaaggaaatacatcaaaatgcccacattggttatctgtagaggatagaatgaaagatggctttattctcttgtttgctcttattaaagcaatcagatggtgcttctcctgtactcagagccctggctgcttcctgcctggcctctcctgcgggctgctgtggaaccagaaaagccttaaacggaaatgtgggagagaaggttggattcactttcatgtctttccagggttgtgacccctcaagtcctggttgcctttgctgttctctattaccttcaaacagccagctcgtctttatttcttttttagttttgtcggggttggcttgatagatgttagtccatcatagccagatgtgtctagccttgtcttttgaatgcaagatttaggatgtgggtacttagctgttagtggacatcagagtcactagtcaggatgaaagagttcttggctttaactcccagaaattctggtaacgtcatgtatagtgacggccgcatgtctaacaggtggccaggtaagtcttttggggtggtctgtgaatcacagtttgggagacattgacttttagggagtttgttctgaattcactagataatagagatataatacagagctttgaaagctggtgtcttgatgacagagccgtggcaatggggagggttgaggaggtggctgttgggcctgtctcctggtgagagttgaaagggcctgaactcaagcagaggcctcagaaccgaaaggtggtggaaggatgcagcaagaggcgccacacaggagtactctgcgccctggcagggtctgaatacacgtgggagtggtgagagggagaactttaagtccaggttttgtgcctcagtgacttagtgtggccatatcattagaaatgtgttgaggccgggcacagtggctcatgtctgtaatcccagcactttgagaggctgaggcaggaggatggcttgaggccaggagtttaaaaccagcctggacaacatagtgagagcctgtctctacaaaaaaaaaaaaaaaaaactcgagggggggcccg

SEQ ID NO: 569 - DNA, 1650 bp, Homo sapiens
ggaacctcatcaacgctgacttctgcgtggcctctgtctgcgtggcctttggggcagttctgggtaaagtcagccccattcagctgctcatcatgactttcttccaagtgaccctcttcgctgtgaatgagttcattctccttaacctgctaaaggtgaaggatgcaggaggctccatgaccatccacacatttggcgcctactttgggctcacagtgacccggatcctctaccgacgcaacctagagcagagcaaggagagacagaattctgtgtaccagtcggacctctttgccatgattggcaccctcttcctgtggatgtactggcccagcttcaactcagccatatcctaccatggggacagccagcaccgagccgccatcaacacctactgctccttggcagcctgcgtgcttacctcggtggcaatatccagtgccctgcaaagaagggcaagctggacatggtgcacatccagaatgccacgctcgcaggaggggtggccgtgggtaccgctgctgagatgatgctcatgccttacggtgccctcatcatcggcttcgtctgcggcatcatctccaccctgggttttgtatacctgaccccattcctggagtcccggctgcacatccaggacacatgtggcattaacaatctgcatggcattcctggcatcataggcggcatcgtgggtgctgtgacagcggcctccgccagccttgaagtctatggaaaagaagggcttgtccattcctttgactttcaaggtttcaacggggactggaccgcaagaacacagggaaagttccagatttatggtctcttggtgaccctggccatggccctgatgggtggcatcattgtggggctcattttgagattaccattctggggacaaccttcagatgagaactgctttgaggatgcggtytactgggagatgcctgaagggaacagcactgtytacatccctgaggaccccaccttcaagccctcaggaccctcagtaccctcagtacccatggtgtccccactacccatggcttcctcggtacccttggtaccctaggctcccagggcaggtgaggagcaggctccacagactgtcctggggcccagaggagctggtgctgacctagctagggatgcaagagtgagcaagcagcacccccacctgctggcttggcctcaaggtgcctccacccctgccctccccttcatcccagggggtctgmctgagaatggagaaggagaagctacaaagtgggsatccaagccgggttctggctgcagaagttctgcctctgcctggggtcttggccacattggagaaaaacaggctcaaagtggggctgggacctggtgggtgaacctgagctctcccaggagacaacttagctgccagtcaccacctatgaggctcttctaccccgtgcctgcacctcggccagcatctcctatgctccctgggtcccccagacctctytgtgttgtgtgcgtggcagcctccaggaataaacattcttgttgtcctttgtaaaatggtgtgaatgctccaatggggccagtttgagggagaaaaggacccaagagacctgcttctgccccagcccttaccttcatccaagggtaccaaccacactgcga

SEQ ID NO: 570 - DNA, 2762 bp, Homo sapiens
  misc_feature (2711)..(2711): n equals a,t,g, or c
  misc_feature (2730)..(2730): n equals a,t,g, or c
  misc_feature (2752)..(2752): n equals a,t,g, or c
ccacgcgtccgcggagtcggtgggtgcagatggcggcggcagttgtggtggcggagggggacagcgactcccggcccggacaggagttgttagtggcctggaacaccgtgagcaccggcctggtgccgccggctgcgctggggctggtgtcttcccggaccagcggtgcagtcccgccaaaggaagaggagctccgggcggcggtggaggttctgaggggccacgggctacactcggtcctggaggagtggttcgtggaggtgctgcagaacgatctgcaggccaacatctcccctgagttctggaatgccatctcccaatgcgagaactctgcggatgagccccagtgccttttgctactccttgacgcttttggcctgctggagagccgcctggatccctacctgcgtagcctagagctgctggagaaatggactcgcctgggcttgctgatgggcactggtgctcaggggctgcgagaagaagtccacactatgttgcgcggagtcttgttctttagcacccccagaaccttccaagagatgatccagcgtctgtatgggtgcttcttgagagtctatatgcagagtaagaggaagggggaagggggcacagacccggaactggaaggggagctggacagccggtatgcccgtcgccggtactaccggctcctgcagagcccgctgtgtgcagggtgcagcagtgacaagcaacagtgctggtgtcgccaggctctggagcagttccatcagctcagccaggtcttacacaggctcagtctgctggagcgggtcagtgccgaggctgtgaccaccaccctgcaccaggtgacccgggagaggatggaggaccgttgccggggcgagtacgagcgctccttcctgcgtgagttccacaagtggatcgagcgggtggttggctggctcggcaaggtgttcctgcaggacggccccgccaggcccgcatctcccgaggccggcaacaccctgcgccgctggcgctgccacgtgcaaaggttcttctaccgcatctacgccagcctgcgcatcgaggagctcttcagcatcgtccgagacttcccagactcccggccagccatcgaggacctcaagtactgcctggagaggacggaccagaggcagcagctgctcgtgtccctcaaggctgccctggagactcggctcctgcatccaggcgtcaacacgtgtgacatcatcaccctctatatctctgccatcaaggcgctgcgcgtgctggacccttccatggtcatcctggaggtggcctgtgagcctatccgccgctacctgaggacgcgggaggacacagtgcggcagattgtggctgggctgacgggggactcggacgggacaggggacctggctgttgagctgtccaagaccgacccggcgagcctggagacaggccaggacagtgaggatgactcaggcgagccagaggactgggtcccggaccctgtggatgccgatccagggaagtcgagctccaagcggcgttcatcggacatcatcagcctgctggtcagcatctacggcagcaaggacctcttcatcaatgagtaccgctcgctgctggccgaccgcctgctgcaccagttcagcttcagccccgagcgggagatccgcaacgtggagctgctgaagctgcgctttggcgaggccccaatgcacttctgtgaagtcatgctgaaggacatggcggactcccgccgcatcaatgccaacatccgggaggaggatgagaagcggccagcagaggagcagccaccgttcggggtctacgctgtcatcctgtccagtgagttctggccgcccttcaaggacgagaagctggaggtccccgaggatatcagggcagccctggaggcttactgcaagaagtatgagcagctcaaggccatgcggaccctcagttggaagcacaccctgggcctggtgaccatggacgtggagctggccgaccgcacgctgtctgtggcggtcaccccagtacaggcggtgatcttgctgtattttcaggaccaagccagctggaccctggaggaactgagcaaggcggtgaagatgcccgtggcgctgctgcggcggcggatgtccgtgtggctgcagcagggtgtgctgcgtgaggagccccccggcaccttctctgtcattgaggaggagcggcctcaggaccgggacaacatggtgctcattgacagtgacgacgagagcgactccggcatggcctcccaggccgaccagaaggaggaggagctgctgctcttctggacgtacatccaggccatgctgaccaacctggagagcctctcactggatcgtatctacaacatgctccgcatgtttgtggtgactgggcctgcactggccgagattgacctgcaggagctgcagggctacctgcagaagaaggtgcgggaccagcagctcgtctactcggccggcgtctaccgcctgcccaagaactgcagctgacacatcgcccgcccgcccgcccgcccgccaggcgctgccctgcaggtgctctcgtcctcccgtgccagcccccgcccgcccgtgtcccagaatgcactgctgaggagcatgcccacccccacccccgcagtgtgcagattaaagcaagtcagatcatcaaaaaaaaaaaaaaaaaaaaaaaaaaaaaaaaaaaaaaaaaaaaaaaaaaaaaanaaaaaaaaaaaaaaaaaanaaaaaaaaaaaaaaaaaaaaanaaaaaaaaat

SEQ ID NO: 571 - DNA, 956 bp, Homo sapiens
aattcggcacgagctaaagcatggtttccaagatgctacaggcagcgagcctctctctagtgacctgggtagtttgcacggtttggctggaaaccacagtccccccatctctgccagaaccccccatgtggccactgtcctcagacagctcctggagcttgtggataagcactggaatggctccggctccctcctcctcaacaagaagtttctcggtcctgcccgagatttgcttctgtctttggtagtcccggstccttctcagccgaggtgttgctcacatcctgaagacacgatgaaagcattctgcaggagggagcttgaactgaaggaggctgcgcactggtccctaatgacatggaaagtttgaagcaaaaactggtcagagtgctggaggaaaacctcattttgtcagaaaaaattcaacagttggaggaaggtgctgccatctcaattgtgagtgggcaacagtcacatacttatgatgatcttctgcacaaaaaccaacagctgaccatgcaggtggcttgcctgaaccaggagcttgcccagctgaaaaagctggagaagacagttgccattctccatgaaagtcagagatccctggtggtaactaatgagtatctgctgcagcagctgaataaggagccaaaaggttattccgggaaagcgctcctgcctcctgagaagggtcatcatctggggagatcatcgccctttgggaaaagcacgttgtcttcctcctcaccagtggcacatgagactggtcagtatctaatacagagcgtcttggatgctgccccagagcctggcttatagagctagcatggaactcacaccacagcttccctggtccacagaggstctcaccgccattgcaccagtatggtggtatgtactcacaaagattaagaaagaaatgtattctgaytaaaaaaaaaaaaaaaaaaactcga

SEQ ID NO: 572 - DNA, 1216 bp, Homo sapiens
  misc_feature (1028)..(1028): n equals a,t,g, or c
  misc_feature (1070)..(1070): n equals a,t,g, or c
  misc_feature (1087)..(1087): n equals a,t,g, or c
  misc_feature (1090)..(1090): n equals a,t,g, or c
  misc_feature (1157)..(1157): n equals a,t,g, or c
  misc_feature (1193)..(1193): n equals a,t,g, or c
gagcargaagccagtctgcaagccaggaagatagtcctcaccagaacgcaaccatgctggcgcctggtcttggacttccagcctccagaactgtgagaaacacggggatcaccatccttcaagacctgatggccggtgtctggaacaccattgctttatggtttttgagtgtttttggagtcatttcagcccccacgactgggaccagtccaaccagctgcaggtgcgtggggccgaggcctccaggctgtgggccagccggctgacggatgactccatgaggctcttgcaggacaaggaccagctgacgcaccasatgcaggagggcacctgccggaacctgggccagaggctgtcggacattggcttctggaagtcagagctgagctatgagctggacaggcttctgactgagaaccagaacttggagacggtcaagaggcggmtggagtgcgcggccaatgaggtgaactgcccattgcaggtggccttggagtgtctgtaccatcgagagaagaggattgggattgatttggtccatgacaacgtggagaaaaaccttatccgggaagtggatttgctaaaatgttgccaagaacagatgagaaaattagctcaaagaattgatatccagatgcgggataaccgggatgctcagcacgtgctggagagggacctcgaagacaaaagctcggcccagtgtatcgatgagaagtgctttaacctgagaaatacgtcagactgcatcagcttcttccacggcatggagaaaattgacggcacgatctccgtacctgagacctgggccaagttcagtaacgacaacatcaaacactcttcagaacatgcgggccaaytccatccrgytgcgggaggaggyggagcacctctttgagaccttgtcggatcagatgtggaggcakttcacagacaccaacctggccttcaacgcccgcatctctgaggtgacggatgtgaaagaataagctgcagacccactggcgaacatgggacctactggctagctnacctatgcttcagctttgacatctgctggccttcttcttggnccagctcctttcatctncanctttggggcccgacagacgctgaagagaactttcaggccgagaacaccatcatgctgctggaaaggnccatcatgggcaaggagggccgttgaagtgggccanacaagctggatgccggacccgct

SEQ ID NO: 573 - DNA, 818 bp, Homo sapiens
aaaacttgagtatgttgagggaaggaatatatatatatctgggagagaatggatacgttttgtttttctgaaatggaattagaaagatgttcagttgtcttgtgcattcttgcaaaccttgcagttttgagagccctgtttctgccttgtatcattttccactgtgtatckgattctaggagcgtgaacagggagacaaaggtgaagtttgtgcacacctctgtccatggggtgggtcatagctttgtgcagtcmgctttcaaggcttttgmccttgttccycctgaggctgttcctgaacagaaagatccggatcctgagtttccaacagtgaaatacccgaatcccgaagaggggaaaggtgtcttggtaacctaatttttttttaaattatgaaatctgcttttatattcaaaactattactgtcaagtaaaatacatttttatgtgttttcattgtgctgaagaaaaactaatttcagcatggaaatatgtatgtttggctgggtgcagcgtctcatgtctgtaatcccagcactttgggagaccaaggcaggcagatcacttgaggtcaggtgttcgagaacagcctggccaacatggcaaaaccctgtctctactaaaaatacaaaaattagctgggtgtggtggtacatgcctgtaatcccagccacttgggaggctgaggcactagaattgtttgaacctgagagatggaggttgcagtgagctgagattgcaccactgcactccagcctgggtgacagggtgacagagcgagactctgtctcaaaaaaaaaaaaaaaaaaaaactcgag

SEQ ID NO: 574 - DNA, 712 bp, Homo sapiens
  misc_feature (565)..(565): n equals a,t,g, or c
gaattcggcacgagctggacaggaccggagaggaccccgcgtaaccgcggaacagacactcccggcagcggccgccgccgcggcactgctacgggacgagccggagcgcttggccatggcggcccgatccgcactggcgctgctgctgctgctgccagtcctgctcctgccggtgcagagycgctcagagcccgagaccaccgcgcccacccctaccccaatcccgggtggcaactcgtcaktgagcaggcccctgcccagcatcgagctccacgcctgcggcccataccccaaaccaggcctgctcatcctgctggccccgctggccctgtggcccattctcctgtagggacgcccagccagccacctctaagtcgccgctgggactggcctgccccattgagcaacagagacgcttgacagccgcccgcctccattccttgacttcacccagaaatgggtccagaaaactgaatcccaccagcactggtttggagcaaccggacaccgaggtttcacctccagggrttccatggaagagcctcaatggagatgccacatcctnactgagttaaagatgggctgaggaacttgggtacccacaagtytgccttgggratcaaaagaaaatatttacctttagtttggttcattaaatgcatgaagtcaaaatatgaaaaaaaaaaaaaaaaaaaaaaaaaaaaaaactcga

SEQ ID NO: 575 - DNA, 2248 bp, Homo sapiens
acgcagaacgccgacggcttctccacctacgtgtgcctggtgctgctggtggccaacattttgcggatactcttctggtttggaaggcgctttgagtccccgctgctgtggcagagcgccatcatgatcctgaccatgctgctgatgctgaagctgtgcaccgaggtccgtgtggccaacgagctcaacgccaggcgccgctcctttacagctgcagatagcaaggatgaagaagtcaaggttgcccccaggcggtccttcctggacttcgacccccaccacttctggcagtggagcagcttctcggactacgtgcagtgcgtcctggccttcacgggcgtggcgggctacatcacctacctgtccattgactccgccctgtttgtggagaccctgggcttcctggctgtgctgaccgaagccatgctgggtgtgccccagctttaccgcaaccaccgccaccagtccacggagggcatgagcatcaagatggtgctcatgtggaccagtggtgacgccttcaagacggcctacttcctgctgaagggtgcccctctgcagttctccgtgtgcggcctgctgcaggtgctggtggacctggccatcctggggcaggcctacgccttcgcccgccacccccagaagccggcgccccacgccgtgcaccccactggcaccaaggccctctgacagtggggaggacgaggatgtgggaccgccagccgcgggcactggtgggccctgacctccccgcggggagggtgggtgccgtggcccctgcaggtgtggcagagatggggcacgggcattggggtctccatcagcctctgtggggtgtctcagggtgggcagtgggggtggggctgggacgctgtttgtgctcagcggggacagccagggttgatctggccccgagggttttggatgtttttaggatgacataaaaagcaagtgttttccccatttcctcttatgaaacaccgtctgagcccaaggtacacattgggcggcctgcaggaacctgctccaggtggacacacgggccagcagccgcgaaccttgaagctggggtgaccgcaggagaccctgtaaggcctgtgagcggagccctcgaccccgtgacaccctggccagacaccctgcttggactggggtggcctctgctacccaggggtctggcacgggggagggctggggctttctctgcctggtacacacggaaaggcggctgtgcggacgcagggtcaccgtgctccgggttttctgacagtcggtgtttcctgggcctttggagtggctgcgaggcctgaacgccttgtggatccgctgtgtccagcccggctgagcatcgccagggctagctcatgctgctcttgtcagcctctggttctcctcgagtccttggggacgtggcagatgccagcgaccatcagacaacgtggaggccctcatgggcaatggctgagggggccgggctgaggctgtgcacatgcagtctgcacgccactcttgggctctgctggcggagatccccttccttctgggtgcagactgcacctccggatgcagttttgatgtccatcttccaggagagagacggtctcgggtccagggagtggagggggctgcccctgccgtgcaggtcctggccgatggcgccttaccctgctgccctgggcttttggcctgaagcaaattcctgagtggggggtactggggcctgccgcatcctgtcctgtccactgcccacccccgtgtgctggctccctcacttctggctgcagtgggagccgccagtctgacccttgtcaccgcacgctctgcccccaccccgttgcaagaggtcacaccatgtcagcagccttgcactgaccgcagccggcccccaggcctcagagttctggatgcttccgtgcggctccaacaggcatcgtcttcccttccgcaggtggaggggccgcttcccgcaggcatctgagctctgtgccggggccgtggccatgggaagatgttccacgctgcctcctcctcgagttttcctcggaaacactcttgaatgtctgagtgagggtcctgcttagctctttggcctgtgagatgctttgaaaatttttatttttttaagatgaagcaagatgtctgtagcggtaattgcctcacattaaactgtcgccgactgcaggcgcagtgactgctgaatgtaccctgtgtggcgacttggaatcaataaaccatttgtggatcctga

SEQ ID NO: 576 - DNA, 534 bp, Homo sapiens
agcccttcgtggccggctttgccgtcatcaccgcggcccaggacgtgtggatgctgctggggggccgcctcctcaccggcctggcctgcggtgttgcctccctagtggccccggtgagtgtcccgtctctcgagtgtcctgtctcgcggcctgagaccgagggggagtgggacaaaccgctccccaggcctgggggcgcggctccccctggcgggaccttctgggtgccaggcttgaagtccctgcgttatctcgcggtccctcccgtcgaccctgggaaggatcctactgttctctccattttacactgaggtcatgacatgcagtctcggaaaggtgaagtcctttgcccaggcgaggtccacagctagtcagaggggaagcagttgcaggaacccagggttgtcccacttagccgtgcccytcttttgctctgcaaactgcggatgatccacaggagcccactccctacattttggttttcatccctggcttcggggtcaatgactgcaattagcaggaagttcctgtcct

SEQ ID NO: 577 - DNA, 1032 bp, Homo sapiens
tgcaggaattcggcacgaggcgggccgggacgggcatggccctgctgctgtgcctggtgtgcctgacggcggcgctggcccacggctgtctgcactgccacagcaacttctccaagaagttctccttctaccgccaccatgtgaacttcaagtcctggtgggtgggcgacatccccgtgtcaggggcgctgctcaccgactggagcgacgacacgatgaaggagctgcacctggccatccccgccaagatcacccgggagaagctggaccaagtggcgacagcagtgtaccagatgatggatcagctgtaccaggggaagatgtacttccccgggtatttccccaacgagctgcgaaacatcttccgggagcaggtgcacctcatccagaacgccatcatcgaaagccgcatcgactgtcagcaccgctgtggtaagcaaggctccgtccaggctgaggggcgtgccggtggcagctcggggccctggaggctgaggggagccctggcggctcttgtacgtgtttcaggcatcttccagtacgagaccatctcctgcaacaactgcacagactcgcacgtcgcctgctttggctataactgcgagtcctcggcgcagtggaagtcagctgtccagggcctcctgaactacataaataactggcacaaacaggacacgagcatgagcctggtatcgccagccttaaggtgtctggagcccccacacttggccaacctgaccttggaagatgctgctgagtgtctcaagcagcactgacagcagctgggcctgccccagggcaacgtgggggcggagactcagctggacagcccctgcctgtcactctggagctgggctgctgctgcctcaggaccccctctccgaccccggacagagctgagctggccagggccaggagggcgggagggagggaatgggggtgggctgtgcgcagcatcagcgcctgggcaggtccgcagagctgcgggatgtgattaaagtccctgatgtttaaaaaaaaaaaaaaaaaaac

SEQ ID NO: 578 - DNA, 1074 bp, Homo sapiens
gctttcctgtgtcccagcttttctgcgggtcttggcacctttcttggccacagatttctgggttacagagcatgtgtgtctgaggcattgcaggcagaaaagggtggccgacgtgacctctagctggactgctgggcaggggagctgtcctagataaaattggaaagaaacagtgacccagagacaggtggacaaagaattcggggactgatgggaactgagcttgggatccagactgaaactgattccagactgacctctagcacccaggacccagacacagggccatgggaccccagcatttgagacttgtgcagctgttctgccttctaggggccatctccactctgcctcgggctggagctcttttgtgctatgaagcaacagcctcaagattcagagctgttgctttccataactggaagtggcttctgatgaggaacatggtgtgtaagctgcaagagggctgcgaggagacgctagtgttcattgagacagggactgcaaggggagttgtgggctttaaaggctgcagctcgtcttcgtcttaccctgcgcaaatctcctaccttgtttccccacccggagtgtccattgcctcctacagtcgcgtctgccggtcttatctctgcaacaacctcaccaatttggagccttttgtgaaactcaaggccagcactcctaagtctatcacatctgcgtcctgtagctgcccgacctgtgtgggcgarcacatgaaggattgcctcccaaattttgtcaccactaattcttgccccttggctgcttctacgtgttacagttccaccttaaaatttcaggcagggtttctcaataccaccttcctcctcatggggtgtgctcgtgaacataaccagcttttagcagattttcatcatattgggagcatcaaagtgactgaggtcctcaacatcttagagaagtctcagattgttggtgcagcatcctccaggcaagatcctgcttggggtgtcgtcttaggcctcctgtttgccttcagggactgaccatctagctgcacccgacaagcacccagactctttcacataacaa

SEQ ID NO: 579 - DNA, 978 bp, Homo sapiens
gctcacaagataatatctcttgcctttttcctctcggagtgttcctgcggtttgtgatctctcttagctctggtagcctgttcaggccttaaggtatctgttcggtattatgtggtcaagtagctgggaccacaggatcacaacaccacgtctggctaatttttttttttttttttttttttttttttttgtagagatggggtttcgctatgttggccaggctggtctcaaactcctggcctcaagcaatcttccagccttggcctcccaaagtgctgggattacaggtgtgagccaccacktctggcttggagggcttattaaaacmccgattcttagcctcacccccagagtttctggttagtaggtcttggcagggctggagaattkgaatttccacaccttccttggtgatgtgttgttggtagttcagggagtacatgtgagaggaaccgtttagatagkaaaaactgcaaacctgaagaagaatagaagaatccttattctgkgctctcttagatttagtttcctcatctatgatcaataactattcatttcttcctcatttccaataacgatttgctgcttttaagagcaagagatcacttttccttcatgttgttttgctagtggcaaatcagaaatggtttcgccagtattcactgatcttgtaatcactctcggaatccagctgcatctctagtgtagagttttgggtcaacaagaataawrmwgagcttaaagaattggactcagactcttgaagtcaggggttgatgagaaggtggctctaatctattcattcaacaacttcctattgagcacctgctatgtgccaggtgctgttctagccactaagatagagcaggtaataacatagggccattgtccttatggaatttgtattgtagtggggtgaataaaaaagggcagtctaggtggggcccggaaaaaaaaaaaaaaaaaaaaaaaactcga

SEQ ID NO: 580 - DNA, 300 bp, Homo sapiens
gaccatatgttgcaggaagtcaaactggactttttgtggctactaaatttgcctttaatcttattgttctcaattttggaatcaagtatgaaaatctgcacaaatgcaatgtttacaagaactggttgattctgggaggcatctgctacagtctctttttatatggatatgtacatgtcctattctacaaaaatgattaaagataaaaacatacttgtatcccactgctactttagctgtcaaatttggtgtttcatcacattaaaagcaataaatcagtagttggtaatgtaaaaaaaa

SEQ ID NO: 581 - DNA, 1466 bp, Homo sapiens
ggcacgagtgcctcaaagactattatttgggaggatctagtgcaaatgttagtaatgtggatattgtgtagtgtcccaggatattaatgtttttagcctcttggcttttattctgtattgttgccccaaaagatgatgctcacttatctttcatccagtgtaaggatatctggaaagacaacagaaagtatagctgttttcatttcaaaagtgatcagctgcttgagctagcaagcaaggcttgcactagcttccaggcgcagtcacgcagtttcacagcaggcgcggttccctcggagcacccagagctgccctgcggtagtcagcagttgtgctgtggctgcactgccaggctgggtggcargtggatcggagccagcagatgtggctcaggaagtgccttcttggcctctccttaatctctttcagastctgtgggcccttgattgcactgtgggttgtttcagactccagtattaggagactgaaccccttggtggttttttggtgtgtgtgtgctgagmtgggttgaggacatgttaagcaggtggggtgcytcccctgggtttgctccgggtggtacctgtggtgtggggtggttctgagtagttctggccccactgctggagtatctgcccaytcagtttgtgagatggcagggcttcatcctggtctggtgcctcattttcttctttagcagtgggcttagaaccaatgcagattcccaagttaagtattttttctgtagcttaattattacaggcttctggtacctaagccctttcttactttctgttctgaggggaagagaagataatgttgtttctccgccccccccggagtggccccaggaccttgcatggcatttgcagcatttgcagcgtgcttgggtttgctttactagggtgaaagtgttgcaccccccagcacccacaaaggcacctctgctcaccctccggtgaggttctgactggccctgggacatcacstgctccaggatcctatgtggctcatcccaggagagatgtgggagggaaggggaaaaaaggcttacatttgctgagtggaattcatgtagatctgagttccgcattgattcctaagctgcagagcccttatgccttggctgttttgtgaatgttagtcggtcttaacctttttcaccgagttagcattggctgtctcaggaggctcacagctcctgctcctcctccaggggagtgcgccctcctcctctgtcggtagctgtcaggtgcccctttcctctgcagcagactgtcctgggtccttgcctggccttccccttacacgtgagcctgcagcttcattcacagcccctgtgtagaaagataggcactaaaagcagctgactggcagccctagaaacatgaagggtttcatttatagtttcagtccttttccttctttcgagccttaatttaaaaaaaaaaaaaaaaaaactcgta

SEQ ID NO: 582 - DNA, 1019 bp, Homo sapiens
  misc_feature (126)..(126): n equals a,t,g, or c
  misc_feature (202)..(202): n equals a,t,g, or c
  misc_feature (380)..(380): n equals a,t,g, or c
  misc_feature (476)..(476): n equals a,t,g, or c
  misc_feature (511)..(511): n equals a,t,g, or c
gtctcactgtgccacgcaggtgccctgcagccacggagacgaatgtggacggccagaaggtgtaccgagactgtagctgtatccctcagaatctttcctctggttttggccatgccactgcagggnaaatgcacttcaacttgtcagagaaagcccctccttctggttttcatattcgttgtgaattttctttacattcctncagcagcattcctgcactaacggcaactctacgatgtgtccgtgaccctcagagatcctttgccctgggaatccagtggattgtagttagaatactagggggcatcccggggcccatcgccttcggctgggtgatcgacaaggcctgtctgctgtggcagraccagtgtggccagcanggctcctgcttggtgtaccagawtcggccatgagccgctacataytcatcatggggctcctgtacaagtgctgggcgtcctcttctttgccatagnctgcttcttawamaagcccctgtcggagtcttcanatggcytggraamttgtytgcccagccagtcctcagcccctgacagtgcccacagatagccagctccagagcagcgtctgaccaccgcccgcgcccacccggccacggcgggcactcagcatttcctgatgacagaacagtgccgttgggtgatgcaatcacacgggaacttctatttgacctgcaaccttctacttaacctgtggtttaaagtcggctgtgacctcctgtccccagagctgtacggccctgcagtgggtgggaggaacttgcataaatatatatttatggacacacagtttgcatcagaacgtgtttatagaatgtgttttatacccgatcgtgtgtggtgtgcgtgaggacaaactccgcaggggctgtgaatcccactgggagggcggtggcctgcagcccgaggaaggcttgtgtgtcctcagttaaaactgtgcatatcgaaatatattttgttatttaagcctgaaaaaaaaaaaaaaaaaaaaaaaaaaaa

SEQ ID NO: 583 - DNA, 973 bp, Homo sapiens
ggggactcagtcacacagaaaatagaagaatgtgtgtacagttggaaggtctcagagaaaaggagtctgttggacagaatgaccagtctgtgactactgccatttttcatgaccatatatcaacccacattacagatgtaacttagtgagagaaaacatctccctgttttccttcatatattatgaaatatttactttttctagtattttgtctatcttacgtcaaagatttaaatatctttgacctcctgtactaaataccacgccacatcagttttagttgcctttcttttttccttaggctagttttttggtataccatttctaaaccaatggtaggaacattttaaggcatcttttgtctggaatawgttttagcatgtmcagcatgaaagttttatatgtttattaatttttgtttataattgttaatgaatattaattttgttaatgaatatatattaaaccaattaataaacagtcacaaagctgcaaaccgktttaataattattaaagttttaattttttaatggattttggtcatctaagttccgaaatgaaatacaccaaacttgttcttactttgccaaattgtcctactgtttctcagaatcaacatttttagacattatgtagaaacactctttaacctagttgtstcaggcttagtagagaaaggaaaagaaagaaagttggagctggaagaggaaagttggtaaatgtggtcagtagtgcattttgtgtgaccaggcaagttctgcagaacctcttctgaacaccttcacctgtgtaaaatcccaggcattagttaatctccaaccactatggcaggatatgcatctgagagcaaagaggcaaatggcaagcagagatcacaaaggtgcaagagctagagtagtgatagaaccagtgccaggacgatctaaattcccttgcattgtcaatacrcaaaaaaaaaaaaaaaaaactcga

SEQ ID NO: 584 - DNA, 1430 bp, Homo sapiens
ggcacgagcacttatgtgtttggcattctccgtcatcattctggccggggcgggcagttctaggagttggaactcagtcctggtggaaaaggaagtcgtggagggagggctagggccgtgggggaactgctctgctgagcctcttcctcacctgctgcttcctaggactaacctgaaaggctaaggtaccaggctgaagtcagtgctcagaaaaccaatcgtcattctttggggttttttttcttgaagagccactttctctttaccttgttctagcctgttggaggtagggtttctgcaattccaaaggccgtacacagcctctcaccatcagaccactttttaaggctcttcgttcatacctagctcgaagattcacttcctcaggaagccattttagttacaaatctgggaaaacttaaaatgctttcattgtgccatgttttctgttgcagcttcagtaccgtacctagtggtcaggcatacttacaagtttctttttacagtaaccccttgtggacatctaataaatggtcattattttttagtactagtttgttttcctgaacactgtaagatctgtgactgacgtttgataccttaaagcagtgccatataataactacccactatttgttctttatttctgtcagataaaaatgttctatgtagtgtctacagtcattttttttttaactagaatttagatttggaagtagtttttctattagttgatttgcatgaaatacaaaattaggaaaaggcttattccacctcaacctagttgaactattaatgatttttttttttttttgaggatttgggctctttctagatagaaaatcaccctgaacttctagctttgcattgtgaagtgagcatcatgaagatgagaaaatgttgggagatcatttttgcaaagggcataatagtcggcattcagatatgagttaactgcagagggaaaattgcaagctgtcatgttggccttgttcctctcaaccttctggtaacctaacaagctcctacaggttgtatgtgaaattgcaagatgattatatagccctgttgaatttacaaccagatcttgctttcaaaccattattagccaagggtttgattccacacctgtgttcatggattttttggtattagacattgctgtaactctgttttcactttttcatctgttatcttggctcacttaagggagaaggtatcagcagcctaggaccacttggtttctgtttttatgtttcatagttcatggctgataaaaattacctgtccttaggccgagtgcagtgcctcacacctgtaatcccagcactttgggaggccgaggtgagtagatcacctgagatcaggagttcgagaccagcctggacaacaagagcaaaactccatctccaaaaaaaaaaaaaaaaaaa

SEQ ID NO: 585 - DNA, 1949 bp, Homo sapiens
ggcacgagatctacctggaatgaacaagaatgaacgccagcctcatttcatgggttttggttctccacaggatctgcctcggtctgtcagacattcctaaggaaaattgtataataactatttcgggaatgcagttatctcatcatggtcagtctttggggaagtgggctgagaaattacatgtgttctattctctattttcattcctattgtgaccttcacaccgactcaaaaccttccttttagatacttctggatataaaaatatatgttaattttggggtttcacactcctgagtgaaaggcagtgtcatcaagtacgtgaatgcccagctcctaaatgtctttctcgttctcctcccacccagtcacgtcctccaggcagtgaccttcctttatttcacattccgcttacttccttgacccctcagcatttcagacctgaaaggacactggtactgttgtccttgtcggggcctgtggctttgcctctcattccctggtgaatgtcaggaaatagagggctgagactaatttttataggttctcaatttttcttgcttggggacaagctgttgacttagctctgaataggagtaataaggaggcagtgggccaggctgcatgacaactggttttcaggcccatataaaaaagtactaactttattatctcaagccatgcctggcctattgcaaagcccagtgtgggtgtcttggggcttgtatttgagattggagcttctctgacctccagtaccctttcctcaggggccacagtgtgtgtcacatgaatggcaaggtgaggtgaggcttgggggagctcctggtgctgtgtcacaccaccttacctgtgtgcattactctgtgcttgttcttttgcatacatctgctgatttgaacctcacggctctgacttaaggagcaggtaggtagggcatgtggtccttccctcccgtttcaaagacaaggaaagtgagtcacagagtagtgcactggcttacccaggacatacagtggcagagccaagactggagcctagctgcttgtactaaccatgccagtgccaccattaaccccaagtcactagtggtagctacttctgactatgactgtagtcactgtctcctggagaggagcctggccaccagattgatagtcccagctgagactctctcctgaactgataagctgttttgcatgcttggaatgcctttccccagtttgttcacctgataaactcatccttatcctcaagattcagcccagaagacacccttaaaggaagccttggctgtccttcccacccagtgttccctcactgacttctgttgctgctcacactgcattttacctgcttgcctccttccatgtgttcccagctagccagtaaattctttaaagacaagcattgtaccctttgcctcagtgtgcccagcaccaacctggcacatgctctattcatgttttccatgagtgtttcatgttagaggtgtattttgtacacaggttttatgctgggggctcagagagaagtggacagcagattgttggccctcccaggaagaaaagtcccaacgagctggtggatgatctctttaaaggtgccaaagagcatggagctgtagctgtggagcgagtgacaaagagctggctgatgagagccagaccctgaaggaagccaacctgctcaatgctgtcatcgtgcagcggttaacataaccgcccagccagctgcctggcctccctcctgtgtttcccatggccagtggccatgccccatggggatcgcccctcctgcccccttgtgcatacccagcagtccagtgcaacgtctcctccatagctctgggttcttagatcttggttggacgtttgttttctccttagttgcatttcctgggtttttgtgatgatcaatggactttaatgaaaaaaaaaaaaaaaaaa

SEQ ID NO: 586 - DNA, 1499 bp, Homo sapiens
  misc_feature (52)..(52): n equals a,t,g, or c
  misc_feature (66)..(66): n equals a,t,g, or c
  misc_feature (84)..(84): n equals a,t,g, or c
agcttattgcaaagacaaatgtttgaagtgtttgttgagatttcctgttgtncttcctgaggcagncacagcataagctctttnaccctctacttctcagcacataagctttcttaccatctatcactggagtcaggggtgaggggaggaccgcatgacagttggttaatatacacttattttttggcaaaaacgttttctctgggaccagaatgatcttgatactgaaaaaatttctagtgctagatcctctttctaagtgtgaaaggacttatctggaatgctccagaatgatcccaagtgttgagctgagagggacctggcagcagaatctgattattgaaaagtggcaattgttgatttattgaagacagaataataactcagcagaactgttatgttgagctgaacccgacctccttcagccgaatcatgcaagaatgcctgctgcatggctgttgctgctacttattaaggcttggtgttctgggcacagtgcaatgcatttctacatggttgatcctcacagcaaatgaacaacacaggcttaaggaaacaagcaactctcaaagtcctgcagtgagtagagcttagctgttggtagtcaacatgccacgcgattcggragttgagcctgtctccagaggttagagatgttcagtttcctcttaaggttcttacgtagatttttttcatgactttatctacatcctccttaaatttacgtttttagtccttactggctcttgatatcaccagttttgttgttattagtaatttctaactgccctaaatttgtctgttttaagattcaagggatgatacctcagtctgttatctggaatatggtttacaaatccattttttctcttcaaggctttgaaaacattgacattgtctcctcctaacatttttatttgtcttgcagactcctaatttatttaatttatcgttaggaagacgacttttctgtcttttgatgattttagctgcccttctctagaccttgctgattccattatctttaccaagaattgaaagtgaaagtggcatttgtcatagaatgccatggtcttattccaaagtatcttaggatggaacaatacaaggcataatatggggtcagtgaggtttgttacacgagtgaatgaccaacaacactactgtctgttcaaacccagtctgaagggtgaatcagaccgaccattggccgtgagggtctggactgctcagtattatctcaaggatatcaagggttattggaaactgtgtgatcaaaggggctccatgactttatgcagggattcagtagggagccaagaaggttgagaatagttcagagaccagagtctaagaccaatcaagaagaatggatcaattagagatatgaattctggtgcttatatttttgtggagctggttgtgagataaaaggtcaagcctaccagactgaaaagtgtatgtgaaagctctttaaaaaaaaaaaaaaaaaactcgag

SEQ ID NO: 587 - DNA, 1558 bp, Homo sapiens
gcacatgcggccttgcagctctccttacgcacatgcgggccttgtagctctccttacccacatgcgggccttgccgctctccttacccacatgtgggccttgcagctctccttacccacatgcggccttgcagctctccttacccacatgcggccttgcagctctccttacccacatgcgggccttgccgctctccttacccacatggggccttgccgctctccttacccacatgggggtcttgcagctgtccttacgcacatgcgggccttgcagctctccttacccacatggggccttgcagctctccttacccacatgcggccttgcagctctccttacccacatgcgggccttgcatgctgttggctctggagcctctcgtctcacaggtctctacaggtgcaggccactcaccgtctggtggtcaggaccataaaggacagggttatgttaaaggttttgcctcaaaccagaaggcgaggaccctttctgtccagttgccggaatgatgtcatgaggaactgtgtgcccaggcacgctgtgctagttacaacatgtgtttttgtttcattccccacacactgtaaggtgggcatcactgggcccatcacacaggtgaaacagaagcccgggaatcactcgtccccttgcccagtcatacaactagtagccaaggcagaatttgaactcatgttgccctcagtcccaaaacctgtgtacttaacccttgttctctcctgctggtgtctgtgtgatgtcccatgtctgtctgtctctctctaaagggacagtgacacaccaggaggatacccagatgctggggggccttgggacagagtctgggaggattgagtgaaggagcaggtgagggtgagcctggagagagaacgccctggtggagagtttatgtagaaaggggattaggtctccgggaggaaccggatccatgtggtctgctgagatggctgagtctggcattcagatgtgccacccaacagaagaggccctggagggacgccccctttgctgggtggcagccgtgggattccggggtctgccttggaggtcctggagaggatgtcgtggccctggccctagactcaagctgcctgggtccagttcagcccggccactcctgctgtgggccctagccaggggccttcactccaccgactgctgtgtgtttggtacatggtgtcacccaggccatgtgcttagcaatgtgcctgacagccagtgccggtgtcagccattacagggacacacgtgcctggaggttgaggccacgttctgtcacctaggcccgctcgtggtcctgggctgggccaaacccccctttgaaaggattcctttttgcccctggcataggctctcattgtcctagtgaacagctacatctttttaacaagccagaaaaggccagctggcagtggctctgcctgaaatcccaagactggctggccgaagcaggaggatcacttgaggccagcctggccaaagtaagcaagactctgtctctacaaaaaaataacaaaaaaaaaaaaaaaaactcgag

SEQ ID NO: 588 - DNA, 549 bp, Homo sapiens
  misc_feature (474)..(474): n equals a,t,g, or c
  misc_feature (484)..(484): n equals a,t,g, or c
  misc_feature (528)..(528): n equals a,t,g, or c
gaattcggcagagcagatgcttcccactagagaagctaagaagctgtggcagccacasccgggacagggcctggcctccagcccagggctttccctgatgtccagcctcagctgcctcttcctgcctcatcccacccgcaagaggwgctggggaccaragacagagacacaaactccatttgaatgtgaaccttggcaccatggagatgctcagggtgagcccagtctgctctctcattagtatgaatttccttgtgtttctgtctctctcctcttccctggtatcagctgctggkcccaggtttccttccagagaggagcggggggtgggtggggtggtgctgattaaatctgaggacatgacattgrgcgagagaagcaaggggagctgstgacctccctggatggataaccatcaggaggcggtarcagagtycamataccatcaccttctcctgcagatgttggttcagncactttcctnctaccacagatgggctatgtgtttcaaagcagaagagcagaganggcagagaaccccagctggtt

SEQ ID NO: 589 - DNA, 1294 bp, Homo sapiens
ctgcagaattcggcacgaggttatttcacctctcttggcctcagtttctctgtgaaatcaggaattaacatggtctctgagacccccttctgatggtgaatgtgtggtttggtgattttgtggccctgcatcatgaccttatttagttctctttcaacaggggatgttttactgccttgtaaaatcctcgtgggactgcgtgtctttataggagccagggtgtaaatgaacagaattcagattggttctaatatattttacctctaaaagaaagggcatggggaggccatgaccttaaagcaggttttttctgttgtctgtgaagcctgtgatgattgagagtggctgggactggcgggacgatgtttgggtggaagagggaggccatctcgatgcgccccgtcccggggaggcacccagcctgtaaggaggtgatgtctatctacactgagcgcaaggaccctgaaccgggggaggctgaggcggggcctcttgattcccaccctgtcccccagtggctaggctagtgtggcccgggaaatgacttccatctctccctccaggcatatttaataagaggccagtattttcagattctgccgcttctggacgaatgtctcagagagctgggaggcgccctggaggatggaacccttccttgagcgttgttgaggtgtgtcgggggtgccgtggcacaggccccctcccctggggggcatcactgttcccttgctctgcatccccgctgtttcccctgcccctgaacaggcgtggagatgtgcacgggacactcggaggccggatgctcaacagagtggagtgccgcgacggtgtggccgcagcctggctgtgccttcacgacgcagctgcaatcagaggagctgtgggacgctgtcccatgtggacacagcccactcactgggtgctgctcctgtgctgggcgctgcacttttattgtcgttaaaaatttatattaagatgcggccgggcatggtggctcatgcttgtaatcccagcaccttgggaggccgagacgggcggatcacgaggtcaggagatcgagaccatcctggcttacatggtgaaaccccgtctctactaaaaatacaaaaaaattagccgggtgtagtggtgagtgcctgtagtcccagctactcgggaggctgaggcaggagaatggcgtgaacccgggaggcggagcttgcagtgagccgagatcgtgccactgctctccagcctgggcgactgagcgaaactccgtctcaaaaaaaaaaaaaaaaaaaaaaaactcgag

SEQ ID NO: 590 - DNA, 904 bp, Homo sapiens
ggcacgagatcgtcttgtgacaagacttgctgagaagcaccttaaaattcactgtgagccacattttgtcttttactgtctcatcggatagggtagatcaatgtcctttactgtagcagagactctctcatgggcaggaccatcatggaaagttctgactacatcaagaaaggcgccaatgtctcacctgtgcttggggtcaggcagcaggctgtgatgccggtgcctctctggttggtactgtggttctgcttcctgttatatgtagcctcacgaaggacctttggattagccaattacatgcccctaccctgagcttcttccccagctctttgacttcctggacattggtgaatatcctgaataagcaaaagggataaaattcatagaaatatggtggcaaaaatatacaacttcagcccagttctttgggtccatgttggtaaggagtccagttggcaagacaagctgcccaaggaagtgcctcagaagtctgggtcaaagaggagggccagatctgttctgtgagaccctatgtgattgttatatttttaaataatatataattaagcaggacaaattaaatactccatggctttggggaaattgttgctttaaagtcctggaatggggctgggcacggtggctcatgcctattaatcccagcactttgggaagccaaagtgggtggatcacctgaggtcaggagttcaagaccagcctggccaacatggcaaaaccctgtccatggtggtgtgcgaggctgaggcaagaaaatcgcttgaacccgagaggcagaggttgcagtgacctgagattgcgccactgcactccaacctgggtgacagaatgagactccgtctcaaaaaaaaaaaaaaaaaaaaaaaaaaaaaaaaaaaaaaaa

SEQ ID NO: 591 - DNA, 1374 bp, Homo sapiens
ggcacgaggtccggcctccctgacatgcagatttccacccagaagacagagaaggagccagtggtcatggaatgggctggggtcaaagactgggtgcctgggagctgaggcagccaccgtttcagcctggccagccctctggaccccgaggttggaccctactgtgacacacctaccatgcggacactcttcaacctcctctggcttgccctggcctgcagccctgttcacactaccctgtcaaagtcagatgccaaaaaagccgcctcaaagacgctgctggagaagagtcagttttcagataagccggtgcaagaccggggtttggtggtgacggacctcaaagctgagagtgtggttcttgagcatcgcagctactgctcggcaaaggcccgggacagacactttgctggggatgtactgggctatgtcactccatggaacagccatggctacgatgtcaccaaggtctttgggagcaagttcacacagatctcacccgtctggctgcagctgaagagacgtggccgtgagatgtttgaggtcacgggcctccacgacgtggaccaagggtggatgcgagctgtcaggaagcatgccaagggcctgcacatagtgcctcggctcctgtttgaggactggacttacgatgatttccggaacgtcttagacagtgaggatgagatagaggagctgagcaagaccgtggtccaggtggcaaagaaccagcatttcgatggcttcgtggtggaggtctggaaccagctgctaagccagaagcgcgtgaccgaccagctgggcatgttcacgcacaaggagtttgagcagctggcccccgtgctggatggtttcagcctcatgacctacgactactctacagcgcatcagcctggccctaatgcacccctgtcctgggttcgagcctgcgtccaggtcctggacccgaagtccaagtggcgaagcaaaatcctcctggggctcaacttctatggtatggactacgcgacctccaaggatgcccgtgagcctgttgtcggggccaggtacatccagacactgaaggaccacaggccccggatggtgtgggacagccaggcctcagagcacttcttcgagtacaagaagagccgcagtgggaggcacgtcgtcttctacccaaccctgaagtccctgcaggtgcggctggagctggcccgggagctgggcgttggggtctctatctgggagctgggccagggcctggactacttctacgacctgctctaggtgggcattgcggcctccgcggtggacgtgttcttttctaagccatggagtgagtgagcaggtgtgaaatacaggccttcatccgttaaaaaaaaaaaaaaaaaaaaa

SEQ ID NO: 592 - DNA, 652 bp, Homo sapiens
gaattcggcacgagcaacagtggggcactctgctcccaggcaggtcccactgggctgagccgcacagcctggctttgggcttccctgactgcaccacccacatcasctgcctctagcccttaamatacaaaacttcccccagtcactggccgccaggctgagttgggggatgtgttacatccctgggtccactggggggcagtgttggccatggtgttggtgctggctctgccgagaggcgttggagtggctgtgtggggcggtgagcgccggcccagcctgatggaacccactgtaccaggcccaggcctcagcctctgagaaggacttccctgtgtcactcactcatacatgtcctcaggacgtgaagacatttcagcagaccaaagtttccttcgaatttccttcgaatcgtccagatacttggagacatctcctcctcacctgtggggtgctggggcagtcctaggcgtgggggcagatgggtggacagctgctgctgccctgctgggggtgggcagcccttggagcacacagtggtgaagacattcctgaatatgtctcaggctgtagaaatcttattttgtggaaagattttagagaatcatcaaaataaacttttaccaaataaaaaaaaaaaaaaaaaactcga

SEQ ID NO: 593 - DNA, 3059 bp, Homo sapiens
ggcacgagctgtcatccgtttccatgccgtgaggtccattcacagaacacatccatggctctcatgctcagtttggttctgagtctcctcaagctgggatcagggcagtggcaggtgtttgggccagacaagcctgtccaggccttggtgggggaggacgcagcattctcctgtttcctgtctcctaagaccaatgcagaggccatggaagtgcggttcttcaggggccagttctctagcgtggtccacctctacagggacgggaaggaccagccatttatgcagatgccacagtatcaaggcaggacaaaactggtgaaggattctattgcggaggggcgcatctctctgaggctggaaaacattactgtgttggatgctggcctctatgggtgcaggattagttcccagtcttactaccagaaggccatctgggagctacaggtgtcagcactgggctcagttcctctcatttccatcgcgggatatgttgatagagacatccagctactctgtcagtcctcgggctggttcccccggcccacagcgaagtggaaaggtccacaaggacaggatttgtccacagactccaggacaaacagagacatgcatggcctgtttgatgtggagatctctctgaccgtccaagagaacgccgggagcatatcctgttccatgcggcatgctcatctgagccgagaggtggaatccagggtacagataggagactggagaagaaagcacggacaggcaggtaaaagaaaatattcctcttcacacatttatgactcctttccaagtctctcgtttatggatttttatatcctgaggcccgtgggtccctgcagagccaagcttgtgatgggaactctgaaattgcagattctgggggaggtgcattttgtagagaagccccatagccttcttcagatctctggagggtccacaacactcaaaaagggtcccaatccttggtctttcccttctccctgcgccctgtttcccacgtgagcacggaactgcctgctctctctgcttgctttcagaattgagagacgcccggaaacacgcaggtaccaacgcctgagagggtaacagtgggcatggagtaggaagatgaccagtgacagatatggagcccatccagcttgtagacagcaaatctgtgatgcccgaatccaccccagggtgcagctgcctctaaatacacttcttggcccaggacttggagggaaaagcgtagggactgggtcagctaggaggggtcacaggcaagacgccagggaactgagggcattagtagctggcttctaggggtctgtgcaaaggggaacgaagtgaagttagcaggaactggtgggtggaaggaagctgaatcctggagtcactcaaggtctcacaaagtcaaatagagggcttacgtgggagggcagtggtagggctgggtgaacatctcatggttgagcatctccaagcatcagtgaggcacgggggctgccctggagaaggtacatggctggtgggatagtgggactggccggatcctacccggagccagtctgcagtgggagggtcgacctcttgctccagcccagatttcgtcttcagtaactcatgcttcctctctcccccaccgcaccccagtggaggtgactctggatccagagacggctcacccgaagctctgcgtttctgatctgaaaactgtaacccatagaaaagctcctcaggaggtgcctcactctgagaagagatttacaaggaagagtgtggtggcttctcagggtttccaagcagggaaacattactgggaggtggacgtgggacaaaatgtagggtggtatgtgggagtgtgtcgggatgacgtagacagggggaagaacaatgtgactttgtctcccaacaatgggtattgggtcctcagactgacaacagaacatttgtatttcacattcaatccccattttatcagcctcccccccagcacccctcctacacgagtaggggtcttcctggactatgagggtgggaccatctccttcttcaatacaaatgaccagtcccttatttataccctgctgacatgtcagtttgaaggcttgttgagaccctatatccagcatgcgatgtatgacgaggaaaaggggactcccatattcatatgtccagtgtcctggggatgagacagagaagaccctgcttaaagggccccacaccacagacccagacacagccaagggagagtgctcccgacaggtggccccagcttcctctccggagcctgcgcacagagagtcacgccccccactctcctttagggagctgaggttcttctgccctgagccctgcagcagcggcagtcacagcttccagatgaggggggattggcctgaccctgtgggagtcagaagccatggctgccctgaagtggggacggaatagactcacattaggtttagtttgtgaaaactccatccagctaagcgatcttgaacaagtcacaacctcccaggctcctcatttgctagtcacggacagtgattcctgcctcacaggtgaagattaaagagacaacgaatgtgaatcatgcttgcaggtttgagggccacagtgtttgctaatggatgtgtttttatgattatacattttccccaccataaaactctgtttgccttaattcccacattaatttaacttttcctcctatacccaaatccacccatggaatagttaattggaacacctgcctttgtgaggctccaaagaataaagaggaggtaggatttttcactgattctataagcccagcattacctgataccaaaaccaggcaaagaaaacagaagaagaggaaggaaaactacaggtccatatccctcattaacacagacacaaaaattctaaataaaattttaacaaattaaactaaacaatatatttaaagatgatatataactactcagtgtggtttgtcccacaaatgcagagttggtttaatatttaaatatcaaccagtgtaattcagcacattaataaagtaaaaaaaaaaaaaaaaaaaa

SEQ ID NO: 594 - DNA, 1963 bp, Homo sapiens
  misc_feature (5)..(5): n equals a,t,g, or c
  misc_feature (1116)..(1116): n equals a,t,g, or c
  misc_feature (1253)..(1253): n equals a,t,g, or c
ggtanctgcagtacggtccgattcccgggtcgacccacgcgtccggagaaatgcaaattaaaacagtaaagtgtcattttcacttcctggattggcaaagggttttatgtattttactgacagtgctcaacattagcagtaaacaacaaatggtgagtaaatatgagcttcggaacctcagggaaatgatctccttatttcaacctgcagattccttcctacaaccagtgtagagcagagtaccaggacgggccattgagcaccctggtgttgagatcaagtggcctctagtcagagttgggtcagggccactgtgagtgggctgcccccaacatgagtcagctgtctaggactagtttatctctgcttctcactttactggtattatggggcagctcctgctgtcttccaatttggtgtcttccaaatcggcaccgtcttttaaagttgagtttcttgttattctcacctgatataccttatttatcccacacccaccccaataacatatcgtgctcagtgttatctttgagacaacacttgaattttactcagcctggagcgctcttcacatgtcttgtccagatccagttcggactcattcttcagccgtgcatcagtaaatgggggctaggttaaactgtggtgacaaacaacctccaaatttcagtggctcaaaaatcttcttcctcatttatwtacatttcatcatgggtcaggtgagaggtagctctgtgctgtgtcatcctaacacaggaatccagacggaaggagggacaatcaataagatccccattgctatagaaaagaraaaaaagtatgcggaatarcactcygtttcytggagawtyctcctgaaaaagtcacatgttatttcttctcacctccattggcaaaaaaaaagtcatgtggccatgtgaaaatgtaagtaggcgggatggaacagtcagaatgcattcataaaatatgaactgaaaatatctggagaacakcacctatgactaccacgaatgccaacatgcatccctaacaacccagtgctgtcaccctccaaactttttatgtcttgcaaagtattagaacttcttatctgaagccataccactcagagggaangcaaaatacatattgacatctcctttaggatgtccttagagaattcaaggaaaagaagttaaataattttaaagtgcttttgggtacagctatttagcactagagggtaagattagacatagattgtaaagataatnatagggttagggataggattaggatctgggtcagagtcaggsccagaagtatggttagaggtggggtcatggtcagggtsgagatcaaagtcagggtcaaagtaagggtcagaattagggacccaggatagggatcaggatttaggttcagtgtcaaagtcttgggacaaggttagggttagaattagaaccagagctttgttctcctcaggacccacccgagggtgggtcaccatggctttggagcgcctggtagtgtggtgtgtccacagkgaagaccagagtttcattgtccttaagactgacytggggagatgtggctgtagsccattgaggaaggtgaggcaacagcttcctgtctgctyccccgtgtgctgaggagggagttctgccatgggctttactttcacatgttatattccacaagtcttgttttacaaaagcatcccttccttgaggcttcggctgctcatcgctgctcatcatmatagcgtgccataacatatagtaagatttgggtttgtttctggggagatatcttggtatagagaaaggagaaatgcttagagccaccatcaggacagttgggatgaaagttgggtataggcagaggctggaggaaacatgtgcatcccctgtaaacacttttattcatgttttaattactcatttttcttacagtgttaaattagtaaagatagtattgaaaa

SEQ ID NO: 595 - DNA, 963 bp, Homo sapiens
  misc_feature (2)..(2): n equals a,t,g, or c
tncagaggccctgcggagttgttcagaaccccaactctctctggctggctaccccctgaactactgggtctctggacccattgtgcccagccacccccaaaagccctcaggcgagagctgcctgaggaggcaccgctgaggaggaaaggagaaagattgaagttccaagtgagattgagagatctccctagaggcagctgaagaggagaagtcccgcatcagcctcatcccaccagaagaacggtggtaagcggccaggctccgtggragccagggcccamagcccttggccagktkgtggaaacagctgctgggatgggtatgccccttgtcactgtcacagctgccaccttccctactctctcatgtcctcctagggcctggcctgaggtggaggcgccagaagctcctgcattgcccgtggtgcctgaactccctgaggtgcccatggagatgcctttggtgctgcccccagagctcgagctgctctcactggaagcagtgcacaggtaccaggraggtggcaccttgatggggtggacccgggctgaagcctctgctaatggttcttgatccctatagggcagtggcactggagytgcaggctaacagggagcccgacttcagcagcctggtgtcamctctcagcccccgcaggatggctgcccgggtcttctamctgctcctgggtgartgtatgcatgtgtgtgtgtgtatgtkgggcagggacacagagaccagaggcccgtacagggactcccccgacctgccctctcctcgcctcttgaccagtgctctcagcgcaacagattcttcacgtgaaacaagaaaagccatatggtcgcctcctgatccagccggggcccagattccactgaggttagagtccatttacaaagctgccaggaaaccggccacttctagtaaaccacgtcgtgcctcactgaaaaaaaaaaaaaaagg

SEQ ID NO: 596 - DNA, 675 bp, Homo sapiens
ggcacgagctgctcttcttcttcaacatgctcttctgggtgatttccatggtgatggtggctgtgggtgtctacgctcggctaatgaagcatgcagttctccctctgcctcaccgctgtgttcctgctgcagctggccgctgggatcctgggcttcgtcttctcagacaaggctcgagggaaagtgagtgagatcatcaacaatgccattgtgcactaccgagatgacttggatctgcagaacctcattgattttggccagaaaaaggtatgggtcagccagtggtctgggggactgtgggtaaaagtgaatgtcatcccaagagatgcctcaccctctatgcctgtggggctcttcattacctgccaggtaatggcttctgggaaggggtttggcaaaaaaagcacacgtagcagagtgctttaaatgtacttttaaagacacagaacagtatatatagtaatctactgtgttataaatggttacttacagggggtgaggaactgggcagattcttgaatattacctcttcaaaagtgacattttaggctggtccaaagggagtgagttatctcatttgattgttcacagtcagctacagatccaactccttgttctactctttccccccttctcagtgctgcacttgactagactaaaaaaaaaaaaaaaaaa

SEQ ID NO: 597 - DNA, 1134 bp, Homo sapiens
  misc_feature (1)..(1): n equals a,t,g, or c
  misc_feature (1134)..(1134): n equals a,t,g, or c
ncgccccggactcttctcagttgagagtgcggttcctgggcaggtttccacaccagttcctttccgcgtccttcggccctggctctggctgcctggcggaggtggggtagcatttgtcatttgcacactgctggctttatctttggggctgcaccccgaggcaacaaatgcaggatgctctgtcacccacatgtccaccaccatctggtttgccttttggctactttgactttctccttaaatgcttcctgtgctgagcaaacattccacagccagcagagcaatggagagttcatggccactcttcccagtatcagcaagcaatttggggtgatcgtttggaagcctcagaggaaagatgtcatcaggcttcctgtggctttgtccttcagcagtggggctcggcttgctttcacctgccttaggaagatttctggcttccgagctctgatatggggagaagataagggctgggatctttgagtctgcccctagctgggtatgtgcgtccggtgtgcgggccttggagtttttggtaatgactcacttgtgctctttctgggatctgtctccctcccacatgaccccgtggggtccctgaatgactgttttagagtacccatgtgggttccctgagtcacagcaggggatgtttaataaggaggttagcactgagcttggggacgtgctgtcacaccagcaggacgctgcaggaaggagcaggctacttcctttcttgacgtgcaaataactcgtataggctaatcaacaggcttataagttaaaagggctaccgctcggccccttggggattccatcccctcctctgtaacttggagatgtttgtttctgctgcagactcagagggttgcgatgaagagtggtgggactgagttgagaagcttatcccttcgctgggtgggaggtttctaattgccccgttctttgggggatccttaagtccagcttccaggtgggggcagcgataggaccaagttctcctagtagtctctgggaagccacttgagggaagctgccggtcatcccatgcacccattggtcttctccagcaggccctgtaggtcgtccatgttccatgccttctgggttcttgggggagaaggaagctgttgn

SEQ ID NO: 598 - DNA, 1583 bp, Homo sapiens
ggcacgagggacaacgactatctgctacatggtcatagacctcccatgttctcctttcgggcttgcttcaagagcatcttccgcattcatacagaaactggcaacatctggacccatctgcttggtttcgtgctgtttctctttttgggaatcttgaccatgctcagaccaaatatgtacttcatggcccctctacaggagaaggtggtttttgggatgttctttttgggtgcagtgctctgcctcagcttctcctggctctttcacaccgtctattgtcattcagagaaagtctctcggactttttccaaactggactattcagggattgctcttctaattatggggagctttgtcccctggctctattattccttctactgctccccacagccacggctcatctacctctccatcgtctgtgtcctgggcatttctgccatcattgtggcgcagtgggaccggtttgccactcctaagcaccggcagacaagagcaggcgtgttcctgggacttggcttgagtggcgtcgtgcccaccatgcactttactatcgctgagggctttgtcaaggccaccacagtgggccagatgggctggttcttcctcatggctgtgatgtacatcactggagctggcctttatgctgctcgaattcctgagcgcttctttcctggaaaatttgacatatggttccagtctcatcagattttccatgtcctggtggtggcagcagcctttgtccacttctatggagtctccaaccttcaggaattccgttacggcctagaaggcggctgtactgatgacacccttctctgagccttcccacctgcggggtggaggaggaacttcccaagtgcttttaaaaataacttctttgctgaagtgagaggaagagtctgagttgtctgtttctagaagaaacctcttagagaattcagtaccaaccaagcttcagcccactttcacacccactgggcaataaactttccatttccattctcctagctggggatggggcatggtcaaacttagccatcccctcctcagcaaggcatctaccggcccctcacagagacagtactttgaaactcatgttgagattttaccctctcctccaaccattttgggaaaattatggactgggactcttcagaaattctgtcttttcttctggaagaaaatgtccctcccttacccccatccttaactttgtatcctggcttataacaggccatccatttttgtagcacacttttcaaaaacaattatataccctggtcccatctttctagggcctggatctgcttatagagcaggaagaataaagccaccaacttttacctagcccggctaatcatggaagtgtgtccaggcttcaagtaacttgagttttaatttttttttttttcttggcagagtaatgtaaaatttaaatggggaaagatatttaatatttaatactaagctttaaaaagaaacctgctatcattgctatgtatcttgatgcaaagactatgatgttaataaaagaaagtacagaagacacttggcattcaaaaaaaaaaaaaaaaaaaaaa

SEQ ID NO: 599 - DNA, 1991 bp, Homo sapiens
  misc_feature (300)..(300): n equals a,t,g, or c
  misc_feature (353)..(353): n equals a,t,g, or c
gcgacgctcggcccgaagatggcggccgaatggggcggaggagtgggttactcgggctcaggcccggccggagccggtggcgctggagcgggtctgtgtgggtccgaagcgttttactcctgttgggcgggctccgggccagcgccacatctactcccgtctccttgggcagttcccctccctgccggcaccacgtcccctctgacactgaggtcataaataaagttcatcttaaggcaaatcatgtggtcaagagagatgttgatgagcatttaagaatcaagactgtctatgataaantgktgaasagttgctccctgagaaaaagaatcttgtaaagaacaagcttctcncacawgcgatttcttatttagagaagacttttcaggtccgtcgacctgcgggcactatcttacttagcagacaatgtgcaacaaaccaatacctccggaaggaaaacgatcctcacaggtactgcaccggggagtgtgccgcacacacaaagtgcggccccgttattgttcctgaggaacatctccagcaatgccgggtctaccgtgggggtaagtggcctcatggagcagtgggtgtgccagaccaagaaggcatctcagatgcagactttgttctttacgttggtgctctggccaccgagagatgcagccatgaaaacatcatctcttatgcagcctattgtcagcaggaagcaaacatggacaggccaatagcaggatatgctaacctgtgtccaaatatgatctctacccagcctcaggagtttgttgggatgctgtccacagtgaaacatgaggttattcatgccctgggtttctctgctgggctgtttgcattctaccatgataaagatggaaatcctctcacttcaagatttgcagatggcctyccaccttttaattatagtctgggattatatcaatggagtgataaagtagttcgaaaagtgragagattatgggatgttcgagataataagatagttcgtcacactgtgtatctcctggtaacgcctcgtgttgttgaggaagcacgaaaacattttgattgtccagttctagagggaatggaacttgaaaatcaaggtggtgtgggcactgagctcaaccattgggaaaaaaggttattagagaatgaagcgatgactggttctcacactcagaatcgagtactctctcgaatcactctggcattaatggaggacactggctggtataaagcaaattacagcatggctgagaagttagactggggccgaggaatgggctgtgactttgtcaggaagagctgtaaattctggattgatcagcagagacaaaagagacagatgctgagcccttactgtgacacgctcagaagtaacccactgcagctaacttgcagacaggaccagagagcagttgccgtgtgtaatttgcagaagttccctaagcctttaccacaggaataccagtactttgatgaactcagtggaatacctgcagaagatttgccttattatggtggctccgtggaaattgctgactactgscctttcagtcaggaattcagttggcatttaagtggtgaatatcagcgcagctcagattgtagaatattggaaaatcaaccagaaatttttaagaactatggcgctgaaaagtatggacctcattccgtttgtctaattcagaaatcagcattcgttatggagaagtgtgagaggaagctgagttacccagactggggaagcggatgctatcaggtttcttgttctcctcaaggtctgaaagtttgggtccaagatacttcatatttgtgtagtcgggctgggcaggtcctccctgtcagtatccagatgaatggctggattcacgatggaaacctgctctgcccatcatgttgggacttctgtgagctctgtcctccagaaacagatcctccagccactaacctgacccgagctctgccacttgatctttgttcctgttcctcga

SEQ ID NO: 600 - DNA, 975 bp, Homo sapiens
accctactaaagggaacaaagctggagctccaccgcggtggcggccgctctagaactagtggatcccccgggctgcaggaattcggcacgaggccgacgcctggggtgtggagctgccccaccgccaccccgtgggcgagtggatcaagaagaaaaaacctggcccgagagtcgaagggccgccccaggccaacagaaatcacccggccttacctctgtccccacccttaccttcccccacataccgccccctgcttgggttcccaccccagcgcttgccgctgctcccgctcctgtccccacagcctcctcctcccattctccatcaccagggaatgccccggttcccacagggtcccccagatgcctgttttycctcagaccatactttccagtcggatcaattctattgccattcagatgtcccctcatcagcccatgcaggtttcttcgtcgaagacaattttatggttggtcctcagctgcctatgcccttcttccccacaccccgttatcagcggcctgccccagtggtacataggggttttggcaggtatcgtccccgtggcccctatacgccctggggacagcggcctcgaccttcaaagagaagggccccagccaatcctgagccaaggcctcaatagacggacctaggccttatttcctctttatgaacatggattggacagatctgacacttcctttccattgcttggcctgaacagactgaccttgttaacttaagcctggagtccatgcctcgtcttccttttgttcattgctgttaccaagaaagccaaggaagagcagcctgactcattcttcttggctgcagcctcttccccacttcctgggagtgacccagcgttattcctgcctcctcactcctattctctttgcctttgtgtaaaaataaaatggaaataaacaagttgcacagaaaaaaaaaaaaaaaaaaaaacccaagggggg

SEQ ID NO: 601 - DNA, 1209 bp, Homo sapiens
ggccacgagagtggatgccattcaccaacccggcccgcaaggacggagcaatgttcttccactggcgacgtgcagcggaggagggcaaggactacccctctgccaggttcaataagactgtgcaggtgcctgtgtactcggagcaggagtaccagctttatctccacgatgatgcttggactaaggcagaaactgaccacctctttgacctcagccgccgctttgacctgcgttttgttgttatccatgaccggtatgaccaccagcagttcaagaagcgttctgtggaagacctgaaggagcggtactaccacatctgtgctaagcttgccaacgtgcgggctgtgccaggcacagaccttaagataccagtatttgatgctgggcacgaacgacggcggaaggaacagcttgagcgtctctacaaccggaccccagagcaggtggcagaggaggagtacctgctacaggagctgcgcaagattgaggcccggaagaaggagcgggagaaacgcagccaggacctgcagaagctgatcacagcggcagacaccactgcagagcagcggcgcacggaacgcaaggcccccaaaaagaagctaccccagaaaaaggaggctgagaagccggctgttcctgagactgcaggcatcaagtttccagacttcaagtctgcaggtgtcacgctgcggagccaacggatgaagctgccaagctctgtgggacagaagaagatcaaggccctggaacagatgctgctggagcttggtgtggagctgagcccgacacctacggaggagctggtgcacatgttcaatgagctgcgaagcgacctggtgctgctctacgagctcaagcaggcctgtgccaactgcgagtatgagctgcagatgctgcggcaccgtcatgaggcactggcccgggctggtgtgctagggggccctgccacaccagcatcaggcccaggcccggcctctgctgagccggcagtgactgaacccggacttggtcctgaccccaaggacaccatcattgatgtggtgggcgcacccctcacgcccaattcgagaaagcgacgggagtcggcctccagctcatcttccgtgaagaaagccaagaagccgtgagaggccccacggggtgtgggcgacgctgttatgtaaatagagctgctgagttggaaaaaaaaaaaaaaaaaaaaaaaaaaaa

SEQ ID NO: 602 - DNA, 2135 bp, Homo sapiens
cttaatgaactggttacaggggctgctgggctggaggttgaggatcttcacgaaaaacatattaaaacaaacccagaagaactgagagagattgtgacatctatacttgaagaatacacaagtcaagaaaattggtattaggttacctgtcttgaaactgaggaaatgggagaggagctgatgatggagcacccaggcctccaagccatcacgtctggtgaacacacctgccaagttacatcttttctagccttctcaaagccaagtcccactatttgctccatgaacagtaacatctggcaaatatgcattcagttggaaggaattggccagttagcatatgcactaggaaaagacttctgtttgctcttgatgtcagccctttatccagtactggagaaggctggagaccaaaccctactcattagtcaggtggctaccagcaccatgatggacgtttgccgtgcttgtggctacgactccctgcagcacctgatcaatcaaaattcagactatttagtgaatgggatctctttaaatctgcgtcatctggctctgcatcctcataccccaaaggtcctggaagtcatgctgcggaactcagatgctaacctgcttcctttggtggcagatgtggttcaagatgtcttggccaccctggaccaattttacgataagagagctgcttcctttgtcagcgttctgcatgctctgatggcagcattagcccagtggttcccagacacaggtaatcttgggcacctccaagagcaaagtttaggagaagagggaagtcatttgaaccaaagaccagcagctcttgagaagagcaccaccacagctgaagacatcgaacagtttttgctgaactacctcaaagagaaggatgtggcagatggaaatgtctcggattttgataatgaagaagaggaacagtcagtccctcccaaagtggatgagaatgacacccgtccagatgtggagccaccactgccattgcagatccaaatagccatggacgtgatggaacgctgcatccacttgttgtcagataaaaatctgcaaatccgcctgaaggtcttggatgtgctggatctgtgtgtggttgttcttcagtcccacaaaaaccagctgcttcccttggctcatcaggcctggccctcgctcgttcaccgactcacacgggacgcccccctggcagtgcttagagccttcaaggttttacgtaccctgggaagcaagtgtggtgactttcttcgcagccggttctgcaaagatgtcctgccaaagctggctggctccctagtcacccaggcccccatcagtgccagggctggaccagtttactcgcacacgctggccttcaagttgcagctggctgtcttacagggcctgggccccctctgtgagagactggacctaggtgagggtgacctgaataaagtggctgatgcctgcttgatttacctcagtgtcaaacagcccgtgaaattacaagaggctgccaggagcgtcttcctccacttgatgaaggtggacccagactccacctggttcctcctgaacgagctttactgccccgtgcagttcacacctccccaccccagcctccaccctgtgcagctgcacggggccagcgggcagcagaacccctacacgaccaacgtgctccagctgctcaaggagctgcagtgaccctgctcccccaccacagaggccaccgatccctcccctactgccagccagaagctgggctgaccccaccccggccataggcggtggcagcggcagcagagaaggtgaattagttagccaatcgatttataaattgatcgatcacacaactgcttagaaatggattgaaggaaagtagctgactattatttatatttcataccttgtgttttcaagtgacattgtctggtggctctaagggtttaaccccttagcctaccatctctatagccccagctccctcacaggccacacacacacacacacaagaggtcagttcccctccatctgcatacacctccctgtcttcaaataatgagatggaactaatttgttttacctaacctgatctttgggaaacaaacggaaataaagacacttcttggatgaaaagtaaaaaa

SEQ ID NO: 603 - DNA, 1193 bp, Homo sapiens
cagccccgccttctctacacaggaaagctcagtggcccccaagccaggatgtcccaagcttgggtccccggcctcgcgcccaccttgctgttcagcctgctggctggcccccaaaagattgcagccaaatgtggtctcatccttgcctgccccaaaggattcaaatgctgtggtgacagctgctgccaggagaacgagctcttccctggccccgtgaggatcttcgtcatcatcttcctggtcatcctgtccgtcttttgcatctgtggcctggctaagtgcttctgtcgcaactgcagagagccggagccagacagcccagtggattgccgggggcccctggaactgccctccatcatccccccagagagggtcagagtatccctttctgcgcccccacccccctacagtgaggtgattctgaagcccagcctgggcccaactcccacagagccaccccctccctacagcttcaggcctgaagaatataccggggatcagaggggcattgacaacccggccttctgagtcacctcctgcctggaatcttgccatcagcaacctcctccccagtgcctcctggatcaagctagagactgctggcaccccaggaatgtccctgcccatcctgccgtgtctctgttcattcttggatttaacttattactttttctgcttctgtttccaccccagctgcctctcttgtcctgagggttaggctggagtgacagtttccgcccaccccccagcccaagaaagaggctgccggaaagaaaatgctgaccattggaggtgcccaacagtagaatgggctactgtgaggggtagtaagagccccatttctggaggtatgcaaatcttgactggacagccagctctgagattttatcagggcacttctatacctgtgggacattggactggatgagccctgagccagcttccactcctacctgaatagagaactcactgcacccacccacaacacatgataaacacatgtcctcactgaatgttactgattgcggctgagggcctgcctctggctgtgtggggaggtgggtggagaggtgagcccaggcactgctgaggggtgcggtgatggggtcgctgcgccgcaatcccaccactgatgagccacctgggaggtctgggaggccagtccatccatgggccgccctcggagagaggct

SEQ ID NO: 604 - DNA, 518 bp, Homo sapiens
acgcgtccgagatacattccatgaatacctagtttattgagagtttttagcatgaaggactgtcgaattttgtcaaaggctttttctgcatctattgagataatcatgtggtttttgtctttggttctgtttatgtgatggactatgtttattgatttgcatatgttgaaccagccttgcatctcagggatgaagccaactcgatcgttgtggataagctttttgatgtgctgctggatttggtttgccaatattttattgaggatttttgcatcagtgttcttcagggatattggtctaaaattctcttttttttgttgtgtctctgccaggctttggtatcaggatgatgctggcctcataaatgagttagggaggattccctctttctattgatcagaatagtttcagaaggaatggtaccagctcttctttgtacctctggtagaatttgggtgtgaatctatcttgtcctggaatatttttggggttggaactcaaaaaaaaaaaaaaaaaaa

SEQ ID NO: 605 - DNA, 853 bp, Homo sapiens
  misc_feature (1)..(1): n equals a,t,g, or c
  misc_feature (75)..(75): n equals a,t,g, or c
naaggcaaatttcttcctcagtcgtgtggcaggccctgagcaggcagctgggtgtccccgctcagatccaggccncgaatgggctgggcgggttgcagaagccatcacctgagctacccagggtgggatccctggccccgacctctgtcctgacacgccccaagcggcagcaacaaagccccaattggcctgggcctgggcaggaggagctgggccgggtgccagatactgggatcagccactgcagctccctgagcactctctacagagacgcggaccccagacatgaggaggctcctcctggtcaccagcctggtggttgtgctgctgtgggaggcaggtgcagtcccagcacccaaggtccctatcaagatgcaagtcaaacactggccctcagagcaggacccagagaaggcctggggcgcccgtgtggtggagcctccggagaaggacgaccagctggtggtgctgttccctgtccagaagccgaaactcttgaccaccgaggagaagccacgaggtcagggcaggggccccatccttccaggcaccaaggcctggatggagaccgaggacaccctgggccgtgtcctgagtcccgagcccgaccatgacagcctgtaccaccctccgcctgaggaggaccagggcgaggagaggccccggttgtgggtgatgccaaatcaccaggtgctcctgggaccggaggaagaccaagaccacatctaccacccccagtagggctccaggggccatcactgcccccgccctgtcccaaggcccaggctgttgggactgggaccctccctaccctgccccagctagacaaataaaccccagcaggccgggttat

SEQ ID NO: 606 - DNA, 1757 bp, Homo sapiens
aggctttccacccagaccgtcaacttcgggacagtgggggagacggtcacccttcacatctgcccagacagggatggggatgaggcggcacagcctgatgctgctgccatggtggcttggggcagcggggagaaaggagtgtcacagggagcagctcgtggctgcagtggaagtcactgagcaagagactaaagtccccaagaaaaccgtcatcatagaagagaccatcaccactgtggtgaagagcccacgtggccaacgacggtyccccagcaagtccccctcccgctcaccttcccgctgctctgccagcccgctgaggccaggcctactggcccccgacctgctgtacctgccaggtgctggccagccccgcaggccggargcagaaccaggccagaagcccrtggtgcccacactgtatgtgacggaggccgaggcccactctccagctctgcccggactctcggggccccagcccaagtgggtggaggtggaggagaccattgaagtccgggtgaagaagatgggcccgcagggtgtgtctcccaccacagaggtgcccaggagctcatcggggcatctcttcacactgcccggtgcgacccccggaggggaccccaattccaacaactccaacaacaagctgctggcccaggaggcctgggcccagggcacagccatggtcggcgtcagagagccccttgtcttccgcgtggatgccagaggcagtgtggactgggctgcttctggcatgggcagcctggaggaggagggcaccatggaggaggcgggagaggaagagggggaagacggagacgcctttgtgacggaggagtcccaggacacacacagccttggggatcgtgaccccaagatcctcacgcacaacggccgcatgctgacactggctgacctggaagattacgtgcctggggaaggggagaccttccactgtggtggccctgggcctggcgcccctgatgaccctccctgcgaggtctcggtgatccagagagagatcggggagcccacggtgggcagcctgtgctgctcagcgtggggcatgcactgggtccccgaggccctctcggcctctttaggcctgagccccgtggggcgtcaccaccgggaccccaggtccgtagccttgagggcacctccttcctcttgcgggaggccccggctcggcctgtgggcagtgctccctggacgcagtctttctgcacccgcatccggcgttctgcggacagtggccagagcagcttcaccacagagctttccacccagaccgtcaacttcgggacagtgggggagacggtcacccttcacatctgtcsctggccwcgggccttcttacctcactcaacttcagccaggaggactgggtggtgcttgcaatgttggaatgaccggctcaaagacctcagctctgggctgtttcctgtcagcctggcaggagcctcaggactgtggacgaaggatgtggccttgggcatttgtcctgttcccacatgggcctggtccctccctcctggccccagccacagctgccaggcctgacatggccttgcctctcctgcagtcttggtgactgagacccttgggtggcgcttcccagctctgcaggccctcctggccttttctgcagggtggacacagggtctgtgtgtgggcagcagcccctgtctctcagcaagaataaagcagcttcctgtgcaaaaaaaaaaaaaaaaaaaaaactcgagcggcacgag

SEQ ID NO: 607 - DNA, 1010 bp, Homo sapiens
gcgtccgtatgttccagtgtgggttattgcagcagctttgtactatcctaatggctactggggttcctgctgatatcctgactgagaccataaatactgtatcagaagttattcgaggctgccaagtaaaccaagactactttgcatctgtaaatgcaccttcaaacccaccaagaccggcaattgtagtacttctcatgtccatggttaatgaaaggcagccatttgttttgcgctgtgctgttctctattgtttccagtgtttcttgtataaaaaccaaaaaggacaaggagaaatcgtgtcaacacttttaccttctaccattgatgcaacaggtaattcagtttcagctggccagttattatgtggaggtttgttttctactgattcactttcaaactggtgtgctgctgtggcccttgcccatgcgttgcaagaaaatgccacccagaaagaacagttgctcagggttcaacttgctacaagtattggcaaccctccagtttctttacttcaacagtgcaccaatattctttcacagggaagcaaaatacaaacaagagttggattattaatgttgctttgtacctggctaagcaattgtcccattgcagtaacgcattttcttcacaattcagccaatgttccattccttacaggacaaattgcagaaaatcttggagaagaagagcagttggtccaaggcttatgtgcccttttgttgggcatttcgatttatttcaatgataactcacttgagagctacatgaaagagaagctaaaacaactgattgagaagaggattggcaaagagaatttcatagagaaactaggatttattagcaaacatgagttgtattccagagcatctcagaaaccccagccaaactttcccagtccagaatacatgatatttgatcatgagtttacgaagctggtaaaagaacttgaaggtgttataactaaggctatttataagtccagtgaagaagataaaaaaaaaaaaaaa

SEQ ID NO: 608 - DNA, 2561 bp, Homo sapiens
cccgagaggcccggttcctttaggccgcctgcccgcctccagctctcggggtcggctccaggaggcgccctcaggagaggggcgggcgctctattccagagaccgagtggcagggcggccactgtggcggggctctttccccgtttcgcctcagctacccctcagctccggtagtcgccagtccggggtcgtcgccgtttggggcgggagctgctcggccccgccgccgtccccgtcgccgcttccgggtccaggcccctcgggccgcctgccgccgtcatgaggctgcgggtgcggcttctgaagcggacctggccgctggaggtgcccgagacggagccgacgctggggcatttgcgctcgcacctgaggcagtccctgctgtgcacctgggggtacagttctaatacccgatttacaattacattgaactacaaggatcccctcactggagatgaagagaccttggcttcatatgggattgtttctggggacttgatatgtttgattcttcaagatgacattccagcgcctaatataccttcatccacagattcagagcattcttcactccagaataatgagcaaccctctttggccaccagctccaatcagactagcatgcaggatgaacaaccaagtgattcattccaaggacaggcagcccagtctggtgtttggaatgacgacagtatgttagggcctagtcaaaattttgaagctgagtcaattcaagataatgcgcatatggcagagggcacaggtttctatccctcagaacccatgctctgtagtgaatcggtggaagggcaagtgccacattcattagagaccttgtatcaatcagctgactgttctgatgccaatgatgccttgatagtgttgatacatcttctcatgttggagtcaggttacatacctcagggcaccgaagccaaagcactgtccatgccggagaagtggaagttgagcggggtgtataagctgcagtacatgcatcctctctgcgagggcagctccgctactctcacctgtgtgcctttgggaaacctgattgttgtaaatgctacactaaaaatcaacaatgagattagaagtgtgaaaagattgcagctgctaccagaatcttttatttgcaaagagaaactaggggaaaatgtagccaacatatacaaagatcttcagaaactctctcgcctctttaaagaccagctggtgtatcctcttctggcttttacccgacaagcactgaacctaccagatgtatttgggttggtcgtcctcccattggaactgaaactacggatcttccgacttctggatgttcgttccgtcttgtctttgtctgcggtttgtcgtgacctctttactgcttcaaatgacccactcctgtggaggtttttatatctgcgtgattttcgagacaatactgtcagagttcaagacacagattggaaagaactgtacaggaagaggcacatacaaagaaaagaatccccgaaagggcggtttgtgatgctcctgccatcgtcaactcacaccattccattctatcccaaccccttgcaccctaggccatttcctagctcccgccttcctccaggaattatcgggggtgaatatgaccaaagaccaacacttccctatgttggagacccaatcagttcactcattcctggtcctggggagacgcccagccagtttcctccactgagaccacgctttgatccagttggcccacttccaggacctaaccccatcttgccagggcgaggcggccccaatgacagatttccctttagacccagcaggggtcggccaactgatggccggctgtcattcatgtgattgatttgtaatttcatttctggagctccatttgtttttgtttctaaactacagatgtcaactccttggggtgctgatctcgagtgttattttctgattgtggtgttgagagttgcactcccagaaaccttttaagagatacatttatagccctaggggtggtatgacccaaaggttcctctgtgacaaggttggccttgggaatagttggctgccaatctccctgctcttggttctcctctagattgaagtttgttttctgatgctgttcttaccagattaaaaaaaagtgtaaattacattggtggtcttgacttttattacagaaagatatgtagtaaatattcagaacagatacacaatgttacttggacatttcagaattatcagagaacatagcataggcagataatttttgtaagggttttctgtttgtttgttttttttttttttagcagcgctctgtcttctaataaaggcctgatttatgaaatgaatgaaaacagagctagtttggttgaactggacttggggtgggtgctttggctacacacctactcaaatccacctcttctctcgacttctctctctctgcagctctttcttgggttctgtggtggaactttctgggctgtgaagcaatgctgttgaaaggccatttggtattagggactcctgtttgtggctcctgggatgaggtggttatgattttg

SEQ ID NO: 609 - DNA, 1015 bp, Homo sapiens
tcgacccacgcgtccgcgggcctccaaggccctgctcccagtgggcgcctatgaagtcttcgcccgggaggcggtgggtgcgggtgcagctcggggcctgctgcctggagatgaggacgctggtcgagctcgggccctgggctggggactttgggcctgacctgctgctcaccctgctcttcctgctcttcctggcgcacggggtcaccttggacggggcctcggccaaccccactgtgtccctgcaggagttcctcatggccgagcagtctctgcctggcacgctgttgaagctggcggcacaggggctgggcatgcaggccgcctgcaccctgatgcgcctctgctgggcctgggagctcagtgacctgcacctgctgcagagcctcatggcccagagctgcagctcggccctgcgcacatccgtgccccacggggcgcttttggaggccgcctgcaccttttgtttccatctgaccctcctgcacctgcggcacagtcctccggcctacagcgggcctgctgtggctctgttggtcaccgtcacggcctacacggccgggcccttcacgtctgccttcttcaaccctgccctggccgcctctgtgacctttgcctgctcggacacaccttactggagtacgtgcaggtgtactggctgggccctctgacagggatggtcctggctgtgctgctgcaccagggccgccttccccgccttttccagaggaacctgttctacggccagaagaacaagtaccgagcaccccgagggaagccggccccggcctcaggggacacccagacccctgcaaaggggtccagtgtccgggagcctgggcgcagtggtgttgaggggccacattccagctgagtggccttgctctgtgtgagccccgtgcgagggccctgcttgtagctggaccctggaaccttctgtagctaagagggaatcctggccccctccccagaagccatttgtcaataaaccatttctaagaaaaaaaaaaaaaaa

SEQ ID NO: 610 - DNA, 3308 bp, Homo sapiens
ccacgcgtccggcccagggctgtctgtctccaaagcccaaccataactcacatccccattccagctcctctgggtgagtctgttccccctcagcctcactttccttatcctgtcaaatgaaggatttggaatgacttaagttattcaagcaacaaacacttactgaattgtcttgccacttccagggtgacattatggagttctgtgattctgcaagaggccagaggggacaaggtcaagtgggtgttcacctggcccctcatcttcctcctgtgcgtcaccattcccaactgcagcaagccccgctgggagaagttcttcatggtcaccttcatcaccgccacgctgtggatcgctgtgttctcctacatcatggtgtggctggtgactattatcggatacacacttgggatcccggatgtcatcatgggcattactttcctggcagcaggacaagtgtccagactgcatggccagcctaattgtggcgagacaaggccttggggacatggcagtctccaacaccatagaagcaacgtgtttgacatcctggtaggacttggtgtaccgtggggcctgcagaccatggttgttaattatggatcaacagtgaagatcaacagccgggggctggtctattccgtggtcctgttgctgggctctgtcgctctcaccgtcctcggcatccacctaaacaagtggcgactggaccggaagctgggtgtctacgtgctggttctctacgccatcttcttgtgcttctccataatgatagagtttaacgtctttaccttcgtcaacttgccgatgtgccgggaagacgattagcgctgagtcgcggcccctgggagctgatctggacaccctgtgacactggcgtcctcctctcccctccttcccccaccacaggtctctcctgcataggcagccactgtccgttctttcacacactggaaggaagagccatcgtggtctttgtctggccacagccaagctgctgggcatcctcctcctccttggagttccacccctgcaaggctggatttgggggccattatctgagcagcttcaaagacccctgagctgccaaccacggagatgtgccaagcatctcatctctcctgcacactttagtcagaaggacttctgcatgcagtttgtctttctgttctgcaggcagcttcagaattgaggtcatttgtgagcacaagatctcatagggcaggtgcaaaataggaatgttgttctcaagtgtcacctccagcccagaggtggttccttaggcagcatgtgctcctgggagcctctgacttttgctggaagcacccacagtttggaaggggcaagacctcaacctgttggggtttagggcccatgatggcagacattctaccccttttcctggaaaaactggaagaatgaaaataatttttttctgtggaagagagaaaatgagtgaatattcttctcacttttattgatgcattcagagaataagcaatgaaatattaaaaaatgaaacatcatataggtcatcatacttgaaaattatcattccatatgaaaggatcatgatacacaccaaaaaagtaatgatcgtaaagacacaaatcctctgtatgccatcttgcattggcactgaggtgtttggtttggaatagggaaaaagagacaggatctcgctgtgttccccaggtaggtcttgaactcctggcctcaagtgatcctcctgccttgacctcccaaagtgctggattacaagcgtgagcccctgcacccggcccaagcagttgcttctttttttctctttttttttttttttgagatggagcctcactctgttgcccaggctggagtgcagtggcgcgatctccactcactgcaagctccgcctcccgggttcatgccattctcctgcctcagcctcccgagtagctgggactacaggcgcctgccaccacacccagctaattttttgtatttttggtacagacagggtttcaccgtgttagccaggatggtcttgatctctgatctcggatccgccaccccggcctccaaagtgctggattacaagcgtgagccaccgggccccgccaagcagttgcttcttatgcaacatgttgggtgggacttgtccacgggccaggccaataaaattcttaatcctgcagagaggcagtaccctcatcaccccatcactggaaaacaaatgtttaagctatcaagagagggaatgtgcagcttggttctagatgcatggtttggaggatctacctttggcctaaagggaatgtcccaaacaacagagccttctttgctgtcactccagaattctctacacagaatttcccaagtccattcaggacagacgcgcagtcctctttcaatggaagaagagaggacttttcccctcctgaaaaatgactggagtgtgaacaaggcagctctgtttttctaaataagttgttcttgtgagttttttctggccactgggcatctctgccctcacttttcatccctgccctctaagctgcagaccccatgaccacactgtctgcttccttgagcttcccgcacgaggcttgcacctgggggacctggagaccctgcggacagaactgtggctgagccactgtggccaactcttggggagctccacagtgggggttgctggtctgtgaggctgagtctccatttcagagcacacactccctggcagggcgcctccgcctgtgtctcctgcccagcagccgccagcagggaatagttgctggtgtctgagcacaaagagagctttgattacctagagaggaaaaaggctgtcagccagatgcagccaggcccaggggtagatacaggagttgctaaggaaggggccgagccaggagaggccaggcagatccacaaagcccaaggggatgcaggctgggtgtggtttctgagggaacctaccaaatagcaggtagatggaatcagaggactcttgtgtcctgaaagaacctccttaaaaacaactaaaaccaagaacttctggggctgttcacacattgttcaagtcaccccaagatcgttctggcacgctgagctgaacaccaccatctttgttcattctctctctaatgggcaaagcaggatcatcgagttgaaaagttgtaaataatgaggatatttatcccgctatttattttttcaataactgtgacctcctgcactgtgaatgctctgtgacatgagattcttagtttaataaaactgtcattaaatttgaaaaaaaaaaaaaaaaaaaaaaaaaaaaaaaaaaaaaa

SEQ ID NO: 611 - DNA, 866 bp, Homo sapiens
ccacgcgtccgctccaaacaaacaaaaaatgaactttatttagatatattttacatatgatgaagtatttttttgatgtagtagtttttctcaccttctttttagtcttctctttatccatttttctttctgatgaagaattccctgtgagtaggacccagaacataggcctttgtcatttcaacccttcgttctctgaataggctgtttattggcaacattaactggaaacattttatgtacagcattggagtctcactctgtcgcctcagctcactgcaacctccgcctcctgggttcaagtgatgtgcactgtatgaactgtgagagcaagcatatcattataacattggacaatgagccaagacagttctgatggacttttgaagagggatttttcaaaagcatttaactcatcatattaataaaataaatcctatgatttatgggaaattctgttggatcaactttggaaactgtttactataaaggtagcatgcgtaggcatgaatcttgataagacaagattctgatccggggttctgagtgggtccttatattctgcagagctgaaccaggtggaataggaggagagtttgggtaacagtcaaacacaacatccaaaattatgttgaatgtagtggtgagagctattccctttaaaactctctcttggttcttctgactgtgtcaagaatactgtatttgtttggtactggtctggtttttttttttttttttttgaaatgcactccagcctgggcgacaagagtgaaactctgtctgaaaagaaagaaagaaagaaaaagaaagaaaggaaagaaggaaggaagaaaaaaaagaaaagaaagaaaaaaaaaaaaaaa

SEQ ID NO: 612 - DNA, 2950 bp, Homo sapiens
cccggctcccgcccgctcccagccgggccccccagcggtcggcgggacggctcccggctgcagtctgcccgcccgccccgcgcgggggccgagtcgcgaagcgcgcctgcgacccggcgtccgggcgcgctggagaggacgcgaggagccatgaggcgccagctgcgaaggtggcggcgctgctgctcgggctgctcttggagtgcacagaagccaaaaagcattgctggtatttcgaaggactctatccaacctattatatatgccgctcctacgaggactgctgtggctccaggtgctgtgtgcgggccctctccatacagaggctgtggtacttctggttccttctgatgatgggcgtgcttttctgctgcggagccggcttcttcatccggaggcgcatgtaccccccgccgctgatcgaggagccagccttcaatgtgtcctacaccaggcagcccccaaatcccggcccaggagcccagcagccggggccgccctattacacygacccaggaggaccggggatgaaccctgtcgggaattccatggcaatggctttccaggtcccacccaactcaccccaggggagtgtggcctgcccgccccctccagcctactgcaacacgcctccgcccccgtacgaacaggtagtgaaggccaagtagtggggtgcccacgtgcaagaggagagacaggagagggcctttccctggcctttctgtcttcgttgatgttcacttccaggaacggtctcgtgggctgctaagggcagttcctctgatatcctcacagcaagcacagctctctttcaggctttccatggagtacaatatatgaactcacactttgtctcctctgttgcttctgtttctgacgcatctgtgctctcacatggtagtgtggtgacagtccccgagggctgacgtccttacggtggcgtgaccagatctacaggagagagactgagaggaagaaggcagtgctggaggtgcaggtggcatgtagaggggccaggccgagcatcccaggcaagcatccttctgcccgggtattaataggaagccccatgccgggcggctcagccgatgaagcagcagccgactgagctgagcccagcaggtcatctgctccagcctgtcctctcgtcagccttcctcttccagaagctgttggagagacattcaggagagagcaagccccttgtcatgtttctgtctctgttcatatcctaaagatagacttctcctgcaccgccaggaaagggtagcacgtgcagctctcaccgcagatggggcctagaatcaggcttgcttggaggcctgacagtgatctgacatccactaagcaaatttatttaaattcatgggaaatcacttcctgccccaaactgagacattgcattttgtgagctcttggtctgatttggagaaaggactgttacccatttttttggtgtgtttatggaagtgcatgtagagcgtcctgccctttgaaatcagactgggtgtgtgtcttccctggacatcactgcctctccagggcattctcaggcccgggggtctccttccctcaggcagctccagtggtgggttctgaagggtgctttcaaaacggggcacatctggctgggaagtcacatggactcttccagggagagagaccagctgaggcgtctctctctgaggttgtgttgggtctaagcgggtgtgtgctgggctccaaggaggaggagcttgctgggaaaagacaggagaagtactgactcaactgcactgaccatgttgtcataattagaataaagaagaagtggtcggaaatgcacattcctggataggaatcacagctcaccccaggatctcacaggtagtctcctgagtagttgacggctagcggggagctagttccgccgcatagttatagtgttgatgtgtgaacgctgacctgtcctgtgtgctaagagctatgcagcttagctgaggcgcctagattactagatgtgctgtatcacggggaatgaggtgggggtgcttattttttaatgaactaatcagagcctcttgagaaattgttactcattgaactggagcatcaagacatctcatggaagtggatacggagtgatttggtgtccatgcttttcactctgaggacatttaatcggagaacctcctggggaattttgtgggagacacttgggaacaaaacagacaccctgggaatgcagttgcaagcacagatgctgccaccagtgtctctgaccaccctggtgtgactgctgactgccagcgtggtacctcccatgctgcaggcctccatctaaatgagacaacaaagcacaatgttcactgtttacaaccaagacaactgcgtgggtccaaacactcctcttcctccaggtcatttgttttgcatttttaatgtctttattttttgtaatgaaaaagcacactaagctgcccctggaatcgggtgcagctgaataggcacccaaaagtccgtgactaaatttcgtttgtctttttgatagcaaattatgttaagagacagtgatggctagggctcaacaattttgtattcccatgtttgtgtgagacagagtttgttttcccttgaacttggttagaattgtgctactgtgaacgctgatcctgcatatggaagtcccrcttcggtgacatttcctggccattcttgtttccattgtgtggatggtgggttgtgcccacttcctggagtgagacagctcctggtgtgtagaattcccggagcgtccgtggttcagagtaaacttgaagcagatctgtgcatgcttttcctctgcaacaattggctcgtttctcttttttgttctcttttgataggatcctgtttcctatgtgtgcaaaataaaaataaatttgggcaaaaaaaaaaaaaaaaaaaaaaaaaaaaaaaaaaaaaaaaaaag

SEQ ID NO: 613 - DNA, 1769 bp, Homo sapiens
agaaaaattgcagggacccaccccagacttgtgagtgcgagtgaagcaggagcagccctggccatcactgtttctttgacgtgtacatcccatcctgagatgcagctgggctgggagccgccacctgggtggatctgattcctggatttccccatcctggggasaggtgacccatcctgttctcctccttaggtccatgtgaaatctgargtccttgctgtcaagttgtcacaagaaataaactacgcaaagagcctctactatgaacagcagcttatgttaagactcagcgaaaaccgagagcagctggagctggactcctgaagccccgctgctgagatgggcgctcccgacacagcgcagacccaccaggaggaaagaggcccagctctcagctgacgatggaggcagaaccggagtcgggtttggggaagttgtcaaggaatgagggaaagtaaatcctcatgaggaaaagtacaaatggaaatcgtattaatttgtgaggcagggagttattttagattatgggaaataatttttaaaggtattggttaaataacgtttaaaaacatgtactgagatgaatctaatttttagattgccctgtattttgttaacatgtatatatgtacaacagtgtgtttgtaaatatataggaacgtttctgaacagggtctgtgctatgtgtaaaggtttgttaactgtaaagtaatataaagttatattggatcttctattgcactaattctagatgtctaattcaggatactgtctatagaaaggcattcttaaaagttaaagaatgttacgtcttagttttggagactaaagtattcccagtaaagtgggttgaggtgagggctgtggtcctgaaagggacgcctttgacatcgtggctgtccagttgggctgtgagctgtggcacccaggactggcgctggcccttcagaaggatctaggagaggggcttgggagcccacttttaatttctcacccccattttacaaagagtgcttagattcttacaaattatgatgtaagttatccatttggctttttcctaactagtcttaccaaacttagggggaaacctgtgctccattaccacatgggtgcaagtcagcattgtaagttttctcaggttattattattagagaggttggaaacattggtaaactctgttgattgagaaggaaaaaaaaagtcccattgaactgttgcaacaaatcagaaatccacataaaagtgctctcctgcctgggcagcaacaaccaagaacaaagccccgggactgttttctttttaataaagccacaggcaggcatcgtagctccacagcccgaggggacacaggatggaaaccccaggatgagaagggagcagggagagttccagaaagggggatgaaataggagtattaaaaagctgcgttggtaagtttttcatggaaccaagatttgacaaaggcatctcttatccttggttttaaattcctgctgggagcaaggcctggtatgagcgccctgggtcttgtttttggtgtttcgcttttctgtaaggattaagcagatagggagaagggaaaaggggcctcactttagaatgaatgagtcaccttgtgatttttaaatttttattttaataaagctaatcaatttctaaaaaaaaaaaaaaaaaaaaaaaaaagggcggccgctctagaggatccctcgaggggcccaagcttaccgtgcatgcgacggtatagctctctcctatagtgagccta

SEQ ID NO: 614 - DNA, 1903 bp, Homo sapiens
saacaaagccttctacttgagcagtttttccatcactgatatgtgcaggaaatgaagacattgcctgccatgcttggaactgggaaattattttgggtcttcttcttaatcccatatctggacatctggaacatccatgggaaagaatcatgtgatgtacagctttatataaagagacaatctgaacactccatcttagcaggagatccctttgaactagaatgccctgtgaaatactgtgctaacaggcctcatgtgacttggtgcaagctcaatggaacaacatgtgtaaaacttgaagatagacaaacaagttggaaggaagagaagaacatttcatttttcattctacattttgaaccagtgcttcctaatgacaatgggtcataccgctgttctgcaaattttcagtctaatctcattgaaagccactcaacaactctttatgtgacaggtgagttctcaacacctagaccatctgatatttttcttataatgtttccaggaagaggggggttcagtttctcaagtgattatgttagaaagccaactcctatagcacatctgaaatctgctacacctcacagattgttatgtgccagtgtgtacatatgtgtgtgtatgtgtgcgtttgaggtgagtgagatagaggagagtagagaaatagatagtaaaagttattgtttttgactttagggattataaaatttatttgataagtccaaaagtagaccactgaaatattgaaaaaattataaagtgaatacctatagttgcgaatagctctgtgattgcttgtccttctttgttgttttttttttctctttttcccatttttctcttctttacttttgttcattacaatttcttgaagttatgtttgtggtgcttaggcaattaaacacttcttaatagttcacagtttgtttagaggaaaaacagcaaacaactaactgacttcctagtgattttctgggaatattcagagcttcatctctcttccctgttccccgaaagaggcctttaatatgctttgacaactgaggaaggacagatagaagttaagcttggggaaaccaagctgaataaaacatgaaaaaatacatagggggggagtaggtaagagtaaaaaatacttggtttataaaaattttatagccaacatcatattcaatggtgaaaggcttagagctttccccctaagaacaggaacaagacatggatccttgcttttgccatttccatttaacattaaactgaaaattctagccagagcaaacaggcaagaacaagaaataaaagatatctaacttagaaaaaaagaagtaaaactttattcacagatggcatgaacttatgtgtagaaaaattcttaaaaatttgtttaaaactattaaagctaatacatgaatttagcaattccacatgatacaggatcaacacacaaaaatcagtgatatttctatacactagcaataaacaatccacaaagaaaattaaggaaacagttccatttacaatagcatcaaaatgaataaaatatttaagtacaaatttaaccaaagaggtataagagttgtacactgaacaaagaaagcatggctgaaagaaattcaagaatatgtaaataaatgcaaagacattctgtattcatggactgaaagatgtaatattgtaaagatagcaatattccccaaggtgatctacagattcaatgcagttccactaaaatcctaacagctttttgttgctattgcagaaataaaaaagctgatcctaaaattcacattgagttgcaacagacccagaattgccaaaacaatcttgaaaaagaacaaaactgaagctaagacttccctatttcaaaacttactacaaaatgacagttaaaaaaaaaaaaaaa

SEQ ID NO: 615 - DNA, 1051 bp, Homo sapiens
gcgcggccctccccatgtgcagccggccagccgggctctcctcctcgcggcggatgggtgaccttttcctggcacgggcaggctgtgggaggcagcggagcaggcgatgaagaagaagcagcagcatcccggcggcggcgcggatccctggccccatggggcccctatggggggcgcccctccgggcctgggcagctggaagcgtcgggtgcccctgctgcctttcctgcgcttctccctcctctatcagctcagcgggggaccccctcgcttcctgctcgacctgcggcagtacttgggaaattccacttacttggatgaccatggaccacctcctagtaaggtactacctttcccaagccaggtggtgtacaacagggtaggcaagtktgggagccgtactgtggtcttgcttctgagaatcttgtcggagaagcacggatttaatttggtcacatcagacattcacaacaaaaccaggcttactaaaaatgaacaaatggaactgattaaaaatataagtactgccgaacaaccctatttattcactcgacatgttcatttcctcaacttctcaaggtttggaggagaccagcctgtctacatcaacatcattagagaccccgtcaaccggttcttatccaactattttttccgtcgctttggagactggagaggggaacaaaatcacatgatccgcacccccagcatgaggcaggaggagcgctacctggatatcaatgagtgtattcttgaaaactatcccgagtgctccaaccccaggttattttacatcattccgyacttkkgtggacagcatcccagatgcagggagcctggtgaatgggcccttgagagagcaaagctgaacgtgaatgaaaacttcctgctcgtggggattcttgaagagttggaagatgtgctgctgttactggaaagatttttacctcattacttcaagggsgtgctcagtactacaaagacccagagcacaggaagcttggaaacatgactgtgacggtgaagaagactgtcccctctcctgaggctg

SEQ ID NO: 616 - DNA, 1317 bp, Homo sapiens
ccacgcgtccggacgccgccacctccggaacaagccatggtggcggctacggtggcagcggcgtggctgctcctgtgggctgcggcctgcgcgcagcaggagcaggacttctacgacttcaaggcggtcaacatccggggcaaactggtgtcgctggagaagtaccgcggatcggtgtccctggtggtgaatgtggccagcgagtgcggcttcacagaccagcactaccgagccctgcagcagctgcagcgagacctgggcccccaccacttcaacgtgctcgccttcccctgcaaccagtttggccaacaggagcctgacagcaacaaggagattgagagctttgcccgccgcacctacagtgtctcattccccatgtttagcaagattgcagtcaccggtactggtgcccatcctgccttcaagtacctggcccagacttctgggaaggagcccacctggaacttctggaagtacctagtagccccagatggaaaggtggtaggggcttgggacccaactgtgtcagtggaggaggtcagaccccagatcacagcgctcgtgaggaagctcatcctactgaagcgagaagacttataaccaccgcgtctcctcctccaccacctcatcccgcccacctgtgtggggctgaccaatgcaaactcaaatggtgcttcaaagggagagacccactgactctccttcctttactcttatgccattggtcccatcattcttgtgggggaaaaattctagtattttgattatttgaatcttacagcaacaaataggaactcctggccaatgagagctcttgaccagtgaatcaccagccgatacgaacgtcttgccaacaaaaatgtgtggcaaatagaagtatatcaagcaataatctcccacccaaggcttctgtaaactgggaccaatgattacctcatagggctgttgtgaggattaggatgaaatacctgtgaaagtgcctaggcagtgccagccaaataggaggcattcaatgaacattttttgcacataaaccaaaaaataacttgttatcaataaaaacttgcatccaacatgaatttccagccgatgataatccaggccaaaggtttagttgttgttatttcctctgtattattttcttcattacaaaagaaatgcaagttcattgtaacaatccaaacaatacctcacgatataaaataaaaatgaaagtatcctcctcaaaaaaaaaaaaaaaaaaaaaaaaaaaaaaaaaaaaaaaaaaaaaaaaaaaaaaaaaaaaaaaaaaaaaaaaaaaaaaaaaaaaaaaaaaaa

SEQ ID NO: 617 - DNA, 1138 bp, Homo sapiens
ccacgcgtccgggcgcctgtagtcccagctattcaggaggccgaggcaggagaattgcctgaactcaggaggcggagttgcagtgagccgagatcgcgccattgcactccagcctgggtgacagagtgagactctttctcccaaaaaaaaaaaaaaaaaaaaagtcaaatgcagctgggaatgtggttcgtgcctttttgtatattaaccatttgaaacttggttgtaaggtggggttggcaatgtcaggcctggctgcagcagctcatgtctttagagtgtgcctcttccctctctcgtggggctcgagcaagactaccttcatacatgggctctccagttacatagcaactccagtgttaaattccatcttttcttcctggaaaagccgtagaaaggacacctggacatgcctgctgcacaggttgtctgccttccccatcagccgcagaaggaggaactttgctctcttctctcacagctgtgtgtgcataagaagtagttcggatgatgtgggtcccaccatgtattccttctctgttccatgtagagtaaaataaatgggagttctgtttaatgcatcacctcggttcatattgcatttgccaagaaagtgcaattttattgaacattaggattgaattcttaactgagtaatcaatttcagtagtaagttaaaatgccttctattaatggacaactgcaaccgttaatcagagttacagtagattaacagttgtcagcatttatgctaatagcactaataaaccgtgggctcatgatttgcactttataattccatatttctcaaaacagttggtaatactttttgcttgaaggtattgattcttttgtccctttgcttgctacttggagatgtagagaaagctaaatgacattttcacggtgatgacacaatatcaccttctgcttttgcacacttggctttgtgtcaaaatagatggaaagggttcatttgttctggtgctctactgtttaatttgatctggtgtgtgactaaagcaagacaaatagtatttttaatgaaaccatttaataacctctggtagcttagagtcgaaggcattggaaaaatgcaattaaaggatgcctagatgtaaacaaaaaaaaaaaaaaa

SEQ ID NO: 618 - DNA, 1841 bp, Homo sapiens
  misc_feature (1)..(1): n equals a,t,g, or c
ncccggcccgctgccgcagggactgggagcgggctccgcagcgcactctagcccgcggctcggctcagtcggtctgcgaggatccggcccgccgccccccgggggacccgatggcctcggagggcctggcgggggcgctggcttccgtgctggctggccaggggtccagcgtgcacagctgcgactcggcgccggccggggagccgccggcgcccgtgcggctgcggaagaacgtgtgctacgtggtgctggccgtgttcctcagcgagcaggatgaggtgctactgatccaggaggccaagagggagtgccgggggtcgtggtacctgcctgcggggagaatggagccaggggagaccatcgtggaggcgctgcagcgggaggtgaaggaggaggcggggctgcactgtgagcccgagacactgctgtccgtggaggagcggggcccctcctgggtccgcttcgtgttcctcgctcgccccacaggtggaattctcaagacttccaaggaggccgatgcggagtccctgcaggctgcctggtacccacggacctccctgcccactccgctgcgagcccatgacatcctgcacctggttgaactagccgcccagtatcgccagcaagccaggcaccctctcattctgccccaagagctaccctgtgatctggtctgccagcggctcgtggctacctttaccagcgcccagacagtgtgggtgttagtgggcacagtggggatgcctcacttgcctgtcactgcctgtggcctcgaccctgtggagcagaggggtggcatgaagatggccgtcctgcggctgctgcaggagtgtctgaccctgcaccacttggtggtggagatcaaggggttgcttggactgcagcacctgggccgagatcacagtgatggcatctgtttgaatgtgctggtgaccgtggcttttcggagcccagggatccaggatgaacccccaaaagttcggggtgagaacttctcttggtggaaggtgatggaggaagacctgcaaagccagctcctccagcggcttcagggatcctctgttgtcccagtgaacagatagagaggtggaggaggtgacagggagctaggcagccgtgctccctccagtgcggacttgtctccctctgagggaggcaagaggctggcgatcagggatcttgttgcattgggagcaggggcggctctcctggtccccaggagagatgctttgaggagcattcctctagattgcacaagggacagtgcctttaaccaagcgaggagtccaaagctcaggacctgactaccctgagggcacgctgacgcctctccccagggggatggggagctttctgcacccccagtggcatctcctcatcacgttctgtgccgtccttgggaaaggcctgcattctgatccttccaggcccttcgagcatggaggggcactggggaaggtcccccgagggaggagcacgttgctgagtaaagaggtgttactcaccttgcctccctgcctacacgtctctgtggggagaaagtgatggggactactgtccaggagctgctgctcccctcgtgttacccacaggcacccatgcctttcccagtgcactgacagtgcgggccagtctgctgtccagcacggcccctggggctccctccagttggcctgctggcccgggatgtgactctgaggggacccatccctaatgaaacacagctctgagccctccaagggttgggcagtgggcggccccagaggaacttcaagtgggacaggagctgcaggtgctgcctctgctctctccttgagcctccctggcgcagaccactcccc

SEQ ID NO: 619 - DNA, 1133 bp, Homo sapiens
  misc_feature (1061)..(1061): n equals a,t,g, or c
  misc_feature (1078)..(1078): n equals a,t,g, or c
  misc_feature (1102)..(1102): n equals a,t,g, or c
  misc_feature (1107)..(1107): n equals a,t,g, or c
  misc_feature (1111)..(1111): n equals a,t,g, or c
ggggcggcgcgctccctgcctgctgctgggcggagggaaggcggcaagagctgcggagcccctggaagagcttccaggaaccctgcgctgtgggataaaggaatgaggttcagaaaggggcagggagttgcccgcagccgcaccgcacgtcttcagcccgaccgttgtcctgacctctctgtcccgtcccctgcccagtctcaccatggccttctggacacagctgatgctgctgctctggaagaatttcatgtatcgccggagacagccggtccagctcctggtcgaattgctgtggcctctcttcctcttcttcatcctggtggctgttcgccactcccacccgcccctggagcaccatgaatgccacttcccaaacaagccactgccatcggcgggcaccgtgccctggctccagggtctcatctgtaatgtgaacaacacctgctttccgcagctgacaccgggcgaggagcccgggcgcctgagcaacttcaacgactccctggtctcccggctgctagccgatgcccgcactgtgctgggaggggccagtgcccacaggacgctggctggcctagggaagctgatcgccacgctgagggctgcacgcagcacggcccagcctcaaccaaccaagcagtctccactggaaccacccatgctggatgtcgcggagctgctgacgtcactgctgcgcacggaatccctggggttggcactgggccaagcccaggagcccttgcacagcttgttggaggccgctgaggacctggcccaggagctcctggcgctgcgcagcctggtggagcttcgggcactgctgcagagaccccgagggaccagcggccccctggagttgctgtcagaggccctctgcagtgtcaggggacctagcagcacagtgggcccctccctcaactggtacgaggctagtgacctgatggagctggtggggcargarccagaatccgcctgcagacagcagctgagcccgctgctcggagctkattggagcctggacagcacccggtgtccgctggtctggaacgctgaagctntatcctcggaagtactnttgacagatcactttaccgaagtnatggncagngaacgacttcagagttacctgt

SEQ ID NO: 620 - DNA, 753 bp, Homo sapiens
cccacgcgtccgactgcttatatttggcattgtcttttccctggcactgccactgtcaccaccatcccccttctggatccctactttaccccttcatgctgctctggtggcagtgcctctgctgccatgctgtacttgagcctgctgctacagccatgcctgaagatgcagccccttcctctcttcctgtcccaccaaatatgaccagctctaggttccattacttctggactttgctccaaataaaacttacacaattttattccaaacccaggtctctttctgcaacacccgagaaaaatattgggctgcaggagccagagaggagagagagatttactggtgagagttgtaggtgggaattgaaaagccaagtcatgtctttgccccaccagaaactcactaggatgtacacaatgccactgtgatggttttaaaatatgtaactaacctgcacgttgtgcacatgtaccctaaaacttcaagtatatataaaaaaagaaagaactgctgatacacatatcatgaaaaaagaccaaataaaataaaaaaataaaaataaataaataaaataaaatatgtccacaaatgctttgatgttcctttgtttcttgatctgtatgctagcaacacaggttcattccgtttgtgaaaattcattgagctgtgctcttatgagctgtgtacttctctacatgtatgttaaatgtggacaagaacttcacataaaaatcattttaaaaaaaaaaaaaa

SEQ ID NO: 621 - DNA, 1604 bp, Homo sapiens
ccacgcgtccggcagacacaggcacttattcattcatctcattgaaaagctacgagttggttccttattgcctctccataatagaaaaactctttaatgagctctctttttgtttttcaaatcagatatgcaaagaagctcataacaattttttttaaaaatgcaaaacaagaatctccaattatgggagcaaaatcttcagcttctgggttcctgtctcactgaggaaatggatttgaaatggcaaggaggaaatgaggaggcaaactttcatgtctattttagttttccaatgcagtcctatttcctttggactttgtataaacaaggaaaggacagttgttagttcagttattacagataacctgtgtctttaaagtaaatgtatcttaaataagtaggactcccataaatgactacactttttcaaaatatgactccccagcttataacaagaataatagcaaacatcactttattaagcaattactatgtaaaagacacttagtgcttagcacacactggaaatattgttgactggctatattttccccagaaatcccatttctgaaagcctattacaaagaaataaaatcatcagtataacaaaggagtgtgtgtgtgtgtgggtgtgagtgtgtgtgggtgtgagtgtgtggggggtgtgagtgtgtgtgggtgtgagagtgtgtgtgtgagtgtgagtgtgtgtgtgtgtaagtgcacacacatgttgtagtattgttcatagtggcaaaaactagaaacaaagtgaatattgataacatgggcacagatgacaaattatatctccaaattatgaaacagaatccagccattaaaatcagagctttgccacgtgactaggatgaagttacaaaaagtattgttgagtgagaaaagcaggatacataggatacatggaattgagtataatatgatttctttttttttttttttgagatggagtctcgctctgtcactcaggctggagtgcagtggcacaatctcagctcactgcaacctccgcctcccggattcaagcaattctcctccctcagcctcctgagtagctgggactaccgtcacctgccaccacgccccagctaatttttgtatttttagtagagatgggctttcaccatattggtcacgctgatctcaaaatcctgacctcaggtgatccacctgcctcagcctcccaaagtgctgggattacagtcgtgagccactgcacctggccgatttcttttttaaaatgatcaaaaaaccatttatatgtgggaatatagctatatacttttattattgaattaccatggaaaaaaacatggaagagggaggccaaggcaggagaatcacttgaggcccaggagtttgagaccagcctgggcaacaaagcgagaccctcatctctactaaaaatacaaaaattacctgggcctggtgacacatgcctgtaatcccagctactcagaagactaaggcaagtgaatcgcttgaacccgagacgtggaggttgcagtgaagtgagccaagatcgcgccgttgcactccagcctggtgacagagtgagagtctttctcaaaaaaaaaaaaaaaaaa

SEQ ID NO: 622 - DNA, 1021 bp, Homo sapiens
ccacgcgtccggataggcacaggacaggagtaggcacctcgcctactgctgcttaacctttcagcttctccaggcccccaatcctgcttgctcccagcttgggaacgagacactgctgagctggaagacttcgcgggccacaggcacagccttcctgctgctggcggcgctgctggggctgcctggcaacggcttcgtggtgtggagcttggcgggctggcggcctgcacgggggcgaccgctggcggccacgcttgtgctgcacctggcgctggccgacggcgcggtgctgctgctcacgccgctctttgtggccttcctgacccggcaggcctggccgctgggccaggcgggctgcaaggcggtgtactacgtgtgcgcgctcagcatgtacgccagcgtgctgctcaccggcctgctcagcctgcagcgctgcctcgcagtcacccgcccttcctggcgcctcggctgcgcagcccggcctggcccgccgctgctgctggcggtctggctggccgccctgttgctcgccgtcccggccgccgtctaccgccacctgtggagggaccgcgtatgccagctgtgccacccgtcgccggtccacgccgccgcccacctgagcctggagactctgaccgctttcgtgcttcctttcgggctgatgctcggctgctacagcgtgacgctggcacggctgcggggcgcccgctggggctccgggcggcacggggcgcgggtgggccggctggtgagcgccatcgtgcttccttcggcttgctctgggccccctaccacgcagtcaaccttctgcaggcggtcgcagcgctggctccaccggaaggggccttggcgaagctgggcggagccggccaggcggcgcgagcgggaactacggccttggccttcttcagttctagcgtcaacccggtgctctacgtcttcaccgctggagatctgctgccccgggcaggtccccgtttcctcacgcggctcttcgaaggctctggggaggcccgagggg

SEQ ID NO: 623 - DNA, 985 bp, Homo sapiens
  misc_feature (1)..(1): n equals a,t,g, or c
nagccggtccaggcctctggcgaacatggcgcttgtcccctgccaggtgctgcggatggcaatcctgctgtcttactgctctatcctgtgtaactacaaggccatcgaaatgccctcacaccagacctacggagggagctggaaattcctgacgttcattgatctggttatccaggctgtcttttttggcatctgtgtgctgactgatctttccagtcttctgactcgaggaagtgggaaccaggagcaagagaggcagctcaagaagctcatctctctccgggactggatgttagctgtgttggcctttcctgttggggtttttgttgtagcagtgttctggatcatttatgcctatgacagagagatgatatacccgaagctgctggataattttatcccagggtggctgaatcacggaatgcacacgacggttctgccctttatattaatcgagatgaggacatcgcaccatcagtatcccagcaggagcagcggacttaccgccatatgtaccttctctgttggctatatattatgggtgtgctgggtgcatcatgtaactggcatgtgggtgtaccctttcctggaacacattggcccaggagccagaatcatcttctttgggtctacaaccatcttaatgaacttcctgtacctgctgggagaagttctgaacaactatatctgggatacacagaaaagctgtgcatttggatcagctgctatttggcaatacgaatcactgaaatccaggggtccagagttattttgatggcataaaagctgattggttggatagcataagaccacaaaaagaaggagacttcagaaaggagattaacaagcggtggaataacctaagtgatggccagcggactcaggtatcatagctgcaaacgtccttgtattctgtttgtggagagtaccttctctgcagtggacagtgatctgatatttcaaatcttatccagcctccaaaagt

SEQ ID NO: 624 - DNA, 1445 bp, Homo sapiens
ggaaggctgcaggaccaggaccgaaaaaggactaggaggctgggatcagcaacaactggggaaggccaaggaagactgacctgaggggaaaggagaaactggggaggtgaggtctactactcaacaggatattcttcaaggaaaatgaaccccacactaggcctggccatttttctggctgttctcctcacggtgaaaggtcttctaaagccgagcttctcaccaaggaattataaagctttgagcgaggtccaaggatggaagcaaaggatggcagccaaggagcttgcaaggcagaacatggacttaggctttaagctgctcaagaagctggccttttacaaccctggcaggaacatcttcctatcccccttgagcatctctacagctttctccatgctgtgcctgggtgcccaggacagcaccctggacgagatcaagcaggggttcaacttcagaaagatgccagaaaaagatcttcatgagggcttccattacatcatccacgagctgacccagaagacccaggacctcaaactgagcattgggaacacgctgttcattgaccagaggctgcagccacagcgtaagtttttggaagatgccaagaacttttacagtgccgaaaccatccttaccaactttcagaatttggaaatggctcagaagcagatcaatgactttatcagtcaaaaaacccatgggaaaattaacaacctgatcgagaatatagaccccggcactgtgatgcttcttgcaaattatattttctttcgagccaggtggaaacatgagtttgatccaaatgtaactaaagaggaagatttctttctggagaaaaacagttcagtcaaggtgcccatgatgttccgtagtggcatataccaagttggctatgacgataagctctcttgcaccatcctggaaataccctaccagaaaaatatcacagccatcttcatccttcctgatgagggcaagctgaagcacttggagaagggattgcaggtggacactttctccagatggaaaacattactgtcacgcagggtcgtagacgtgtctgtacccagactccacatgacgggcaccttcgacctgaagaagactctctcctacataggtgtctccaaaatctttgaggaacatggtgatctcaccaagatcgcccctcatcgcagcctgaaagtgggcgaggctgtgcacaaggctgagctgaagatggatgagaggggtacggaaggggccgctggcaccggagcacagactctgcccatggagacaccactcgtcgtcaagatagacaaaccctatctgctgctgatttacagcgagaaaataccttccgtgctcttcctgggaaagattgttaaccctattggaaaataaaggagaattcctgcttgccacagaccccgaaaaaaaaaaaaaaaaagggcggccgc

SEQ ID NO: 625 - DNA, 1699 bp, Homo sapiens
acgcgtccgcgccaagggagcaggacggagccatggaccccgccaggaaagcaggtgcccaggccatgatctggactgcaggctggctgctgctgctgctgcttcgcggaggagcgcaggccctggagtgctacagctgcgtgcagaaagcagatgacggatgctccccgaacaagatgaagacagtgaagtgcgcgccgggcgtggacgtctgcaccgaggccgtgggggcggtggagaccatccacggacaattctcgctggcagtgcggggttgcggttcgggactccccggcaagaatgaccgcggcctggatcttcacgggcttctggcgttcatccagctgcagcaatgcgctcaggatcgctgcaacgccaagctcaacctcacctcgcgggcgctcgacccggcaggtaatgagagtgcatacccgcccaacggcgtggagtgctacagctgtgtgggcctgagccgggaggcgtgccagggtacatcgccgccggtcgtgagctgctacaacgccagcgatcatgtctacaagggctgcttcgacggcaacgtcaccttgacggcagctaatgtgactgtgtccttgcctgtccggggctgtgtccaggatgaattctgcactcgggatggagtaacaggcccagggttcacgctcagtggctcctgttgccaggggtcccgctgtaactctgacctccgcaacaagacctacttctcccctcgaatcccaccccttgtccggctgccccctccagagcccacgactgtggcctcaaccacatctgtcaccacttctacctcggccccagtgagacccacatccaccaccaaacccatgccagcgccaaccagtcagactccgagacagggagtagaacacgaggcctcccgggatgaggagcccaggttgactggaggcgccgctggccaccaggaccgcagcaattcagggcagtatcctgcaaaaggggggccccagcagccccataataaaggctgtgtggctcccacagctggattggcagcccttctgttggccgtggctgctggtgtcctactgtgagcttctccacctggaaatttccctctcacctacttctctggccctgggtacccctcttctcatcacttcctgttcccaccactggactgggctggcccagcccctgtttttccaacattccccagtatccccagcttctgctgcgctggtttgcggctttgggaaataaaataccgttgtatatattctgccaggggtgttctagctttttgaggacagctcctgtatccttctcatccttgtctctccgcttgtcctcttgtgatgttaggacagagtgagagaagtcagctgtcacggggaaggtgagagagaggatgctaagcttcctactcactttctcctagccagcctggactttggagcgtggggtgggtgggacaatggctccccactctaagcactgcctcccctactccccgcatctttggggaatcggttccccatatgtcttccttactagactgtgagctcctcgagggcagggaccgtgccttatgtctgtgtgtgatcagtttctggcacataaatgcctcaataaagatttaattactttgtaaaaaaaaaaaaaaaaaaaaaaaaaaaaaaaaaaaaaaaaaaaaaaaaaaaaaaaaaaaaaaaaaaaa

SEQ ID NO: 626 - DNA, 1529 bp, Homo sapiens
  misc_feature (1505)..(1505): n equals a,t,g, or c
gcggttgccgccgccgccgatcagctgagcwgagacggagccgctgtcaactctccaactcagctcagctgatcggttgccgccgccgccgccgccagattctggaggcgaagaacgcaaagctgagaacatggacgttaatatcgccccactccgcgcctgggacgatttcttcccgggttccgatcgctttgcccggccggacttcagggacatttccaaatggaacaaccgcgtagtgagcaacctgctctattaccagaccaactacctggtggtggctgccatgatgatttccattgtggggtttctgagtcccttcaacatgatcctgggaggaatcgtggtggtgctggtgttcacagggtttgtgtgggcagcccacaataaagacgtccttcgccggatgaagaagcgctaccccacgacgttcgttatggtggtcatgttggcgagctatttccttatctccatgtttggaggagtcatggtctttgtgtttggcattacttttcctttgctgttgatgtttatccatgcatcgttgagacttcggaacctcaagaacaaactggagaataaaatggaaggaataggtttgaagaggacaccgatgggcattgtcctggatgccctagaacagcaggaagaaggcatcaacagactcactgactatatcagcaaagtgaaggaataaacataacttacctgagctagggttgcagcagaaattgagttgcagcttgcccttgtccagacctatkttctgcttgcgtttttgaaacaggaggtgcacgtaccacccaattatctatggcagcatgcatgtataggccgaactattatcagctctgatgtttcagagagaagacctcagaaaccgaaagaaaaccaccaccctcctattgtgtctgaagtttcacgtgtgtttatgaaatctaatgggaaatggatcacacgatttctttaagggaattaaaaaaaataaaagaattacggcttttacagcaacaatacgattatcttataggaaaaaaaaaatcattgtaaagtatcaagacaatacgagtaaatgaaaaggctgttaaagtagatgacatcatgtgttagcctgttcctaatcccctagaattgtaatgtgtgggatataaattagtttttattattctcttaaaaatcaaagatgatctctatcactttgccacctgtttgatgtgcagtggaaactggttaagccagttgttcatacttcstttacaaatataaagatagctgtttaggatattttgttacatttttgtaaatttttgaaatgctagtaatgtgttttcaccagcaagtatttgttgcaaacttaatgtcattttccttaagatggttacagctatgtaacctgtattattctggacggacttattaaaatacaaacagacaaaaaataaaacaaaaaaaaaaaaaaagggcggccgctctagaggatccckcgaggggcccaagcgtttccngtargttccccttaaagacccccg

SEQ ID NO: 627 - DNA, 1218 bp, Homo sapiens
ccacgcgtccgatctgtctttttgcttttagcatcctaatgagtatgaaatgctatcttgtggttttgatttgcattcccctgatggcaactgatgctgagtgtcttttcctgtgcttacgggccatgcgtatttctttggagaaaggtctatccaggtcctttgcctatttttaattgagttgtcttttttttttaagttttctgttttcctaaccactagactaccagggatgagccttctttttattattgagttgggtgagctatttgtatattctagacgccagtcttttatcaggtatatgactggtaaaaatgttctccccttctgtggattgttttcagtttcttgttggtgtcctttgagacacaaaactttttaactttgatgatttccaagatacgtattttttttctattgtcacttgtgcttttggtgccatatctagaaaaccattgcctaatccaaggtcaagaagattaatgcctgtgttttcttctaagaacttgtatagttttagttctcacaatggtctttgatccatttcgagtatatttttatatatgatgtgatgtaggggtccagcttcattcttttgcttgtggatctccacttgtcccactgctgattattgagaaaaatatcctttctccacggaattgtcttggcatccttgctaaaggcctctgcttcttactggatcttctttcctgggacatggtgtcgttgggaagcttacctttttttttttttacttagtctgtgtttggttccaccagttttatgctgcctttctactctgttcttgctgtctccctctttacctgagtcaacggtactgagtcctatctctctctgatgttccccagtcttccttggtgcatgttctagctccacacactagtccttggaggaaggttgagaccaatgatttcctgttatgagtcatgaggaaactgaatcacctagaagtggaataatgtgctcagggtcaccatagcccattagtggaaggaccaggactagacctttagtcttctgaggtccagccccttaggctgtctgtcatcactgtacccaagtgatgtcactaccaaggccaaatgatggtgggctaaattttaattctcaaaagtgtaggaggctaatattgtcttctaagttccaaaagaagatgtaataaaagtctgttaccttaaaaaaaaaaaaaaaagg

SEQ ID NO: 628 - DNA, 831 bp, Homo sapiens
  misc_feature (5)..(5): n equals a,t,g, or c
  misc_feature (10)..(11): n equals a,t,g, or c
  misc_feature (15)..(15): n equals a,t,g, or c
  misc_feature (27)..(27): n equals a,t,g, or c
catcnacggnnaccnctactataggtnaagctggtacgcctgcaggtaccggtccggaattcccgggtcgacccacgcgtccgggggaawtcccagtcgatttttccaagcagtactccgcttcctggatgtgtttgtctctcttggctgcactggcctgctctgctggagacacatgggcttcagaagttggcccagttctgagtaaaagttctccaagactgataacaacctgggagaaagttccagttggtaccaatggaggagttacagtggtgggccttgtctccagtctccttggtggtacctttgtgggcattgcatacttcctcacacagctgatttttgtgaatgatttagacatttctgccccgcagtggccaattattgcatttggtggtttagctggattactaggatcaattgtggactcatacttaggggctacaatgcagtatactgggttggatgaaagcactggcatggtggtcaacagcccaacaaataakgcaaggcacatagcagggaaacccattcttgataacaacgcagtgaatctgttttcttctgttcttattgccctcttgctcccaactgctgcttggggtttttggcccagggggtgaactttatttcatttccmcaggttgaaactgaatgggcagttcatgktaaaatcmcttttcatggaaagagctctatgtaacagcataataaaactgsctacctagcagcaaaaaaaaaaaaaaaaaaaaaaaaaaaaaaaaaaaaaaaagggcggccgctctagaggatccaagcttacgtacgcgtgcatgcgacatcatagct

SEQ ID NO: 629 - DNA, 637 bp, Homo sapiens
gattttcctgcttgcatcatttctagcacagagctggaggaaatggcgaggtgcaggtggccgctggccmtgctgttctacatgggagcaagacagctgctaggtgaaggggaatgaccaggcagccacagggaggacatgtggcctcaggaagcctgggtgtgtatcctggttctgctaggaacacgtgtggggctttgtgtgggtgactctctggctccccaagcctccctttcctactgttatatccttaaagtgcctctgaggccaaagcctttgtggcaattgtcaaatgagtccatatgcagtgagtaccgtgttgagggaggacaaggtcaccaagagctgagaatgtttctccgactgatgagacctagatattgggtacatggaggtccccggtccctttgtgattcctgcagcctgttgcctccttgcctggaccccgcctcagctcagaaagccaattccctagattccaaaggccttcccagaccaattagcatgtcctgcagctgtcagctccctgtgcctagcctggacctcagctcatgtctagcacccagtctcccaaccccacacatattcacaaataaaagaaaataacaaatgaaaaaaaaaaaaaaaaaaaaaaaat

SEQ ID NO: 630 - DNA, 3337 bp, Homo sapiens
ggttgatttcccctcaactttccacaggtatcttaaaagctttgctcactcatcccttctctgacttaggatttgagcatctttctgttatgctgttgccccactcctattgcaatactcctcttcttaagaaagtttttctagactaatgtctagattaaacttcttttctttgacaataatgatgccatgacttggacaaaatgcccattgcctctgggtcctgctttcttcacccagtgctgccttattggactccttgtgcctctccttggctggggaaatcagaatacacagtggtatcccacttctaagatgcctgatctgaaggacagtaaaacaactgacctttgccagcatgtaaaacacatggtttaactagtcctccaggaacaacamtgagcaatcctgacctgggactactttactcggccatctcctacttgagatgctccttgtctctctgttcaaggacaccttttctgagcctttcttgaacaagagtggaggaccgataggcgattaaactgtccttgacacaactttagagcttcwactgagaatctagaagagagtagatggaaaaatatttttccctcccctccaaatgcaaggataatcttacacgagtccaggaggaaggctcattccacactaagtgttctgaatcaaaaagatgaacaaaatacagtgccattcttcaaggrcttcacagtctacaggaaagggwtatagttaaacaaataactgcagaattggaaattggagctgatgtgcttagaagtgttttgaacaaggggcatgactgtgactctctctgcttttgcaagcttcaggaaaacctttactcacagttgaaaatacagagcctcagggtgaagccctaacttcccacagcagatggggtctatgaggaggaagaagtagacgcatggaccagtcctgttatgaagacaagtttcatggtgctactgtgtctccatgagctcctatggcccagaagctggcatcctgtgagtggacggagtcttgctcggtcgcccaggctggagtgcagttaaatgaaaaaacgtacccagacagaggttctaaaacagcaccaaaatattaatttaatgagtggagawtagttttctttatcaacactacaattttcttttctttttttttttttttttttttttgagacgtagtctcactctgtcgctcaggctggagtgcagtggcacaatctcggctcactgcaagctccgcctcccgggttcacaccattctcctgcctcagcctcccaagtagctgggactacaggtgcccaccaccacgcccagctaatgttctgtatttttagtagagatggggtttcactgtgttatctaggatggctcgatctcctgacctcgtgatctgcccgctcggcctcccaaagtgctggaattacaggtgtgagccacattgcccggcccatttatgktgkttttatccatctaaccagccaccatatattgtgtgcttcccatgtaccacaacacattctgagaacttgccacacatgctctactttcgtcttcacatcaacaatgtgaatcttaagctgtgctgaattttgtccaaaatgactcagataggaaaaggcagaataaggaatacattccagttgtctccaaagtccacccttttctaagtgtcacattatattgtccttgccactggcacacagcttaaataaaagtcaaaccatgagaagccatagaaagtaatatcagagtacaggtgagaagttgcacttacataaatgatcattcaagacttcctggagaaggcacgagttgtcctttggagtgaccaagactcacttccaagtagaaagctcagtaattttgcttgagagatagcatggaaagggcccagtcttcagagtgtggctgacttgaatttgagctctatcttcatctattrctacccatgtgcctctggacatcttacttaacctctctgaatcttcatcttgtcattgtgagaaacctgattgacttgttgtaaagattaaagaaatcatgaaacacatctagtccaaaactgatactatagtagacatttaacaagtgatgtttgatttaattcaagtctctaggttatagtaagacaatggcaaaatattaattaatcagcttctccagtttgtgcgtttgagaagggtaagccaaaggaggactttgttttcatatctcatattgcatcgtttgtcataaaaattacacatttatacaagcgcgcacacacacacacacacacaggcacaaacactcagacatgagccacaatccacaatgaaggagtgcttagagtgcttaggcaccataataaactttcacataaagtacagcagtagcattcttaattaaaatctctaaagtactcttgttgttgacaatatcrccacccaaagccatatttaccttgttaattattcaagttgcagtgaataagaaacaatgcccaggcttcccataaaatttccaaaaattaaaccagggaaatgggcaataaatgtcatttgaaatggaactgatgccagttaattacaagacaactgtaaaataatggggcatgaggttcttcaacaatgcctaattagtaactatatgggcatttccttggaaaaaatggcaattacacggtgcaaacacttagcagtcatcatcaaaggcccttaaccaatattagctaattaatcttccctacaacactccagcaggaggcagcacaagtcctcattgagggagggagaakggaagccaaaagatgaaatggaaaatcctcttctgctcagcatctgtaaagaacaatttgacactcgcagcctagaagcactcaggagggattcccagrccaagagagagagttttccttaatgataaggttaatgtggtgaacacctagcttcctcctgatttgctgccatggctcacatccttgctgtccycgagaactccccacaccaaattgctgttgcaggcacacatgcactcttgcgcttatcaacccttttctctttttctcagcaagaaggcttttgacctcaaatatataaaaccaatggggggagaaggaagctatgcctctttccacaaagccaagcttgttatattataacatgatccacagcttttgatttcaacttaatgtatgagatctggaattatttcagaagtatgattgattttgatcaggtgaagatattttaaaagaagtgaattatctcttatgttacttaatttaatccacattaaagatttatgacaaaaaaaaaaaaaaaaaaaaaaaaagggcggccgc

SEQ ID NO: 631 - DNA, 2733 bp, Homo sapiens
gtgttgacggcgctgcgatggctgcctgcgagggcaggagaagcggagctctcggttcctctcagtcggacttcctgacgccgccagtgggcggggccccttgggccgtcgccaccactgtagtcatgtacccaccgccgccgccgccgcctcatcgggacttcatctcggtgacgctgagctttggcgagagctatgacaacagcaagagttggcggcggcgctcgtgctggaggaaatggaagcaactgtcgagattgcagcggaatatgattctcttcctccttgcctttctgcttttctgtggactcctcttctacatcaacttggctgaccattggaaagctctggctttcaggctagaggaagagcagaagatgaggccagaaattgctgggttaaaaccagcaaatccacccgtcttaccagctcctcagaaggcggacaccgaccctgagaacttacctgagatttcgtcacagaagacacaaagacacatccagcggggaccacctcacctgcagattagacccccaagccaagacctgaaggatgggacccaggaggaggccacaaaaaggcaagaagcccctgtggatccccgcccggaaggagatccgcagaggacagtcatcagctggaggggagcggtgatcgagcctgagcagggcaccgagctcccttcaagaagagcagaagtgcccaccaagcctcccctgccaccggccaggacacagggcacaccagtgcatctgaactatcgccagaagggcgtgattgacgtcttcctgcatgcatggaaaggataccgcaagtttgcatggggccatgacgagctgaagcctgtgtccaggtccttcagtgagtggtttggcctcggtctcacactgatcgacgcgctggacaccatgtggatcttgggtctgaggaaagaatttgaggaagccaggaagtgggtgtcgaagaagttacactttgaaaaggacgtggacgtcaacctgtttgagagcacgatccgcatcctgggggggctcctgagtgcctaccacctgtctggggacagcctcttcctgaggaaagctgaggattttggaaatcggctaatgcctgccttcagaacaccatccaagattccttactcggatgtgaacatcggtactggagttgcccacccgccacggtggacctccgacagcactgtggccgaggtgaccagcattcagctggagttccgggagctctcccgtctcacaggggataagaagtttcaggaggcagtggagaaggtgacacagcacatccacggcctgtctgggaagaaggatgggctggtgcccatgttcatcaatacccacagtggcctcttcacccacctgggcgtattcacgctgggcgccagggccgacagctactatgagtacctgctgaagcagtggatccagggcgggaagcaggagacacagctgctggaagactacgtggaagccatcgagggtgtcagaacgcacctgctgcggcactccgagcccagtaagctcacctttgtgggggagcttgcccacggccgcttcagtgccaagatggaccacctggtgtgcttcctgccagggacgctggctctgggcgtctaccacggcctgcccgccagccacatggagctggcccaggagctcatggagacttgttaccagatgaaccggcagatggagacggggctgagtcccgagatcgtgcacttcaacctttacccccagccgggccgtcgggacgtggaggtcaagccagcagacaggcacaacctgctgcggccagagaccgtggagagcctgttctacctgtaccgcgtcacaggggaccgcaaataccaggactggggctgggagattctgcagagcttcagccgattcacacgggtcccctcgggtggctattcttccatcaacaatgtccaggatcctcagaagcccgagcctagggacaagatggagagcttcttcctgggggagacgctcaagtatctgttcttgctcttctccgatgacccaaacctgctcagcctggacgcctacgtgttcaacaccgaagcccaccctctgcctatctggacccctgcctagggtggatggctgctggtgtggggacttcgggtgggcagaggcaccttgctgggtctgtggcattttccaagggcccacgtagcaccggcaaccgccaagtggcccaggctctgaactggctctgggctcctcctcgtctctgctttaatcaggacaccgtgaggacaagtgaggccgtcagtcttggtgtgatgcggggtgggctgggccgctggagcctccgcctgcttcctccagaagacacgaatcatgactcacgattgctgaagcctgagcaggtctctgtgggccgaccagaggggggcttcgaggtggtccctggtactggggtgaccgagtggacagcccagggtgcagctctgcccgggctcgtgaagcctcaggtgtccccaatccaagggtctggaggggctgccgtgactccagaggcctgaggctccagggctggctctggtgtttacaagctggactcagggatcctcctggccgccccgcagggggcttggagggctggacggcaagtccgtctagctcacgggcccctccagtggaatgggtcttttcggtggagataaaagttgatttgctctaaaaaaaaaaaaaaaaaaaaaaaaaa

SEQ ID NO: 632 - DNA, 1547 bp, Homo sapiens
ggcacgagcggctgcgggcgcgaggtgaggggcgcgaggttcccagcaggatgccccggctctgcaggaagctgaagtgagaggcccggagagggcccagcccgcccggggcaggatgaccaaggcccggctgttccggctgtggctggtgctggggtcggtgttcatgatcctgctgatcatcgtgtactgggacagcgcagcgccgcgcacttctacttgcacacgtccttctctaggccgcacacggggccgccgctgcccacgcccgggccggacaggacagggagctcacggccgactccgatgtcgacgagtttctggacaatttctcatgctggcgtgaagcagagtgaccttcccagaaaggagacggagcagccgcctgcgccgggggagcatggaggagagcgtgagaggctacgactggtccccgcgcgacgcccggcgcagcccagaccagggccggcagcaggcggagcggaggaacgtgctgcggggcttctgcgccaactccagcctggccttccccaccaaggagcgcgcattcgacgacatccccaactcggagctgagccacctgatcgtggacgaccggcacggggccatctactgctacgtgcccaaggtggcctgcaccaactggaagcgcgtgatgatcgtgctgagcggaagcctgctgcaccgcggtgcgccctaccgcgacccgctgcgcatcccgcgcgagcacgtgcacaacgccagcgcgcacctgaccttcaacaagttctggcgccgctacgggaagctctcccgccacctcatgaaggtcaagctcaagaagtacaccaagttcctcttcgtgcgcgaccccttcgtgcgcctgatctccgccttccgcagcaagttcgagctggagaacgaggagttctaccgcaagttcgccgtgcccatgctgcgggtgtacgccaaccacaccagcctgcccgcctcggcgcgcgaggccttccgcgctggcctcaaggtgtccttcgccaacttcatccagtacctgctggacccgcacacggagaagctggcgcccttcaacgagcactggcggcaggtgtaccgcctctgccacccgtgccagatcgactacgattcctggggaagctggagactctggacgaggacgccgcgcagctgctgcagctactccaggtggaccggcagtccgcttccccccgagctaccggaacaggaccgccagcagctgggaggaggactggttcgccaagatccccctggcctggaggcagcagctgtataaactctacgaggccgactttgttctcttcggctaccccaagcccgaaaacctcctccgagactgaaagctttcgcgttgctttttctcgcgtgcctggaacctgacgcacgcgcactccagtttttttatgacctacgattttgcaatctgggcttcttgttcactccactgcctctatccattgagtactgtatcgatattgttttttaagattaatatatttcaggtatttaatacgaaaaaaaaaaaaaaaaaa

SEQ ID NO: 633 - DNA, 1380 bp, Homo sapiens
cagacccgcggggcaaacggactggggccaagagccgggagcgcgggcgcaaaggcaccagggcccgcccagggcgccgcgcacacggccttgggggttctgcgggccttcgggtgcgcgtctcgcctctagccatggggtccgcagcgttggagatcctgggcctggtgctgtgcctggtgggctgggggggtctgatcctggcgtgcgggctgcccatgtggcaggtgaccgccttcctggaccacaacatcgtgacggcgcagaccacctggaaggggctgtggatgtcgtgcgtggtgcagagcacgggcacatgcagtgcaaagtgtacgactcggtgctggctctgagcaccgaggtgcaggcggcgcgggcgctcaccgtgagcgccgtgctgctggcgttcgttgcgctcttcgtgaccctggcgggcgcgcagtgcaccacctgcgtggccccgggcccggccaaggcgcgtgtggccctcacgggaggcgtgctctacctgttttgcgggctgctggcgctcgtgccactctgctggttcgccaacattgtcgtccgcgagttttacgacccgtctgtgcccgtgtcgcagaagtacgagctgggcgcacgctgtacatcggctgggcggccaccgcgctgctcatggtaggcggctgcctcttgtgctgcggcgcctgggtctgcaccggccgtcccgacctcagcttccccgtgaagtactcagcgccgcggcggcccacggccaccggcgactacgacaagaagaactacgtctgagggcgctgggcacggccgggcccctcctgccagccacgcctgcgaggcgttggataagcctggggagccccgcatggaccgcggcttccgccgggtagcgcggcgcgcaggctcctcggaacgtccggctctgcgccccgacgcggctcctggatccgctcctgcctgcgcccgcagctgaccttctcctgccactagcccggccctgcccttaacagacggaatgaagtttccttttctgtgcgcggcgctgtttccataggcagagcgggtgtcagactgaggatttcgcttcccctccaagacgctgggggtcttggctgctgccttacttcccagaggctcctgctgacttcggaggggcggatgcagagcccagggcccccaccggaagatgtgtacacctggtctttactccatcggcagggcccgagcccagggaccagtgacttggcctggacctcccggtctcactccagcatctccccaggcaaggcttgtgggcaccggagcttgagagagggcgggagtgggaaggctaagaatctgcttagtaaatggtttgaactctcaaaaaaaaaaaaaaaaaaa

SEQ ID NO: 634 - DNA, 610 bp, Homo sapiens
  misc_feature (25)..(25): n equals a,t,g, or c
  misc_feature (74)..(74): n equals a,t,g, or c
  misc_feature (76)..(76): n equals a,t,g, or c
  misc_feature (486)..(486): n equals a,t,g, or c
ccaggtaccggcccggaaattcttnggtcgacccacgcgtccggcatgacgaacttctcccttgttcccagccnantcctagaatatgttgcctcttctcaaaaataacgtaccacaaagcctctggtgacggtggagcaaaggaatagatggtgaatgtctcatacccacttcggatccagaacaggcctaggagagactcaggtgggatctgctgctgaggaaaggagttggggctgaagttggaggaagagggcagctctaaaccacctattcctggctctaggcctctcaggccagacagcccccacccgtttctgcagatgcccgcatcatggtcctgaggggatgggggctggcctggagcytttcccccgtggtgtgtggctatagcggggacatgaagggggtgtgttggggacgtagtgaccactcccttctaccgtcagaratcctgcttccccctgccccctgcccctyctcggntgtccttcataaccccccacccactccccacctgccatctcctgtgcttgtgcggatccaggaagcacctacctgggcacagagatcatcgctcggtgcctcgcccctacacaagggcgattaa

SEQ ID NO: 635 - DNA, 659 bp, Homo sapiens
  misc_feature (616)..(616): n equals a,t,g, or c
  misc_feature (620)..(620): n equals a,t,g, or c
  misc_feature (631)..(631): n equals a,t,g, or c
  misc_feature (644)..(644): n equals a,t,g, or c
  misc_feature (649)..(649): n equals a,t,g, or c
ctacgagttttttttttttttttttctgtcagcctcataaacatttttaatgacccacatagcatgacatatacagtatcatgttttccctaagagaaattactttacattgactttaatgacttgccctcacagctttagatttcacttgctaaagtattttgattgtgcatttaatttaaaaagaaacctctaaacatttttttagttgcaaaaaattccaactttaccagggagaagaacattttggggtgttcaactgtactgggaatgttttatttttaagctggttagtgaatacatgggtgttcattttattacctcatatacttcatatgttttaaataataatacatttaaaaatatgctttcttttattcagatttctgatgctagaggaatatgttcagttagtttacttgtcctgaaatttaaacagtaaccatttaaattacgtgagctgtaaagagattggcatttttctgtgagttgttccagacactaggcccagtgctgttaaagatgagccccgcattctctccaaatgacaccaggcccatcattgtgttcctaggctcaagctcttctccgctggcatgatgctcatcaggtctanagcncaaaaggaganttcggtgggtagnggggnggatagattt

SEQ ID NO: 636 - DNA, 189 bp, Homo sapiens
gaaagaatggctcctctgtttataacacacccaacaggaatctggggtcaatgtgatgagaggcacaaagcttgtggcctccctacaaacaaatgcctacatgtgaagaggaaaaaaaattatagaatctgggtagtgggtgtatgggtgttcactgtataattctttcaacaatctcctatgtttgaa

SEQ ID NO: 637 - DNA, 637 bp, Homo sapiens
  misc_feature (358)..(358): n equals a,t,g, or c
  misc_feature (523)..(523): n equals a,t,g, or c
  misc_feature (552)..(552): n equals a,t,g, or c
  misc_feature (589)..(589): n equals a,t,g, or c
ttttatatatatatatatatatatatataaaatgccagaaagcagttttcttgacatgatagaaaagaatgtgcttgggaattcaagctctatagcaacaagacagagaagattgtattagtaagattgtatatcttccagtgtcacctgtatatcccctaaactcctcacctatatcacaaaaacctgccaaggcagaatacattcccttgggaaaggagctttggcgggcaagcaggcatcgggtcccatctgacaccagcgtgatcgccacaggagccatctaggaaaggggaatggaaactgagatgctggcactttgggccctgccaatgagctaaagcagtgtataattaangaattgcacaggcttccttccccaggacaaagcagcgcacagtcttcttggattactgtcctcttacagcaataattacctgtggataatagattatattattggaagggcacacacgcttgctgccagccacgtcttcttggtgggctgccacttctgctgcanaactgatgagcatcatgccaccggagaanacttgagcctaggacaacatgatgggcctggtgtcanttggagagaatgcgggctcatctttacagccttgggcctaatggctgc

SEQ ID NO: 638 - DNA, 1830 bp, Homo sapiens
  misc_feature (67)..(67): n equals a,t,g, or c
  misc_feature (97)..(97): n equals a,t,g, or c
  misc_feature (211)..(211): n equals a,t,g, or c
  misc_feature (1813)..(1813): n equals a,t,g, or c
  misc_feature (1830)..(1830): n equals a,t,g, or c
gcgaccgcgcccttcagctagctcgctcgctcgctctgcttccctgctgccggctgcgcatggcttnggcgttggcggcgctggcggcggtcgagcngcctgcgsagccggtaccagcagttgcagaatgaagaagagtctggagaacctgaacaggctgcaggtgatgctcctccaccttacagcagcatttctgcagagagcgcacatnattttgactacaaggatgagtctgggtttccaaagcccccatcttacaatgtagctacaacactgcccagttatgatgaagcggagaggaccaaggctgaagctactatccctttggttcctgggagagatgaggattttgtgggtcgggatgattttgatgatgctgaccagctgaggataggaaatgatgggattttcatgttaacttttttcatggcattcctctttaactggattgggtttttcctgtctttttgcctgaccacttcagctgcaggaaggtatggggccatttcaggatttggtctctctctaattaaatggatcctgattgtcaggttttccacctatttccctggatattttgatggtcagtactggctctggtgggtgttccttgttttaggctttctcctgtttctcagaggatttatcaattatgcaaaagttcggaagatgccagaaactttctcaaatctccccaggaccagagttctctttatttattaaagatgttttctggcaaaggccttcctgcatttatgaattctctctcaagaagcaagagaacacctgcaggaagtgaatcaagatgcagaacacagaggaataatcacctgctttaaaaaaataaagtactgttgaaaagatcatttctctctatttgttcctaggtgtaaaattttaatagttaatgcagaattctgtaatcattgaatcattagtggttaatgtttgaaaaagctcttgcaatcaagtctgtgatgtattaataatgccttatatattgtttgtagtcattttaagtagcatgagccatgtccctgtagtcggtagggggcagtcttgctttattcatcctccatctcaaaatgaacttggaattaaatattgtaagatatgtataatgctggccattttaaaggggttttctcaaaagttaaacttttgttatgactgtgtttttgcacataatccatatttgctgttcaagttaatctagaaatttattcaattctgtatgaacacctggaagcaaaatcatagtgcaaaaatacatttaaggtgtggtcaaaaataagtctttaattggtaaataataagcattaattttttatagcctgtattcacaattctgcggtaccttattgtacctaagggattctaaaggtgttgtcactgtataaaacagaaagcactaggatacaaatgaagcttaattactaaaatgtaattcttgacactctttctataattagcgttcttcacccccacccccacccccaccccccttattttccttttgtctcctggtgattaggccaaagtctgggagtaaggagaggattaggtacttaggagcaaagaaagaagtagcttggaacttttgagatgatccctaacatactgtactacttgcttttacaatgtgttagcagaaaccagtgggttataatgtagaatgatgtgctttctgcccaagtggtaattcatcttggtttgctatgttaaaactgtaaatacaacagaacattaataaatatctcttgtgtagcaccttttaaaaaaaaaaaaaaaaaaaaaaaaaaaaaaaaaaaancccgggggggggccccn

SEQ ID NO: 639 - DNA, 1025 bp, Homo sapiens
cctggcccacattgcttcattggcctggccatgcgcctgtactatggcagccgctagtccctgacaacttccaccctgattccggaccctgtagattgggcgccaccaccagatccccctcccaggccttcctccctctcccatcagcagccctgtaacaagtgccttgtgagaaaagctggagaagtgagggcagccaggttattctctggaggttggtggatgaaggggtaccctaggagatgtgaagtgtgggtttggttaaggaaatgcttaccatcccccacccccaaccaagttcttccagactaaagaattaaggtaacatcaatacctaggcctgagaaataaccccatccttgttgggcagctccctgctttgtcctgcatgaacagagttgatgaaagtggggtgtgggcaacaagtggctttccttgcctactttagtcacccagcagagccactggagctggctagtccagcccagccatggtgcatgactcttccataagggatcctcacccttccactttcatgcaagaaggcccagttgccacagattatacaaccattacccaaaccactctgacagtctcctccagttccagcaatgcctagagacatgctccctgccctctccacagtgctgctccccacacctagcctttgttctggaaaccccagagagggctgggcttgactcatctcagggaatgtagcccctgggccctggcttaagccgacactcctgacctctctgttcaccctgagggctgtcttgaagcccgctacccactctgaggctcctaggaggtaccatgcttcccactctggggcctgcccctgcctagcagtctcccagctcccaacagcctggggaagctctgcacagagtgacctgagaccaggtacaggaaacctgtagctcaatcagtgtctctttaactgcataagcaataagatcttaataaagtcttctaggctgtagggtggttcctacaaccacagccaaaaaaaaaaaaaa

SEQ ID NO: 640 - DNA, 2454 bp, Homo sapiens
  misc_feature (2317)..(2317): n equals a,t,g, or c
ggtcgacccacgcgtccgcttccatgtcaaatgtatgactgttatttcttcttctggaagagcctacctggacgtagacattactctgtcctcagaagctttccataattacatgaatgctgccatggtgcacatcaacagggccctgaaactcattattcgtctctttctggtagaagatctggttgactccttgaagctggctgtcttcatgtggctgatgacctatgttggtgctgtttttaacggaatcacccttctaattcttgctgaactgctcattttcagtgtcccgattgtctatgagaagtacaagacccagattgatcactatgttggcatcgcccgagatcagaccaagtcaattgttgaaaagatccaagcaaaactccctggaatcgccaaaaaaaaggcagaataagtacatggaaaccagaaatgcaacagttactaaaacaccatttaatagttataacgtcgttacttgtactatgaaggaaaatactcagtgtcagcttgagcctgcattccaagctttttttttaatttggtgttttctcccatcctttccctttaaccctcagtatcaagcacaaaaattgatggactgataaaagaactatcttagaactcagaagaagaaagaatcaaattcataggataagtcaataccttaatggtggtagagcctttacctgtagcttgaaaggggaaagattggaggtaagagagaaaatgaaagaacacctctgggtccttctgtccagttttcagcactagtcttactcagctatccattatagttttgcccttaagaagtcatgattaacttatgaaaaaattatttggggacaggagtgtgataccttccttggtttttttttgcagccctcaaatcctatcttcctgccccacaatgtgagcagctacccctgatactccttttctttaatgatttaactatcaacttgataaataacttataggtgatagtgataattcctgattccaagaatgccatctgataaaaaagaatagaaatggaaagtgggactgagagggagtcagcaggcatgctgcggtggcggtcactccctctgccactatccccagggaaggaaaggctccgccatttgggaaagtggtttctacgtcactggacaccggttctgagcattagtttgagaactcgttcccgaatgtgctttcctccctctcccctgcccacctcaagtttaataaataaggttgtacttttcttactataaaataaatgtctgtaactgctgtgcactgctgtaaacttgttagagaaaaaaataacctgcatgtgggctcctcagttattgagtttttgtgatcctatctcagtctgggggggaacattctcaagaggtgaaatacagaaagcctttttttcttgatcttttcccgagattcaaatctccgattcccatttgggggcaagtttttttcttcaccttcaatatgagaattcagcgaacttgaaagaaaaatcatctgtgagttccttcaggttctcactcatagtcatgatccttcagagggaatatgcactggcgagtttaaagtaagggctatgatatttgatggtcccaaagtacggcagctgcaaaaagtagtggaaggaaattgtctacgtgtcttggaaaaattagttaggaatttggatgggtaaaaggtacccttgccttactccatcttattttcttagccccctttgagtgttttaactggtttcatgtcctagtaggaagtgcattctccatcctcatcctctgccctcccaggaagtcagtgattgtctttttgggcttcccctccaaaggaccttctgcagtggaagtgccacatccagttcttttcttttgttgctgctgtgtttagataattgaagagatctttgtgccacacaggattttttttttttttaagaaaaacctatagatgaaaaattactaatgaaactgtgtgtacgtgtctgtgcgtgcaacataaaaatacagtagcacctaaggagcttgaatcttggttcctgtaaaatttcaaattgatgtggtattaataaaaaaaaaaaaaacacaaaaaaaaaaaaaaaaagggcggccgctctagaggatccaagcttacgtacgcgtgcatgcgacgtcatagctcttctatagtgtcacctaaattcaattcactggccgtcgttttacaacgtcgtgactgggaaaaccctggcgttacccaacttaatcgccttgcagcacatccccctttcgccagctggcgtaatagcgaagaggcccgnaccgatcgsccttcccaacagttgcgcagcctgaatggcraatgggacgcgccctgtagcggcgcattaagcgcggcggktgtggtggttacccgcagcgtgaccgttacacttgccagtggccctagcggcccgct

SEQ ID NO: 641 - DNA, 1775 bp, Homo sapiens
  misc_feature (820)..(820): n equals a,t,g, or c
gcggcgcgggtgggggttgtgcgttttacgcaggctgtggcagcgacgcggtccccagcctgggtaaagatggccccatggcccccgaagggcctagtcccagctgtgctctggggcctcagcctcttcctcaacctcccaggacctatctggctccagccctctccacctccccagtcttctcccccgcctcagccccatccgtgtcatacctgccggggactggttgacagctttaacaagggcctggagagaaccatccgggacaactttggaggtggaaacactgcctgggaggaagagaatttgtccaaatacaaagacagtgagacccgcctggtagaggtgctggagggtgtgtgcagcaagtcagacttcgagtgccaccgcctgctggagctgagtgaggagctggtggagagctggtggtttcacaagcagcaggaggccccggacctcttccagtggctgtgctcagattccctgaagctctgctgccccgcaggcaccttcgggccctcctgccttccctgtcctgggggaacagagaggccctgcggtggctacgggcagtgtgaaggagaagggacacgagggggcagcgggcactgtgactgccaagccggctacgggggtgaggcctgtggccagtgtggccttggctactttgaggcagaacgcaacgccagccatctggtatgttcggcttgttttggcccctgtgcccgatgctcaggacctgaggaatcaaactgtttgcaatgcaagaagggctgggccctgcatcacctcaagtgtgtagactgtgccaaggcctgcntaggctgcatgggggcagggccaggtcgctgtaagaagtgtagccctggctatcagcaggtgggctccaagtgtctcgatgtggatgagtgtgagacagaggtgtgtccgggagagaacaagcagtgtgaaaacaccgagggcggttatcgctgcatctgtgccgagggctacaagcagatggaaggcatctgtgtgaaggagcagatcccagagtcagcaggcttcttctcagagatgacagaagacgagttggtggtgctgcagcagatgttctttggcatcatcatctgtgcactggccacgctggctgctaagggcgacttggtgttcaccgccatcttcattggggctgtggcggccatgactggctactggttgtcagagcgcagtgaccgtgtgctggagggcttcatcaagggcagataatcgcggccaccacctgtaggacctcctcccacccacgctgcccccagagcttgggctgccctcctgctggacactcaggacagcttggtttatttttgagagtggggtaagcacccctacctgccttacagagcagcccaggtacccaggcccgggcagacaaggcccctggggtaaaaagtagccctgaaggtggataccatgagctcttcacctggcggggactggcaggcttcacaatgtgtgaatttcaaaagtttttccttaatggtggctgctagagctttggcccctgcttaggattaggtggtcctcacaggggtggggccatcacagctccctcctgccagctgcatgctgccagttcctgttctgtgttcaccacatccccacaccccattgccacttatttattcatctcaggaaataaagaaaggtcttggaaagttaaaaaaaaaaaaaaaaaaaaaaaaaaaaactcgagggggggcccgtacccaatcgccctatgatgtagtcgtattaca

SEQ ID NO: 642 - DNA, 1379 bp, Homo sapiens
gcggcgcgggtgggggttgtgcgttttacgcaggctgtggcagcgacgcggtccccagcctgggtaaagatggccccatggcccccgaaggcctagtcccagctgtgctctggggcctcagcctcttcctcaacctcccaggacctatctggctccagccctctccacctccccagtcttctcccccgcctcagccccatccgtgtcatacctgccggggactggttgacagctttaacaagggcctggagagaaccatccgggacaactttggaggtggaaacactgcctgggaggaagagaatttgtccaaatacaaagacagtgagacccgcctggtagaggtgctggagggtgtgtgcagcaagtcagacttcgagtgccaccgcctgctggagctgagtgaggagctggtggagagctggtggtttcacaagcagcaggaggccccggacctcttccagtggctgtgctcagattccctgaagctctgctgccccgcaggcaccttcgggccctcctgccttccctgtcctgggggaacagagaggccctgcggtggctacgggcagtgtgaaggagaagggacacgagggggcagcgggcactgtgactgccaagccggctacgggggtgaggcctgtggccagtgtggccttggctactttgaggcagaacgcaacgccagccatctggtatgttcggcttgttttggcccctgtgcccgatgctcaggacctgaggaatcaaactgtttgcaatgcaagaagggctgggccctgcatcacctcaagtgtgtagacattgatgagtgtggcacagagggagccaactgtggagctgaccaattctgcgtgaacactgagggctcctatgagtgccgagactgtgccaaggcctgcctaggctgcatgggggcagggccaggtcgctgtaagaagtgtagccctggctatcagcaggtgggctccaagtgtctcgatgtggatgagtgtgagacagaggtgtgtccgggagagaacaagcagtgtgaaaacaccgagggcggttatcgctgcatctgtgccgagggctacaagcagatggaaggcatctgtgtgaaggagcagatcccaggtgcattccccatcttaactgatttaacccctgaaacaacccgacgctggaagttgggttctcatccccactctacatatgtaaaaatgaagatgcagagagatgaagctactttcccagggctatatggcaagcaagtcgcaaagctgggatcccaatccagacagtctgaccgtggaacgagactcatacacgtaataaatgctctgcccccaacttgtccaccacaaaaaaaaaaaaaaaaaaaaaaaaagggcggccgc

SEQ ID NO: 643 - DNA, 1508 bp, Homo sapiens
ggcacagagatagagcggcaacctcggaagtgcggacgggtgggcctatatagatgttgaggtgcggaggccgtgggcttttgttgggcctggctgtagccgcagcagcggtaatggcagcacggcttatgggctggtggggtccccgcgctggctttcgccttttcataccggaggagctgtctcgctaccgcggcggcccaggggacccgggcctgtacttggcgttgctcggccgtgtctacgatgtgtcctccggccggagcactacgagcctgggtcccactatagcggcttcgcaggccgagacgcatccagagctttcgtgaccggggactgttctgaagcaggcctcgtggatgacgtatccgacctgtcagccgctgagatgctgacacttcacaattggctttcattctatgagaagaattatgtgtgtgttgggagggtgacaggacggttctacggagaggatgggctgcccaccccggcactgacccaggtagaagctgcgatcaccagaggcttggaggccaacaaactacagctgcaagagaagcagacattcccgccgtgcaacgcggagtggagctcagccaggggcagccggctctggtgctcccagaagagtggaggtgtgagcagagactggattggcgtccccaggaagctgtataagccaggtgctaaggagccccgctgcgtgtgtgtgagaaccaccggcccccctagtggccagatgccggacaaccctccacacagaaatcgtggggacctggaccacccaaacttggcagagtacacaggctgcccaccgctagccatcacatgctcctttccactctaagccgtagcctcttctgttaataacacacagagagctctgccaagcacctgagtaggcccttgacacttgtgtgccctgggatgcctcctggcgcgaatcaggagggtctggaaggactctggctatattctgcaaatgtggctcatgccccttaccgtggctcggcgttgtggtgcctgagggacagccggccacctgcccagtactggtcagcttttcaacactattccctttgacctactggccatcttcctcacagccctcagatatcaacgggcacaaataagaccaactcaatttccacttgaatttacaaccaaaagcctgctgagttgattacagctgggccaatacagtacgaggcaataacaaattagtgtgggttgattctggaattggaaaagcttttgcttgtatggatacagcaaatccagatgtctctgaacaaagcaacaatttaaagcaacgacattttctgtcctttaagcacttaaaatcaggtgtggtgtgttttcaaaggcagaagtctgcattttgagcaaaaggtggcttcccagctctaacaaggtaactggttagcatgacattaaagcttgggcaaggcttcaaacttaaaaaaaaaaaaaaaaaaaaaaaaaaaaaaaaaaaaaaaaaactcgag

SEQ ID NO: 644 - DNA, 1412 bp, Homo sapiens
  misc_feature (1362)..(1362): n equals a,t,g, or c
  misc_feature (1369)..(1369): n equals a,t,g, or c
  misc_feature (1397)..(1397): n equals a,t,g, or c
cccttcatctgcgttgccaggaaccctgtcagcagaaacttctcaagccccatccttgccaggaagctctgtgaaggtgctgctgatgacccagattcctccatggtcctcctgtgtctcctgttggtgcccctcctgctcagtctctttgtactggggctatttctttggtttctgaagagagagagacaagaagagtacattgaagagaagaagagagtggacatttgtcgggaaactcctaacatatgcccccattctggagagaacacagagtacgacacaatccctcacactaatagaacaatcctaaaggaagatccagcaaatacggtttactccactgtggaaataccgaaaaagatggaaaatccccactcactgctcacgatgccagacacaccaaggctatttgcctatgagaatgttatctagacagcagtgcactcccctaagtctctgctcaaaaaaaaaacaattctcggcccaaagaaaacaatcagaagaattcactgatttgactagaaacatcaaggaagaatgaagaacgttgacttttttccaggataaattatctctgatgcttctttagatttaagagttcataattccatccactgctgagaaatctcctcaaacccagaaggtttaatcacttcatcccaaaaatgggattgtgaatgtcagcaaaccataaaaaaagtgcttagaagtattcctataaaaatgtaaatgcaaggtcacacatattaatgacagcctgttgtattaatgatggctccaggtcagtgtctggagtttcattccatcccagggcttggatgtcaggattataccaagagtcttgctaccaggagggcaagaagaccaaaacagacagacaagtccagcagaagcagatgcacctgacaaaaatggatgtattaattggctctataaactatgtgcccagcaytatgctgagcttacactaattggtcagacatgctgtctgccctcatgaaattggctccaaatgawtgaactactttcatgagcagttgtagcaggcctgaccacagattcccagagggccaggtgtggatccacaggacttgaaggtcaaagttcacaaagatgaagaatcagggtagctgaccatgtttggcagatactataatggagacacagaagtgtgcatggcccaaggacaaggacctccagccaggcttcatttatgcacttgtctgcaaaagaaaagtctaggttttaaggctgtgccagaacccatcccaataaagagaccgagtctgaagtcacattgtaaatctagtgtaggagacttggagtcaggcagtgagactggtggggcacggggggcantgggtantgtaaaccttttaaagatggttaattcntcattagtgtttttt

SEQ ID NO: 645 - DNA, 1306 bp, Homo sapiens
  misc_feature (1300)..(1300): n equals a,t,g, or c
aattcccgggtcgacccacgcgtccggaatttaagggacccacactaccttcccgaagttgaaggcaagcggtgattgtttgtagacggcgctttgtcatgggacctgtgcggttgggaatattgcttttcctttttttggccgtgcacgaggcttgggctgggatgttgaaggaggaggacgatgacacagaacgcttgcccagcaaatgcgaagtgtgtaagctgctgagcacagagctacaggcggaactgagtcgcaccggtcgatctcgagaggtgctggagctggggcaggtgctggatacaggcaagaggaagagacacgtgccttacagcgtttcagagacaaggctggaagaggccttagagaatttatgtgagcggatcctggactatagtgttcacgctgagcgcaagggctcactgagatatgccaagggtcagagtcagaccatggcaacactgaaaggcctagtgcagaagggggtgaaggtggatctggggatccctctggagctttgggatgagcccagcgtggaggtcacatacctcaagaagcagtgtgagaccatgttggargargaggargaagaggaggaagaggaagggggagacaagatgaccaagacaggaagccaccccaaacttgaccgagaagatctttgacccttgcctttgagcccccaggaggggaagggatcatggagagccctctaaagcctgcactctccctgctccacagctttcagggtgtgtttatgagtgactccacccaagcttgtagctgttctctcccatctaacctcaggcaagatcctggtgaaacagcatgacatggcttctggggtggagggtgggggtggaggtcctgctcctagagatgaactctatccagccccttaattggcaggtgtatgtgctgacagtactgaaagctttcctctttaactgatcccacccccacccaaaagtcagcagtggcactggagctgtgggctttggggaagtcacttagctccttaaggtctgtttttagacccttccaaggaagaggccagaacggacattctctgcgatctatatacattgcctgtatccaggaggctacacaccagcaaaccgtgaaggagaatgggacactgggtcatggcctggagttgctgataatttaggtgggatagatacttggtctacttaagctcaatgtaacccagagcccaccatatagttttataggtgctcaattttctatatcgctattaaacttttttctttttttctaaaaaaaaaaaaaaaanactcga

SEQ ID NO: 646 - DNA, 729 bp, Homo sapiens
  misc_feature (702)..(702): n equals a,t,g, or c
  misc_feature (710)..(710): n equals a,t,g, or c
gctggccctcgccttcaagctggacgaggtggccgccgtggcggtgctcctgtgtggctgctgtcccggcggcaatctctccaatcttatgtccctgctggttgacggcgacatgaacctcagcatcatcatgaccatctcctccacgcttctggccctcgtcttgatgcccctgtgcctgtggatctacagctgggcttggatcaacacccctatcgtgcagttactacccctagggaccgtgaccctgactctctgcagcactctcatacctatcgggttgggcgtcttcattcgctacaaatacagccgggtggctgactacattgtgaaggtttccctgtggtctctgctagtgactctggtggtccttttcataatgaccggcactatgttaggacctgaactgctggcaagtatccctgcagctgtttatgtgatagcaatttttatgcctttggcaggctacgcttcaggttatggtttagctactctcttccatcttccacccaactgcaagaggactgtatgtctggaaacaggtagtcagaatgtgcagctctgtacagccattctaaaactggcctttcaccgaattyataggaagcatgkacatgkttcctttgctgkatgcacttttycagtctgcaraascggggatttttgktttaatctataaaakgtatggaartgaaatgttgnaccaagcnagaatccttttagattaaa

SEQ ID NO: 647 - DNA, 1180 bp, Homo sapiens
  misc_feature (6)..(6): n equals a,t,g, or c
  misc_feature (9)..(9): n equals a,t,g, or c
  misc_feature (14)..(14): n equals a,t,g, or c
tccccnggntgcangattcggcagaggttttaggaatcctggtctcaggacctcatggaagaagagggggagagagttacaggttggacatgatgcacactatggggccccagcgacgtgtctggttgagctcagggaatatggttcttagccagtttcttggtgatatccagtggcacttgtaatggcgtcttcattcagttcatgcagggcaaaggcttactgataaacttgagtctgccctcgtatgagggtgtatacctggcctccctctgaggctggtgactcctccctgctggggccccacaggtgaggcagaacagctagagggcctccccgcctgcccgccttggctggctagctygcctctcctgtgcgtatgggaacacctagcacgtgctggatgggctgcctctgactcagaggcatggccggatttggcaactcaaaaccaccttgcctcagctgatcagagtttctgtggaattctgtttgttaaatcaaattagctggtctctgaattaagggggagacgaccttctctaagatgaacagggttcgccccagtcctcctgcctggagacagttgatgtgtcatgcagagctcttacttctccagcaacactcttcagtacataataagcttaactgataaacagaatatttagaaaggtgagacttgggcttaccattgggtttaaatcatagggacctagggcgagggttcagggcttctctggagcagatattgtcaagttcatggccttaggtagcatgtatctggtcttaactctgattgtagcaaaagttctgagaggagctgagccctgttgtggcccattaaagaacagggtcctcaggccctgcccgcttcctgtccactgccccctccccatccccagcccagccgagggaatcccgtgggttgcttacctacctataaggtggtttataagctgctgtcctggccactgcattcaaattccaatgtgtacttcatagtgtaaaaatttatattattgtgaggttttttgtctttttttttttttttttttttggtatattgctgtatctactttaacttccagaaataaacgttatataggaaccgtcaaaaaaaaaaaaaaaaaaaaaaaaaaaaaaaaaaaaaaaaaaaaaaaaaaaaaaaaaaaaaaaaaaa

SEQ ID NO: 648 - DNA, 941 bp, Homo sapiens
ggcacgagcctggacgcagcagccaccgccgcgtccctctctccacgaggctgccggcttaggacccccagctccgacatgtcgccctctggtcgcctgtgtcttctcaccatcgttggcctgattctccccaccagaggacagacgttgaaagataccacgtccagttcttcagcagactcaactatcatggacattcaggtcccgacacgagccccagatgcagtctacacagaactccagcccacctctccaaccccaacctggcctgctgatgaaacaccacaaccccagacccagacccagcaactggaaggaacggatgggcctctagtgacagatccagagacacacaagagcaccaaagcagctcatcccactgatgacaccacgacgctctctgagagaccatccccaagcacagacgtccagacagacccccagaccctcaagccatctggttttcatgaggatgaccccttcttctatgatgaacacaccctccggaaacgggggctgttggtcgcagctgtgctgttcatcacaggcatcatcatcctcaccagtggcaagtgcaggcagctgtcccggttatgccggaatcattgcaggtgagtccatcagaaacaggagctgacaacccgctgggcacccgaagaccaagccccctgccagctcaccgtgcccagcctcctgcatcccctcgaagagcctggccagagagggaagacacagatgatgaagctggagccagggctgccggtccgagtctcctacctcccccaaccctgcccgcccctgaaggctacctggcgccttgggggctgtccctcaagttatctcctctgttaagacaaaaagtaaagcactgtggtctttgaaaaaaaaaaaaaaaaaaaaaaaaaaaaaaaaaaaaaaaaaaaaaaaaaaaaaaaaaaaaa

SEQ ID NO: 649 - DNA, 988 bp, Homo sapiens
ggcagcagccaccgccgcgtccctctctccacgaggctgccggcttaggacccccagctccgacgtaagtccctctcgcgcgccacctccatccgctgcccctctgcccacgggccgggctcasatgtcgccctctggtcgcctgtgtcttctcaccatcgttggcctgattctccccaccagaggacagacgttgaaagataccacgtccagttcttcagcagactcaactatcatggacattcaggtcccgacacgagccccagatgcagtctacacagaactccagcccacctctccaaccccaacctggcctgctgatgaaacaccacaaccccagacccagacccagcaactggaaggaacggatgggcctctagtgacagatccagagacacacaagagcaccaaagcagctcatcccactgatgacaccacgacgctctctgagagaccatccccaagcacagacgtccagacagacccccagaccctcaagccatctggttttcatgaggatgaccccttcttctatgatgaacacaccctccggaaacgggggctgttggtcgcagctgtgctgttcatcacaggcatcatcatcctcaccagtggcaagtgcaggcagctgtcccggttatgccggaatcattgcaggtgagtccatcagaaacaggagctgacaaccygctgggcacccgaagaccaagccccctgccagctcaccgtgcccagcctcctgcatcccctcgaagagcctggccagagagggaagacacagatgatgaagctggagccagggctgccggtccgagtctcctacctcccccaaccctgcccgcccctgaaggctacctggcgccttgggggctgtccctcaagttatctcctctgytaagacaaaaagtaaagcactgtggtctttgcaaaaaaaaaaaaaaaaaaaaaaaaaaaaaaaaaaaaaaaaaaaaaaaaaaaaaaactcgag

SEQ ID NO: 650 - DNA, 1172 bp, Homo sapiens
  misc_feature (904)..(904): n equals a,t,g, or c
ggcgggccgaggactccagcgtgcccaggtctggcatcctgcacttgctgccctctgacacctgggaagatggccggcccgtggaccttcacccttctctgtggtttgctggcagccaccttgatccaagccaccctcagtcccactgcagttctcatcctcggcccaaaagtcatcaaagaaaagctgacacaggagctgaaggaccacaacgccaccagcatcctgcagcagctgccgctgctcagtgccatgcgggaaaagccagccggagcatccctgtgctgggcagcctggtgaacaccgtcctgaagcacrtcatctggctgaaggtcatcacagytaacatcctccagctgcaggtgaagccctcggccaatgamcaggagctgctagtcaagatccccctggacatggtggctggattcaacacgcccctggtcaagaccatcgtggagttccacatgacgactgaggcccaagccaccatccgcatggacaccagtgcaagtggccccacccgcctggtcctcagtgactgtgccaccagccatgggagcctgcgcatccaactgctgcataagctctccttcctggtgaacgccttagctaagcaggtcatgaacctcctagtgccatccatgccaaggtggcccaactgatcgtgctggaagtgtttccctccagtgaagccctccgccctttgttcaccctgggcatcgaagccagctcggaagctcagttttacaccaaaggtgaccaacttatactcaacttgaataacatcagctctgatcggatccagctgatgaactctgggattggctggttccaacctgatgttctgaaaaacatcatcactgaratcatccactccatcctgctgccgaaccagaatggcaanttaagactggggtcccagtgtcattggtgaaggccttgggattcgaggcagctgagtcctcactgaccaaggatgcccttgtgcttactccagcctccttgtggaaacccasctctcctgtctcccagtgaagacttggatggcagccatcagggaargctgggtcccagctgggartatgggtgtgagctctatagaccatccctctctgcaatcaataaacacttgcctgtgaaaaaaaaaaaaaaaaaaaaaaaaaaaaaaaaaa

SEQ ID NO: 651 - DNA, 526 bp, Homo sapiens
  misc_feature (283)..(283): n equals a,t,g, or c
ggggacgtgcacggggccgccctcctggccctgaagctgcgccggcctccctgagcgtttcgctgcggagggaagtccactctcggggagagatgctgatgccggtccacttcctgctgctcctgctgctgctcctggggggccccaggacaggcctcccccacaagttctacaaagccaagcccatcttcagctgcctcaacaccgccctgtctgaggctgagaagggccagtgggaggatgcatccctgctgagcaagaggagcttccactacctgcgcanaagsacgcctcttcgggagaggaggaggagggcaaagagaaaaagactttccccatctctggggccaggggtggarccagaggcacccggtacagatacgtgtcccaagcacagcccaggggaaagccacgccaggacacggccaagagtccccaccgcaccaagttcaccctgtccctcgacgtccccaccaacatcatgaacctcctcttcaacatcgccaaggccaagaactgcgtgccc

SEQ ID NO: 652 - DNA, 1566 bp, Homo sapiens
cgcgtccggcgcccggcagctgtccaccgatcccggccaccgcccccggccacccccaccccgcgagcccatggaggctccgggaccccgcgccttgcggactgcgctctgtggcggctgttgctgcctcctcctatgtgcccagctggctgtggctggtaaaggagctcgaggctttgggaggggagccctgatccgcctgaatatctggccggcggtccaaggggcctgcaaacagctggaggtctgtgagcactgcgtggagggagacagagcgcgcaatctctccagctgcatgtgggagcagtgccggccagaggagccaggacactgtgtggcccaatctgaggtggtcaaggaaggttgctccatctacaaccgctcagaggcatgtccagctgctcaccaccaccccacctatgaaccgaagacagtcacaacagggagccccccagtccctgaggcccacagccctggatttgacggggccagctttatcggaggtgtcgtgctggtgttgagcctacaggcggtggctttctttgtgctgcacttcctcaaggccaaggacagcacctaccagacgctgtgagtacctggccagcagcaagtacctgagtcccagctcacctcctggttcctgccccaccgttccccttcagtacccagggtgctgtcttctccatgggcaagccctcaggacggtgacagcgtgctccatgtgagccacaccccttttgtctcctccagttggggtgtttcctttgtcagatgttggctgggaccaggactcagcctgggccagtctaggagcccagctgagccctcctgtgtcttttcccttcatgctgccagcagggaagagaaccagtaggtgccagcccaggcaagcctgtggcccgcgtttctgtggctgtgggcaggagctgggccttgtgtctagttgggttttgctctgagaaggggagctgtgcctgaggccctctgtgtgccgtgtgtgctgtggggcgggtcgccacagcctgtgttaaagtgtttgctcttcctctgctgcctcctctcgaggcagggggtccttggctggctgaggcagtgtcaccttcctgagtgtcctctttggcctctgcagaatctgacccctttgggcctggactccatcctgagggcaaaggaggatgcagagggtggcctctgggcacccttgtgggtaagcggggggcgggggcgggaaaaactctggccgccagtttttggctcctgcgggcaccaagcaggctcagtgtctgatgcctgacatctcctcctgtcctgggcctggaacctgcagctgagaaaatccctcaaccacctcgtctcctccatcgcccctgctgggccccccagcctgacagtgggttgtatgcctgcctctttccaccaactggcctgggcactgcccccaaataaaggaactctgcactgcaaaaaaaaaaaaaaaaaaaaaaaaaaaaaaaaaaaaaaaaaaaaaaaaaaaaaaaaaaaaaaaaaaaaaaaaaaaaaaaaaaaaaaaaaaaaaaaaaaaaaaaa

SEQ ID NO: 653 - DNA, 1067 bp, Homo sapiens
taccggtccggaattcccgggtcgacccacgcgtccggcgcccggcagctgtccaccgatcccggccaccgyccccggccacccccaccccgcgagcccatggaggctccgggaccccgcgccttgcggactgcgctctgtggcggctgttgctgcctcctcctatgtgcccagctggctgtggctggtaaaggagctcgaggctttgggaggggagccctgatccgcctgaatatctggccggcggtccaaggggcctgcaaacagctggaggtctgtgagcactgcgtggagggagacagagcgcgcaatctctccagctgcatgtgggagcagtgccggccagaggagccaggacactgtgtggcccaatctgaggtggtcaaggaaggttgctccatctacaaccgctcagaggcatgtccagctgctcaccaccaccccacctatgaaccgaagacagtcacaacagggagccccccagtccctgaggcccacagccctggatttgackgggccagctttatcggaggtgtcgtgctggtgttgagcctacaggcggtggctttctttgtgctgacttcctcaaggccaaggacagcacctaccagacgctgtgagtacctggccagcagcaagtacctgagtcccagctcacytctggttcctgcccacgttcccttcagtacccagggtgctgtcttctccactggcaagccctcaggacggtgacagcgtgctycatgtgagccacaccccttttgtctyctccagttggggtgtttcctttgtcagatgttggctgggaccaggactcagcctgggccagtctaggagcccagctgagccctcctgtgtcttttcccttcatgctgccagcagggaagagaaccagtaggtgccagcccagcaacctgtggcccgcgtttctgtggctgtgggcaggagctgggccttgtgtctagttgggttttgctctgagaaggggagctgtgctgaggccctctgtgtgccgtgtgtgctgtggggcgggtcgccacagcctgtgttaaagtgtttgctcttcc

SEQ ID NO: 654 - DNA, 1021 bp, Homo sapiens
ggcacgaggattctaggacagggatgggggtgcagcactgatccaggacccagaatggaggcatcatggagggtccccggggatggctggtgctctgtgtgctggccatatcgctggcctctatggtgaccgaggacttgtgccgagcaccagacgggaagaaaggggaggcaggaagacctggcagacgggggcggccaggcctcaagggggagcaaggggagccgggggcccctggcatccggacaggcatccaaggccttaaaggagaccagggggaacctgggccctctggaaaccccggcaaggtgggctacccagggcccagcggcccccttcggagcccgtggcatcccgggaattaaaggcaccaagggcagcccaggaaacatcaaggaccagccgaggccagccttctccgccattcggcggaaccccccaatggggggcaacgtggtcatcttcgacacggtcatcaccaaccaggaagaaccgtaccagaaccactccggccgattcgtctgcactgtacccggctactactacttcaccttccaggtgctgtcccagtgggaaatctgcctgtccatcgtctcctcctcaaggggccaggtccgacgctccctgggcttctgtgacaccaccaacaaggggctcttccaggtggtgtcagggggcatggtgcttcagctgcagcagggtgaccaggtctgggttgaaaaagaccccaaaaagggtcacatttaccagggctctgaggccgacagcgtcttcagcggcttcctcatcttcccatctgcctgagccagggaaggaccccctcccccacccacctctctggcttccatgctccgcctgtaaaatgggggcgctattgcttcagctgctgaagggagggggctggctctgagagccccaggactggctgccccgtgacacatgctctaagaagctcgtttcttagacctcttcctggaataaacatctgtgtctgtgtctgctgaaaaaaaaaaaaaaaaaa

SEQ ID NO: 655 - DNA, 1086 bp, Homo sapiens
ggattctaggacagggatgggggtgcagcactgatccagttgacaacaggaggcagaggcatcatggagggtccccggggatggctggtgctctgtgtgctggccatatcgctggcctctatggtgaccgaggacttgtgccgagcaccagacgggaagaaaggggaggcaggaagacctggcagacgggggcggccaggcctcaagggggagcaaggggagccgggggcccctggcatccggacaggcatccaaggccttaaaggagaccagggggaacctgggccctctggaaaccccggcaaggtgggctacccagggcccagcggccccctcggagcccgtggcatcccgggaattaaaggcaccaagggcagcccaggaaacatcaaggaccagccgaggccagccttctccgccattcggcggaaccccccaatggggggcaacgtggtcatcttcgacacggtcatcaccaaccaggaagaaccgtaccagaaccactccggccgattcgtctgcactgtacccggctactactacttcaccttccaggtgctgtcccagtgggaaatctgcctgtccatcgtctcctcctcaaggggccaggtccgacgctccctgggcttctgtgacaccaccaacaaggggctcttccaggtggtgtcagggggcatggtgcttcagctgcagcagggtgaccaggtctgggttgaaaaagaccccaaaaagggtcacatttaccagggctctgaggccgacagcgtcttcagcggcttcctcatcttcccatctgcctgagccagggaaggaccccctcccccacccacctctctggcttccatgctccgcctgtaaaatgggggcgctattgcttcagctgctgaagggagggggctggctctgagagccccaggactggctgccccgtgacacatgctctaagaagctcgtttcttagacctcttcctggaataaacatctgtgtctgtgtctgctgaaaaaaaaaaaaaaaaaaaaaaaaaaaaaaaaaaaaaaaaaaaaaactcgagggggggcccggtacccaattcgccgtataatgag

SEQ ID NO: 656 - DNA, 1352 bp, Homo sapiens
gcgtccgcttcacagtttcaccttcaggctcaaagctggctctgcaggggacatgagaggcacaccgaagacccacctcctggccttctccctcctctgcctcctctcaaaggtgcgtacccagctgtgcccgacaccatgtacctgcccctggccacctccccgatgcccgctgggagtacccctggtgctggatggctgtggctgctgccgggtatgtgcacggcggctgggggagccctgcgaccaactccacgtctgcgacgccagccagggcctggtctgccagcccggggcaggacccggtggacggggggccctgtgcctcttggcagaggacgacagcagctgtgaggtgaacggccgcctgtatcgggaaggggagaccttccagccccactgcagcatccgctgccgctgcgaggacggcggcttcacctgcgtgccgctgtgcagcgaggatgtgcggctgcccagctgggactgcccccaccccaggagggtcgaggtcctgggcaagtgctgccctgagtgggtgtgcggccaaggagggggactggggacccagccccttccagcccaaggaccccagttttctggccttgtctcttccctgccccctggtgtcccctgcccagaatggagcacggcctggggaccctgctcgaccacctgtgggctgggcatggccacccgggtgtccaaccagaaccgcttctgccgactggagacccagcgccgcctgtgcctgtccaggccctgcccaccctccaggggtcgcagtccacaaaacagtgccttctagagccgggctgggaatggggacacggtgtccaccatccccagctggtggccctgtgcctgggccctgggctgatggaagatggtccgtgcccaggcccttggctgcaggcaacactttagcttgggtccaccatgcagaacaccaatattaacacgctgcctggtctgtctggatcccgaggtatggcagaggtgcaagacctagtcctctttcctctaactcactgcctaggaggctggccaaggtgtccagggtcctctagcccactccctgcctacacacacagcctatatcaaacatgcacacgggcgagctttctctccgacttcccctgggcaagagatgggacaagcagtcccttaatattgaggctgcagcaggtgctgggctggactggccatttttctgggggtaggatgaagagaaggcacacagagattctggatctcctgctgccttttctggagtttgtaaaattgttcctgaatacaagcctatgcgtgaaaaaaaaaaaaaaaaaaaaaaaaaaaaaaaaaaaaaaaaaaaa

SEQ ID NO: 657 - DNA, 1337 bp, Homo sapiens
  misc_feature (1337)..(1337): n equals a,t,g, or c
gcttcacagtttcaccttcaggctcaaarctggstctgcaggggacatgagaggcacaccgaagacccacctcctggccttctccctcctctgcctcctctcaaaggtgcgtacccagctgtgcccgacaccatgtacctgcccctggccacctccccgatgcccgctgggagtacccctggtgctggatggctgtggctgctgccgggtatgtgcacggcggctgggggagccctgcgaccaactccacgtctgcgacgccagccagggcctggtctgccagcccggggcaggacccggtggmcggggggccctgtgcctcttggcagaggacgacagcagctgtgaggtgaacggccgcctgtatcgggaaggggagaccttccagccccactgcagcatccgctgccgctgcgaggacggcggcttcacctgcgtgccgctgtgcagcgaggatgtgcggctgcccagctgggactgcccccaccccaggagggtcgaggtcctgggcaagtgctgccctgagtgggtgtgcggccaaggagggggactggggacccagccccttccagcccaaggaccccagttttctggccttgtctcttccctgccccctggtgtcccctgcccagaatggagcacggcctggggaccctgctcgaccacctgtgggctgggcatggccacccgggtgtccaaccagaaccgcttctgccgactggagacccagcgccgcctgtgcctgtccaggccctgcccaccctccaggggtcgcagtccacaaaacagtgccttctagagccgggctgggaatggggacacggtgtccaccatccccagctggtggccctgtgcctgggccctgggctgatggaagatggtccgtgcccaggcccttggctgcaggcaacactttagcttgggtccaccatgcagaacaccaatattaacacgctgcctggtctgtctggatcccgaggtatggcagaggtgcaagacctagtccyctttcctctaactcactgcctaggaggctggccaaggtgtccagggtcctctagcccactccctgcctacacacacagcctatatcaaacatgcacacgggcgagctttctctccgacttcccctgggcaagagatgggacaagcagtcccttaatattgaggctgcagcaggtgctgggctggactggccatttttctgggggtaggatgaagagaaggcacacagagattctggatctcctgctgccttttctggagtttgtaaaattgttcctgaatacaagcctatgcgtgaaaaaaaaaaaaaaaaaaaaaaaaaaaaaaaaaan

SEQ ID NO: 658 - DNA, 2092 bp, Homo sapiens
  misc_feature (637)..(637): n equals a,t,g, or c
gaattcggcayggcgacctttgtgagcgagctggaggcggccaagaagaacttaagcgaggccctgggggacaacgtgaaacaatactgggctaacctaaagctgtggttcaagcagaagatcagcaaagaggagtttgaccttgaagctcatagacttctcacacaggataatgtccattctcacaatgatttcctcctggccattctcacgcgttgtcagattttggtttctacaccagatggtgctggatctttgccttggccagggggttccgcagcaaaacctgggaaaacccaagggaaagaaaaagctttcttctgttcgtcagaaatttgatcatagattccagcctcaaaatcctctctcaggagcccagcaatttgtggcaaaggatccccaagatgatgacgacttgaaactttgttcccacacaatgatgcttcccactcgaggccagcttgaagggagaatgatagtgactgcttatgagcatgggctggacaatgtcaccgaggaggctgtttcagctgttgtctatgctgtggagaatcaccttaaagatatactgacgtcagttgtgtcaagaaggaaagcttatcggttacgagatggtcattttaaatatgcctttggnagtaacgtgaccccgcagccatacctgaagaatagtgtagtagcttacaacaacttaatagaaagccctccagcttttactgctccctgtgctggtcagaatccagcttctcacccaccccctgatgatgctgagcagcaggctgcactcctgctggcatgctccggagacactctacctgcatctttgcctccggtgaacatgtacgatctttttgaagctttgcaggtgcacagggaagtcatccctacacatactgtctatgctcttaacattgaaaggatcatcacgaaactctggcatccaaatcatgaagagctgcagcaagacaaagttcaccgccagcgcttggcagccaaggaggggcttttgctgtgctaaattaggatttgagggtgtgggaccctcaccraattcattgattactgaaaattgaatgttttttgggtccacatttcaaggctgaagtgtgtagtgtatatataacctttcctatggaaatgtgacattgagtacattttgtgttgctgttgtgaagccattaatataaatctttggtaatgacccatatctctatatgtatgtgttcccagttgtgggagcaggcactaatgaaatcctgtgcctggaatggagatatttaggtacctgaggcttagtgtcctgtggtctgcatgtaagatagatgacatcctagaacaaagaagctgttttaacttaatccccctgatcagcaggatatctgtgtgttcagtgacatcatacattctgtatctagaagtctaaaatttctgcctttctcctaaagaatgtgttcttgcattttggttgaaataacctacacagtgttaaaaatcagatacctcctttagtgaccagttcaaattttaatagcgataggtagcccctgagaaatttatcactataactccacaggaaatatgacttggaagtgctctgtgtactaaacaaaataaagcccctctttgcatttaaaaccaaagtcaaaacaaaactcttgtaatgcaattaattaacttyatgtcttcccatgactcaagttttgttaaatatgcccaaaaactttgattggcagtttcttcggttaattattcctatagaatgtattttaagaaatctatacaaattggatatatgcttggtaattctccagtttctaggaggtacctatttctaccgtttcaagtgatgaagtgaaaataatttacattcgatagtgttactgataacaaacctacttaagagatatgttgctttttacttaagggatagtgttgatagataaattagaatgtatagataggtttgtgaaagtctaaataatggctgtatagatatgtatatatggttcacayatctggatctgtgtatttgattttgtactttaaatgtgacaaataaaccttttgggagaaaaaaaaaaaaaaaaaactc

SEQ ID NO: 659 - DNA, 2494 bp, Homo sapiens
  misc_feature (920)..(920): n equals a,t,g, or c
ggagatgtttaaggattacccgccagccataaaaccatcctacgatgtgctgctgctgctgctgctgctagtsytcctsctgcaggccggcctcaacacgggcaccgccatccagtgygtgcgcttcaaggtcagtgcaaggctgcagggtgcatcctgggacacccagaacggcccgcaggagcgcctggctggggaggtggccaggagccccctgaaggagttcracaaggagaaagcctggagagccgtcgtggtgcaaatggcccagtgacccccagacgcggaaaccgggtggcagckcccagcctggccccaagcatggaaacgcacaacccctaatcgccctgagctactgcttctaacacctcttttcccttgtgtgagggcaaaccaggctgcaggtggggttttcacttcctagggtagtttaattttaaaataggccaatgttggctagtctgtgcctcagtgagatcagtcagctccgagtggctcccgtgtcgtaacagcaggagcatggccgcaacttcccaggccgaggaagggcccccggctcggcctcttgagagccccacccctgaactggccccagctcctcttcctgcctctctcatggcttgggctggagtgggctctctggacctgaccagactgtgggtccctgcgtctcctgcccactctgaccgggcttcctccctccacgcttagggtctgtcccgggtactcagtcagcccagtgggatcttacccacttccctgcaaggtgcacctgccccaggctcaggctgcccagcggctcttcctggacagtgagagcagggctgggcgcctctgtcctggcccgggagccgcaggggcccctcctccagagcctgggcgcaagcgacacaggctgccgctgctctccaggtgaaatncacaccagtccacgccgggtcgcctgccctgtctccctacttagacccagtcattctagagggatccamcgccamactggccggcccacgtcctgggtgctgtcatgcccagcttggagtgccacgtggccgctgcccacgtcccgggcactgtcatgcccagcttggagtgccacatggccgctgcccacgtcccgggcactgtcatgcccagcttggagtgccacgtggccgctgctgtgacaggcagtgttcttgggggtggggctgcatccaaggctttgtaaaccggctggaccacgtctccctggccccagtgaccgggggaagctgagcccctccctcctgtgtttgctcccattactcaaaatgcaggacagatcaggtcagagcccaggaattctcacaggttcacccagcgccctctacctcctagcaagtactttgtcttgatcctcactgagaaggccccagggcagtggtcttctccatctccgctgttttggggtcttagggtacagcccaggcggtcactgcccacctgccaggctgcagggacagttgggtgtgagaataacactggctttgggtagtgccatggccaggagtgggtttccctgcgtctcctcgtcccgagggcgcctgggtcctcccagctgacggcagtaaatccacagtgagttggggcgactgtgaaactggaatgctgttactttgataattactttccagcaggtgttttccttcacaatggttttgtttctttccttctgatctgagaagacatgaacgttttctcttcaccgccgtggggtgtattgactggtcccccatgggctgctggaaaggcccggagatgcatctgtggcctggggccatcaagatcaaagaaccaggaggcctgggagatgcagctggatggggcggcctgcagaccctgccagggggtttgaggaccctcccaggtttcccactgcggaacaggagtgactctggctgccaagataccttcatggtgttcatgacaagtggaatcattattttcaaccattgaagggggatgcaggcaagacaccttcccagctgctcctagaggggacaagccaggccctctctgcagtcctcggcagctccggaaggacacagtcaggggccgggcaaacactttggccacagccccaaacaagcgccaccgtgggagaggagaggctgctgtcactggtaccggatgcagaccccaccctgtctgcaggccacccccacctccctgcagctttgaggctggcggggtctgctcctgggaatggggtgggagccacagggacgacccggggcgggctgatgtcttcttgggggcagaccagagagctcaagtttcagagtcagaattaggcacttggagcgtttttgctggcttgcactttcttattttcttattttagagcgcttaaaaaatccggaaaaatggggtttaaaagaactgtctctttcagtctacatttttgtttaatacgcttgagcaataaacgctgacttgcagacgtgaaaaaaaaaaaaaaaaaaaaaaaactcga

SEQ ID NO: 660 - DNA, 1957 bp, Homo sapiens
cctagctgtccccctgagatgaagaaagagctccctgttgacagctgcctgccccgctcactcgagcttcaccctcagaagatggatcccaagagacagcacattcagctcctgagcagcctgactgagtgcctgacggtggaccccctcagtgccagcgtctggaggcagctgtaccctaagcacctgtcacagtccagccttctgctggagcacttgctcagctcctgggagcagattcccaagaaggtacagaagtctttgcaagaaaccattcagtccctcaagcttaccaaccaggagctgctgaggaagggtagcagtaacaaccaggatgtcgtcacctgtgacatggcctgcaagggcctgttgcagcaggttcagggtcctcggctgccctggacgcggctcctcctgttgctgctggtcttcgctgtaggcttcctgtgccatgacctccggtcacacagctccttccaggcctcccttactggccggttgcttcgatcatctggcttcttacctgctagccaacaagcgtgtgccaagctctactcctacagtctgcaaggctacagctggctgggggagacactgccgctctggggctcccacctgctcaccgtggtgcggcccagcttgcagctggcctgggctcacaccaatgccacagtcagcttcctttctgcccactgtgcctctcaccttgcgtggtttggtgacagtctcaccagtctctctcagaggctacagatccagctccccgattccgtgaatcagctactccgctatctgagagagctgcccctgcttttccaccagaatgtgctgctgccactgtggcacctcttgcttgaggccctggcctgggcccaggagcactgccatgaggcatgcagaggtgaggtgacctgggactgcatgaagacacagctcagtgaggctgtccactggacctggctttgcctacaggacattacagtggctttcttggactgggcacttgccctgatatcccagcagtaggccctgccttcctggccactgatttctgcatgggtagaccatccaagactgcagcgggtagaaggtggcagttcttcatgggagtctttttaacttggtgcctgagttctctcctaggcaagtggccagttgcctccacctcagttcttccatctttggtggggacagggcccagcagcatctcagcctcctacccacaattccactgaacacttttctggccctactgcacatggcccccagcctccatccttgtgctggtagcctctcacaactccgcccttgccctctgccttccacttccttccatctcatttctaaaccccaaacagctcatctctaaaaagatagaactcccagcaggtggcttctgtgttcttctgacaaatgattcctgcttctccagactttagcagcctcctgttcccattcttggtcacagctctagccacagcagaaggaaaggggcttccagaagaatatagcaccgcattgggaaacagcagcctcacctccacctgaagcctgggtgtggctgtcagtggacatggggagctggatggaaatgcctctcacttcaaaatgcccagcctgccccaaatgcctctaagcccctccctgtcccctcccttgtagtcctacttcttccaactttccattccccatcatgctgggggtcttggtcacaaggctcagcttctctccactgtccatccctcctatcatctgtagagcagagcacaggcagttgtgtgccttgggcccagggaaccctccatcaacctgagacaggactcagtatatggttcttgggtatgccctaccaggtggaataaaggacacagatttgatttctaaaaaaaaaaaaaaaaaaaaaaaaaaaaaaaaaaaaaaaaaaaaaaaaaaaaaaaaaaaaaaaaaaaaaaaaaaa

SEQ ID NO: 661 - DNA, 730 bp, Homo sapiens
gtgggaccatcttcctgtggatcttctggcctagcttcaatgctgcactcacagcgctgggggctgggcagcatcggacggccctcaacacatactactccctggctgccagcacccttggcacctttgccttgtcagcccttgtaggggaagatgggaggcttgacatggtccacatccaaaatgcagcgctggctggaggggttgtggtggggacctcaagtgaaatgatgctgacaccctttggggctctggcagctggcttcttggctgggactgtctccacgctggggtacaagttcttcacgcccatccttgaatcaaaattcaaagtccaagacacatgtggagtccacaacctccatgggatgccgggggtcctgggggccctcctgggggtccttgtggctggacttgccacccatgaagcttacggagatggcctggagagtgtgtttccactcatagccgagggccagcgcatgccacgtcacaggccatgcaccagctcttcgggctgtttgtcacactgatgtttgcctctgtgggcgggggccttggaggcatcatattggtcttatgacctcctagacccctgtgccctgtggcatgggtggcamcctcctccatggtggggggcagagaagcctcacagatcctcccctaccaccaccagggctcctgctgaagctaccctttctggactccccccccagactcccagcactac

SEQ ID NO: 662 - DNA, 550 bp, Homo sapiens
  misc_feature (76)..(76): n equals a,t,g, or c
cagacttcccagcactacgaggaccaagttcactggcaggtgcctggcgagcatgaggataaagcccagagacctntgagggtggaggaggcagacactcaggcctaacccaytgccagcccctgagrggacacgctccttttcgaagatgctgactggctgctactaggaagttctttttgagctcccattcctccagctgcaagaagggagccatgagccagaaggaggcccctttccacaggcagcgtctccacagggagaggggcaacaggaggctgggaaatggtggggagtggggccgtaactgggtacaatagggggaacctcaccagatgcccaacccgactgccctaccagcctgcacatgggtagaagaggccaaattgaggcacccaagtgatccactggccccacgtcacacagttacagtgaagcccaagccaggcctggttgagggtgataaacgccactgtctctaaaaaaaaaaaaaaaaaaaaaaaaaaactcgagggggggcccgtacccaatcgcctaagatgtatgctat

SEQ ID NO: 663 - DNA, 807 bp, Homo sapiens
cccacgcgtccggacgtcctgatagatcctctgctccaataggcaactccggccttccctgccctgacctggaacctctgggagggctgcagagtaagtgccgcctctgcgctccgacggaggcacgaggcctgtggagtaggtccctctgttccgacaggtgcgacacttggcgctccatgcttgcgggtgccgggaggcctggcctcccccagggccgccacctctgctggttgctctgtgctttcaccttaaagctctgccaagcagaggctcccgtgcaggaagagaagctgtcagcaagcacctcaaatttgccatgctggctggtggaagagtttgtggtagcagaagagtgctctccatgctctaatttccgggctaaaactacccctgagtgtggtcccacaggatatgtagagaaaatcacatgcagctcatctaagagaaatgagttcaaaagctgccggttcagctttgaatggaacaacgcttattttggaagttcgaaaggggctgtcgtgtgtgtggccctgatcttcgcttgtcttgtcatcattcgtcagcgacaattggacagaaaggctctggaaaaggtccggaagcaaatcgagtccatatagctacattccacccttgtatcctgggtcttagagaccctatctcagacagtgaaagtgaaatggactgatttgcactcttggttctttggagccttgtggtggaatccccttttccccatcttcttctttcagatcattaatgagcagaataaaaagagtaaaatggtaaaaaaaaaaaaaaaaa

SEQ ID NO: 664 - DNA, 946 bp, Homo sapiens
ggcacgagtgagattgcatccagacagagttttaaaagtttcccggttgagtttaatgtacagttgaagttgagacatgaatctctgcatgtaggggaaattttgtgtctggttagtcaagaaactatggaaaccaattcttgatattttgaaccattcacgaagatagtttgagtcatgagcatgctgttgtctagagtgggcggggatgactcattggagtggatgcgctgctctgtacttgatttttttgagtctgaaattagctttccaggctggggcagggaggggagcacaggtgggatcagtactgcccccaagcggtggagctgtggtggtggatcaatactgctgccgcctgtctgcacaaacatatttctctcttccagcccttcagaagtgtattggaatatgtcgataacaataatgatggtagtgaagatgatgatgatgtgggtaattctggctaccttattgggtccaagctccccacaattcgttgcacaaagcactctacatacattctctttagtcctgatcaaaccacctttcagagtaggatttagtgtcctattttaaagatgaaggagctcgggctcagagagagatcgtttagacacacacacaactttggaatgaaacatttacagccgggcgcggtggcgcgtgcctgtagtcccagctacttgggaggctgaggctggaggatcgcttgagtccaggagttctgggctgtagtgcgctatgccgatcgggtgtccgcactaagtttggcatcaatatggtgacctcccgggagtggaggaccaccaggttgcctaaggaggggtgaaccggtccaggtcggaatgaaacatttacaaaaattgacatttccttatgcatagatatttcactaggtccttaaaacccacgtgaatctgtgattaaaaaaaaaaaaaaaaaa

SEQ ID NO: 665 - DNA, 1145 bp, Homo sapiens
  misc_feature (9)..(9): n equals a,t,g, or c
  misc_feature (410)..(410): n equals a,t,g, or c
caggcagangggctgagtcacaggcacaggtgaggaactcaactcaaactcctctctctgggaaaacgcggtgcttgctcctcccggagtggccttggcagggtgttggagccctcggtctgccccgtccggtctctggggccaaggctgggtttccctcatgtatggcaagagctctactcgtgcggtgcttcttctccttggcatacagctcacagctctttggcctatagcagctgtggaaatttatacctcccgggtgctggaggctgttaatgggacagatgctcggttaaaatgcactttctccagctttgcccctgtgggtgatgctctaacagtgacctggaattttcgtcctctagacgggggacctgagcagtttgtattctactaccacatagatcccnttccaacccatgagtgggcggtttaaggaccgggtgtcttgggatgggaatcctgagcggtacgatgcctccatccttctctggaaactgcagttcgacgacaatgggacatacacctgccaggtgaagaacccacctgatgttgatggggtgataggggasatccggctcagcgtcgtgcacactgtacgcttctctgagatccacttcctggctctggccattggctctgcctgtgcactgatgatcataatagtaattgtagtggtcctcttccagcattaccggaaaaagcgatgggccgaaagagctcataaagtggtggagataaaatcaaaagaagaggaaaggctcaaccaagagaaaaaggtctctgtttatttagaagacacagactaacaattttagatggtaaggttcacaaataggttgatttctttcttcagctttctgacatgtccagcccatctctaatgaggactcccagatcatcactttatggctgttargtgtttcccatatgaaattagaggagctgggtcagggagacaaaagtcttctattagtcttatggatagctcctccttgagtgtattttgtgcaaaagattaagaagctggactctactgccattaaagctgagagaatcctaaggttatttgtggcttcggggttatatttattactactactactaataaatattcaacaagtaaataaatcttttttaaatca

SEQ ID NO: 666 - DNA, 869 bp, Homo sapiens
  misc_feature (765)..(765): n equals a,t,g, or c
  misc_feature (800)..(800): n equals a,t,g, or c
  misc_feature (847)..(847): n equals a,t,g, or c
ggacaagccatgtgccagacctagtcaacctgtctctcaatgacaacgatggctccagtggggcttcagaccaggataccctggctcctctgcctggggccaccccctggcccctgctgcccactttctcctaccagtaccctgccccacacccctacagcccgcagcctccaccctaccatgagctttcatcttacacctatggtgggggcagtgccagcagccagcatagtgagggcagccggagcagtgggtcgacacggagtgatgggggggcagggcgcacggggaggcccgaggagcgggcccccgagtccaagtccggcagtggcagtgagtctgagccctccagccgagggggcagccttcggcggggtggggaagcaagtgggactagcgatgggggccctcctccatccagaggctcaactgggggtgcccctaatctccgagcccacccagggctccatccctatggaccgccccctggcatggccctcccctacaaccccatgatggtggtcatgatgcccccacctccacctccagtccctccagcagtgcagcctccgggggcccctccagtcagagacctgggctctgtgcccccagaactgacagccagccgccaaagcttccacatggccatgggcaatcccagcgagttctttgtggatgttatgtagcccactgtggggccaggytgggccgggcgctcctggtgtgtgactgggtgtcctggccgtcatgtgcttgctcttacantgcctgggctcaagcctaccagctgctgcatacangagattgtgggccactgtgactcttcaccaagcatgcctggttcctnccccccttcccttcaaggggta

SEQ ID NO: 667 - DNA, 692 bp, Homo sapiens
cccactttctctgaccagtaccttgccccacacccctacagcccgcagcctccaccataccatgagcttccacatgsccatgggcaatcccagcgagttctttgtggatgttatgtagcccactgtggggccaggctgggccgggcgctcctggtgtgtgactgggtgtcctggccgtcatgtgcttgctcttacagtgcctgggctcagcctaccagctgctgccatacaggagattgtggccactgtgactctcaccagcagtgcctggttcctcccccttccctcaggggtagacaagggacctttgattatttttagctttgtttttttataagcctttttgggggttaaaatagagtttcttacatttttgggacttttttaataggcatttcctcttttatatgaagaattcccatccattgggccccttctaaccccagaatgtgacctcctcctccagttacccacagccctgccctttgcagggttgggggtggtcagcggtaccccggggttaggcatcctagacagcagcctgaggaagctgggagatttgggccatgtagctgcctttgttactctatttattttagtcacttgtataaaacaccaaataaagcaatagaggcaaactcaaaaaaaaaaaaaaaaaaaaaaaaaaaaaaaaaaaaaaaaaaaaaaaaaaa

SEQ ID NO: 668 - DNA, 3113 bp, Homo sapiens
gttattaatgaccgctgagcaggcagcaccatgtcagtgtgacaactgaatcgggtgaacgatgcaccactaaccaccatggaaacaaggaaaaataaagccagctcacaggatctctcttcactggattgagagcctcagcctgccgactgagaaaaagagttccaggaaaaagaaggaatcccggctgcagcctcctgccttcctttatattttaaaatagagagataagattgcgtgcatgtgtgcatatctatagtatatattttgtacactttgttacacagacacacaaatgcacctatttataccgggcaagaacacaaccatgtgattatctcaaccaaggaactgaggaatccagcacgcaaggacatcggaggtgggctagcactgaaactgcttttcaagcatcatgctgctattcctgcaaatactgaagaagcatgggatttaaatattttacttctaaataaatgaattactcaatctcctatgaccatctatacatactccaccttcaaaaagtacatcaatattatatcattaaggaaatagtaaccttctcttctccaatatgcatgacatttttggacaatgcaattgtggcactggcacttatttcagtgaagaaaaactttgtggttctatggcattcatcatttgacaaatgcaagcatcttccttatcaatcagctcctattgaacttactagcactgactgtggaatccttaagggcccattacatttctgaagaagaaagctaagatgaaggacatgccactccgaattcatgtgctacttggcctagctatcactacactagtacaagctgtagataaaaaagtggattgtccacggttatgtacgtgtgaaatcaggccttggtttacacccagatccatttatatggaagcatctacagtggattgtaatgatttaggtcttttaactttcccagccagattgccagctaacacacagattcttctcctacagactaacaatattgcaaaaattgaatactccacagactttccagtaaaccttactggcctggatttatctcaaaacaatttatcttcagtcaccaatattaatgtaaaaaagatgcctcagctcctttctgtgtacctagaggaaaacaaacttactgaactgcctgaaaaatgtctgtccgaactgagcaacttacaagaactctatattaatcacaacttgctttctacaatttcacctggagcctttattggcctacataatcttcttcgacttcatctcaattcaaatagattgcagatgatcaacagtaagtggtttgatgctcttccaaatctagagattctgatgattggggaaaatccaattatcagaatcaaagacatgaactttaagcctcttatcaatcttcgcagcctggttatagctggtataaacctcacagaaataccagataacgccttggttggactggaaaacttagaaagcatctctttttacgataacaggcttattaaagtaccccatgttgctcttcaaaaagttgtaaatctcaaatttttggatctaaataaaaatcctattaatagaatacgaaggggtgattttagcaatatgctacacttaaaagagttggggataaataatatgcctgagctgatttccatcgatagtcttgctgtggataacctgccagatttaagaaaaatagaagctactaacaaccctagattgtcttacattcaccccaatgcatttttcagactccccaagctggaatcactcatgctgaacagcaatgctctcagtgccctgtaccatggtaccattgagtctctgccaaacctcaaggaaatcagcatacacagtaaccccatcaggtgtgactgtgtcatccgttggatgaacatgaacaaaaccaacattcgattcatggagccagattcactgttttgcgtggacccacctgaattccaaggtcagaatgttcggcaagtgcatttcagggacatgatggaaatttgtctccctcttatagctcctgagagctttccttctaatctaaatgtagaagctgggagctatgtttcctttcactgtagagctactgcagaaccacagcctgaaatctactggataacaccttctggtcaaaaactcttgcctaataccctgacagacaagttctatgtccattctgagggaacactagatataaatggcgtaactcccaaagaagggggtttatatacttgtatagcaactaacctagttggcgctgacttgaagtctgttatgatcaaagtggatggatcttttccacaagataacaatggctctttgaatattaaaataagagatattcaggccaattcagttttggtgtcctggaaagcaagttctaaaattctcaaatctagtgttaaatggacagcctttgtcaagactgaaaattctcatgctgcgcaaagtgctcgaataccatctgatgtcaaggtatataatcttactcatctgaatccatcaactgagtataaaatttgtattgatattcccaccatctatcagaaaaacagaaaaaaatgtgtaaatgtcaccaccaaaggtttgcaccctgatcaaaaagagtatgaaaagaataataccacaacacttatggcctgtcttggaggccttctggggattattggtgtgatatgtcttatcagctgcctctctccagaaatgaactgtgatggtggacacagctatgtgaggaattacttacagaaaccaacctttgcattaggtgagctttatcctcctctgataaatctctgggaagcaggaaaagaaaaaagtacatcactgaaagtaaaagcaactgttataggtttaccaacaaatatgtcctaaaaaccaccaaggaaacctactccaaaaatgaacaaaaaaaaaaaaagcgaaagactgcagttgtgctaaaaacaaaacaaaacaaacaaacaaacaaaaaagtaaaaaaagattactttcgagagagaagtttaagcttcaccaatggctggctcctggaccaatgggaaatatgttacaactttcaggcattttttaagtgaactttttttttttt

SEQ ID NO: 669 - DNA, 980 bp, Homo sapiens
  misc_feature (1)..(1): n equals a,t,g, or c
  misc_feature (937)..(937): n equals a,t,g, or c
  misc_feature (956)..(956): n equals a,t,g, or c
ncgttcgccagctcgaaattaaccctcactaaagggaacaaaagctggagctcgcgcgcctgcaggtcgacactagtggatccaaagaattcggcacgaggggcgttccatcgaggcctttgatcgcagcatcgacctgctggtgtcgcgcctgcgccagaagctgggggatgaccccaaggctccgcaattgatcaagacggtacgcggcgaaggctacctgttcgacgcccgggatatcggttgatgcgcgcgcccttcaacacgctgttcgggcgactgttcggcctgttgctggtggcgattgtgctggcccatgtgctggcgttcttctggttccaccactacggcccgccgccaccaccccgcgcggccttcgtcgaacaaccagatggcagcctcacgcccttgcgcaaagcgcctcgcccctggttcggcggcccggtggtgcccctgacatttcaatttatctcgctgatcatcgctgcctggtacggcgccaaactgctgagccggccaatccagcgcctgagcgcagcggccgagcgcctgagcgtcgacctcgacagcccgcccctggtggaaaccggccctcgcgaagcacgccaagcggcctcgaccttcaacctgatgcaaaagcgcatccgcgaacaagtcagccagcgcgcacgcatgctcggcgcggtctcccacgacctgcgcaccccgctctcgcgcctcaagttgcgcctggaacaaatcgaagaccccaagctgcaaggccagatgcgccaggacctggacgacatgatcggcatgctcgatgccaccttgagctacctgcacgaacagcgcaccagcgagacacggcattggctcgatgtacaggcgttggtggaatccctgagtgaaaacgcccaggaccaaggccgcgacgtgcagtttttttttggggggnccccccccggggggggggncccaaaaacccccccccctttttt

SEQ ID NO: 670 - DNA, 888 bp, Homo sapiens
  misc_feature (845)..(845): n equals a,t,g, or c
  misc_feature (864)..(864): n equals a,t,g, or c
ggcacgaggggcgttccatcgaggcctttgatcgcagcatcgacctgctggtgtcgcgcctgcgccagaagctgggggatgaccccaaggctccgcaattgatcaagacggtacgcggcgaaggctacctgttcgacgcccgggatatcggttgatgcgcgcgcccttcaacacgctgttcgggcgactgttcggcctgttgctggtggcgattgtgctggcccatstgctggcgttcttctggttccaccactacggcccgccgccaccacycckygcgkccttcgtcgaacaaccagatggcagyctcacgcccttgcgcaaagcgcctcgcccctggttcggcggcccggtggtgcccctgacatttcaatttatctcgctgatcatcgctgcctggtacggcgccaaactgctgagccggccaatccagcgcctgagcgcagcggccgagcgcctgagcgtcgacctcgacagcccgcccctggtggaaaccggccctcgcgaagcacgccaagcggcctcgaccttcaacctgatgcaaaagcgcatccgcgaacaagtcagccagcgcgcacgcatgctcggcgcggtctcccacgacctgcgcaccccgctctcgcgcctcaagttgcgcctggaacaaatcgaagaccccaagctgcaaggccagatgcgccaggacctggacgacatgatcggcatgctcgatgccaccttgagctacctgcacgaacagcgcaccagcgagacacggcattggctcgatgtacaggcgttggtggaatccctgagtgaaaacgcccaggaccaaggccgcgacgtgcagtttttttttggggggnccccccccggggggggggncccaaaaacccccccccctttttt

SEQ ID NO: 671 - DNA, 1651 bp, Homo sapiens
  misc_feature (1648)..(1648): n equals a,t,g, or c
ggggacatgtctgggcacaaggaaaggcaagcaatggaggcagcaagagcccttggcagcaagtttccatcacctttgcctgccagtgtgtgagaggcgcagaggggcagtgagcaggtgacatgcagcttccagatacccacacactgcttttctcccgcccagctcccaccccagttaattgagatgggattgtttctctttctggtttcttcctaagcccctctctcatattcctggtgtgcttatggcctggcacaccttgtgaaacagaaacccaagctcctcatttcggagctgggatttcgattggctatctgcctccctaaccaagctgtcccttccacctcatccctagagtcaccctctggtctcatcaacatccagtgggcatttcagyggcccaggatccttcmaattgcagatataaagcatcaggaccccacacctgggatggaagcttctaggaattaatgaagccccagtagaggtgagggtaaacctaaaacgggctggatagggcctctcccaaggccctatggaaaggtgatgggaaactgggggctgaggcctcatcctaggagacccctggagggacccacttaccctagataggcagcggaggccagaaactggaaaacagccactcattgtcggtgcattaccgtgagcaccacctgtagggactctgttggcctccagccgtcgtcacacgttcctgacaaccacaaaagttcatttgagggtgcccagtcagctgactttgcttccaccaggaatacccacctggccctggtccttctgctgagctacaggaggcattcccagggtcttagcaaaaacaacccctcaaataggcccagtgcctacaactctagagaggtttcagatggtattggagacccagagaagttaactgactttcccaaaagtcacccactgtaaatggcagacagatctcaaacccacatctgakcctgagtccagtgttttttctctagtatcatcattgtcccttaaatgtgtttgacacatcatagtttacaaatcaccttcactcatattctctcactactcatcagtcatgaattcagccaatgagaagggctcagagaggttaactaaccagccacgctgtttacatggggcatagactgcttcatgaacgcttgactgcagctttgccttcctcatgccctcaaaaaggaaggagctgaccaaagcttactataccatagctggggtctgggacccccagccaggtctcacagatgatctgggaatggcctccctgttgctctcaggggtccggcagtcacacagaagagtcaggttgaaatcttggcaagactttggtgtggctttgggaactgggtttaacctcttggggacttcaccaagacagtggcaaaggacaccacctacagcttccagtgcctctctactctcccacctgtgctcctggggttgaatgagaccagaagcagctgggacaagatttggaaagataaagagagccaggagacaagaccttgagagaagcasaggtctggctggctgctgscctctggtggcgacaatgggtgacactgtaaacccctctgcaaggcgacactctcccctgactattcaggragggaagaagcanttg

SEQ ID NO: 672 - DNA, 1746 bp, Homo sapiens
gcgttcgcgcacctccagctcgggccgatgtggaagctttggagagctgaagagggcgcggcggcgctcggcggcgcgctcttcctgctgctcttcgcgctaggggtccgccagctgctgaagcagaggcggccgatgggcttccccccggggccgccggggctgccatttatcggcaacatctattccctggcagcctcatccgagcttccccatgtctacatgagaaagcagagccaggtgtacggagaggtacagccccgacgggccccgggcagggagggccgccaggctggcccgggctggccagggccttcctggttggacttatggccgcccctgggccgactagtcgggacctctccgtgtgccggctgccctttgagggacacccgcttcccgggtctggaagggagaagtcctcgacgccgtgcccccttgcagggggagccccgcccctgccggtgacccactccgggccgaggctccgaggcgatccagtcctgattttcccgctaccgctcgagctcttgctcctgcgcctgcgccgtttggctcgccagccgcgccgccacttcaggtccagggtggacgcatgccctcaggtgcgggcgtcttgcgagtcggcctcgcagctctgtggaagctgcacgcggcttgtcggaaaatcaaggcgttctgagttctagatggttaatagcaggttcttcggtgtctgcagtcgacgaacgactggtgtaggcgtttgctgtgagaatggagaatgcaggggaacgcccctgactgagaagcgggccctgggaaacgattgtgaacgcgtgaatgaattgatgactaaaatccgctgcgggggtcctacagcgcagatggtaatgccgttctgactggctgggaacggcaccttagcagatacttaaaaggcgccttctgtgtgccactgtcactgccaacttggtgactcatttaaaactcataaccagccggtgaggtcggtacttcgctcctcctcattctgcggaggggaaagcagcacggaaatgccctgtgactggcagcggaaaaggcgaccaccgcttgtgtgtgggtgtcccgacgtccggagggggcaggagtttccacgggtcctgggacagagctcacctgttttgttttgaattacacttatttatatgcaactacaggcctgacgctagcggtgaagaaggcagatacagccttttaaggagttggcagatgagtgggagagagaaaactaatctcattatcggccacaggctgtggtcagtgttttgaaggaaaagtacagggatgtttggcaactgtggtatttcaggtttgaccttaaatccttacttaaaccagtttttacaaggattggtctaggtgcccgggcgcggtgctcacgcctataatcccagcactttgggaggccgaggcgggcggatcacgaaatcaggagatcgagaccgtcgtggctaacacggtgaaaccccatctctactaaaagaatacaaaaaattggccgggcgtggtggcgggcacctgtggtcccagctattcgggaggctggggcaggagagtggcgtgaacccgggaggcggagctttcagtgagccgagatcgcgccactgcactccagcctgggcaacagagccagactccgtctcaaaaaaaaaaaaaaaaaagggcggccgctctagaggatccaagcttacgtacgcgtgcatgcgacgtcaatagctcttc

SEQ ID NO: 673 - DNA, 2492 bp, Homo sapiens
ccacgcgtccggaggaaggatgatgatgaaggaccgtacacaccattcgacaccccctcgggtaaactggaaacagtgaaatgggcgttcacctggccgctgagtttcgtcttatacttcactgtacccaactgcaacaagccgcgctgggagaaatggttcatggtgacgtttgcttcctccacgctgtggatcgcagccttctcctacatgatggtgtggatggtcacaatcattggttacaccctggggattcctgacgtcatcatgggggatcaccttcctggctgctgggaccagcgtgcctgactgcatggccagcctcattgtggccagacaagggatgggggacatggctgtgtccaactccattgggagcaacgtgtttgacatcctgattggcctcggtctcccctgggctctgcagaccctggctgtggattacggatcctacatccggctgaatagcagggggctgatctactccgtaggcttgctcctggcctctgtttttgtcacggtgttcggcgtccacctgaacaagtggcagctggacaagaagctgggctgtgggtgcctcctcctgtatggtgtgttcctgtgcttctccatcatgactgagttcaacgtgttcacctttgtgaacctgcccatgtgcggggaccactgagccgccgggtgcccacagaagctcagctccttcttttctgtgcaatacgagacccggccgcaccccgagtcacacaggcccctggggccacggcgttcgtctctcctgtgctgtcctcaggcctccgctcctgttttggtggcccaggctctcccctgccccatcctcgctcccccacctccttgggtcatgcccacccaccctttcctgcctcctccgtgtgaagacatccaacatccacgtgacttttccagctccatttttgaacagtgactgagattctagaaaaactggctgctaactggcctgagccaggcaacactgattccaatccctcctccttttttaagttatttgatggaagactcacctaatttgtgacctgagactgttgaagaaatagagaggagggggcccgttgattacagagagcatttgggattttgtttggtttggagatgatgcctaggttactgggtttggggggattgttttcttttgggggccttccccttttactccttttcttccagagatcaagagcttctcttgcatcttcttccactgggctctggattaatcaattacccaaaggctgcacctgccgtgttgtctgggcttgcatcccagatgtgttggagtatgcatggatgtagtgctttttagaggagccactgggcaaggccaccaagaacaaatgcatgacattttatagccaaggacgcctcactaaagtcttatgggcgtcccctggggttgggggggcacaaggttttggaggaagaagacaacttccctcattccatcatcaccatctctttctcactaggttctttctagttttcaaagcaataagtctagcctgccttggacaagggggcccccagttaaacaaactacccatccatgaggtgccaggcagtcaaaaaacagaagcttccccgattgtgagtccatgagatgtgctcttgttgtaaggcatttggggtgacagggagtgacccagaggccaccactgcttttcatgcaggagttacagacactggttttcttggaaaatggagagaagcgcactttgcacagacgtcgtcaattaagtcccaatttgccacttggtattgagtacactggaccctgaccactggcttttgggcaaacgtcttcctcacggggcgcttccgccaagccggcccagctgcacccctcccttcctggagggatggccagggaaggagaaaacagagaactgacacttttgaaaccacagaatgtgtaacatgcagatcgctcaagggcataagttattgtgaacgtttttgccaatcactgctcaacagccctgctagattttgtatgatgctgaattattatgcagactaattccacccagttgagacacaccatgcttgttcacttgtatttattgaaactgtggattcttgcccgtgctgtcccttgtatttactttaagcactgatcacttatcattcattcggtatggttttccctgtcccttgtacacattctggtatgaatttgtaaaaataccctactacaaattggttgaatgtttctgtctgtggtgcgaaccagcattaacggatggggcacgtgcccaactgaggaacaggagaagaaatccccaatttgggctctcagagctaagacacacttattgattctgttgcacattttgcactggtttatggcgattgttttcttggacggatagtgtaaaataaacttctctgttctctaaaaaaaaaaaaaaaaaaaaaaaaaaaaaaaaaaaaaaaaaaaaaaaaaaaaaaaaaaaaaaaaa

SEQ ID NO: 674 - DNA, 1579 bp, Homo sapiens
  misc_feature (1529)..(1529): n equals a,t,g, or c
  misc_feature (1556)..(1556): n equals a,t,g, or c
  misc_feature (1569)..(1569): n equals a,t,g, or c
ggcagagggaacccacgcggaggaaggaagagacgcaggcaggctgcggttacccaagcggccacccgggcctcagggaccccttccccgagagacggcaccatgacccagggaaagctctccgtggctaacaaggcccctgggaccgaggggcagcagcaggtgcatggcgagaagaaggaggctccagcagtgccctcagccccaccctcctatgaggaagccacctctggggaggggatgaaggcaggggccttccccccagcccccacagcggtgcctctccaccctagctgggcctatgtggaccccagcagcagctccagctatgacaacggtttccccaccggagaccatgagctcttcaccactttcagctgggatgaccagaaagttcgtcgagtctttgtcagaaaggtctacaccatcctgctgattcagctgctggtgaccttggctgtcgtggctctctttactttctgtgaccctgtcaaggactatgtccaggccaacccaggctggtactgggcatcctatgctgtgttctttgcaacctacctgaccctggcttgctgttctggacccaggaggcatttcccctgggaacctgattctcctgaccgtctttaccctgtccatggcctacctcactgggatgctgtccagctactacaacaccacctccgtgctgctgtgcctgggcatcacggcccttgtctgcctctcagtcaccgtcttcagcttccagaccaagttcgacttcacctcctgccagggcgtgctcttcgtgcttctcatgactcttttcttcagcggactcatcctggccatcctcctacccttccaatatgtgccctggctccatgcagtttatgcagcactgggagcgggtgtatttacattgttcctggcacttgacacccagttgctgatgggtaaccgacgccactcgctgagccctgaggagtatatttttggagccctcaacatttacctagacatcatctatatcttcaccttcttcctgcagctttttggcactaaccgagaatgaggagccctccctgccccaccgtcctccagagaatgcgcccctcctggttccctgtccctcccctgcgctcctgcgagaccagatataaaactagctgccaacccagcctgtggccaggtcactgtctaccccagcccagcccagccctctgccgcttgtacatacgccatggggaccctgaggaactgaggccacgtcaatccctgtgccgccccattcgcccgttacatcttccaaactgggacggtcaaggctgaaggctcctctgggtttgagggtccaagggacaaggaggagaagcctagcaggatttcagatgcaggagagagacccaggaagcccggcagagcctgagccccaytgcaattyctyctagggstgcacawtcatgtggcyttagggcamaytgtyctgcatccagtctgtgtyctyctgtctttctcatccaggtcaggcattgacatttgtaagaaanggggtaagggacacagctgggcaagtngattggttggcangattgctgtc

SEQ ID NO: 675 - DNA, 587 bp, Homo sapiens
cccacgcgtccgcctggaacctgattctcctgaccgtctttaccctgtccatggcctacctcactgggatgctgtccagctactacaacaccacctccgtgctgctgtgcctgggcatcacggcccttgtctgcctctcagtcaccgtcttcagcttccagaccaagttcgacttcacctcctgccagggcgtgctcttcgtgcttctcatgactcttttcttcagcggactcatcctggccatcctcctacccttccaatatgtgccctggctccatgcagtttatgcagcactgggagcgggtgtatttacattgttcctggcacttgacacccagttgctgatgggtaaccgacgccactcgctgagccctgaggagtatatttttggagccctcaacatttacctagacatcatctatatcttcaccttcttcctgcagctttttggcactaaccgagaatgaggagccctccctgccccaccgtcctccagagaatgcgcccctcctggttccctgtccctcccctgcgctcctgcgagaccagatataaaactagctgccaacccaaaaaaaaaaaaaaaa

SEQ ID NO: 676 - DNA, 2242 bp, Homo sapiens
tcgacccacgcgtccgggctgccatggcggcggcgggccggctcccgagctcctgggccctcttctcgccgctcctcgcagggcttgcactactgggagtcgggccggtcccagcgcgggcgctgcacaacgtcacggccgagctctttggggccgaggcctggggcacccttgcggctttcggggacctcaactccgacaagcagacggatctcttcgtgctgcgggaaagaaatgacttaatcgtctttttggcagaccagaatgcaccctattttaaacccaaagtaaaggtatctttcaagaatcacagtgcattgataacaagtgtagtccctggggattatgatggagattctcaaatggatgtccttctgacatatcttcccaaaaattatgccaagagtgaattaggagctgttatcttctggggacaaaatcaaacattagatcctaacaatatgaccatactcaataggacttttcaagatgagccactaattatggatttcaatggtgatctaattcctgatatttttggtatcacaaatgaatccaaccagccacagatactattaggagggaatttatcatggcatccagcattgaccactacaagtaaaatgcgaattccacattctcatgcatttattgatctgactgaagattttacagcagatttattcctgacgacattgaatgccaccactagtaccttccagtttgaaatatgggaaaatttggatggaaacttytstgwmagtacymtattggaaaaacctcaaaatatgatggtggttggacagtcagcatttgcagactttgatggagatggacacatggatcatttactgccaggctgtgaagataaaaattgccaaaagagtaccatctacttagtgagatctgggatgaagcagtgggttccagtcctacaagatttcagcaataagggcacactctggggctttgtgccatttgtggatgaacagcaaccaactgaaataccaattccaattacccttcatattggagactacaatatggatggctatccagacgctctggtcatactaaagaacacatctggaagcaaccagcaggcctttttactggagaacgtcccttgtaataatgcaagctgtgaagaggcgcgtcgaatgtttaaagtctactgggagctgacagacctaaatcaaattaaggatgccatggttgccaccttctttgacatttacgaagatggaatcttggacattgtagtgctaagtaaaggatatacaaagaatgattttgccattcatacactaaaaaataactttgaagcagatgcttattttgttaaagttattgttcttagtggtctgtgttctaatgactgtcctcgtaagataacaccctttggagtgaatcaacctggaccttatatcatgtatacaactgtagatgcaaatgggtatctgaaaaatggatcagctggccaactcagccaatccgcacatttagctctccaactaccatacaacgtgcttggtttaggtcggagcgcaaattttcttgaccatctctacgttggtattccccgtccatctggagaaaaatctatacgaaaacaagagtggactgcaatcattccaaattcccagctaattgtcattccataccctcacaatgtccctcgaagttggagtgccaaactgtatcttacaccaagtaatattgttctgcttactgctatagctctcatcggtgtctgtgttttcatcttggcaataattggcattttacattggcaggaaaagaaagcagatgatagagaaaaacgacaagaagcccaccggtttcattttgatgctatgtgacttgcctttaatattacataatggaatggctgttcacttgattagttgaaacacaaattctggcttgaaaaaataggggagattaaatattatttataaatgatgtatcccatggtaattattggaaagtattcaaataaatatggtttgaatatgtcacaaggtctttttttttaaagcactttgtatataaaaatttgggttctctattctgtagtgctgtacatttttgttcctttgtggaatgtgttgcatgtactccagtgtttgtgtatttataatcttatttgcatcatgatgatggaaaaagttgtgtaaataaaaataattaaatgagcaggaaaaaaaaaaaaaaaaaaaaaaaaaaaaagggcggccgc

SEQ ID NO: 677 - DNA, 2381 bp, Homo sapiens
ccacgcgtcccgcaaggccagttctagtgtagagagaaaaaggagccggcagcggctcttacgcgtcccggggctgcgcgccactctctcggccggtaacgcggtgctttgcggctgtcgtcaagcgcggcgttgggccggcgggcgggggctgaggggctgccatggcggcggcgggccggctcccgagctcctgggccctcttctcgccgctcctcgcagggcttgcactactgggagtcgggccggtcccagcgcgggcgctgcacaacgtcacggccgagctctttggggccgaggcctggggcacccttgcggctttcggggacctcaactccgacaagcagacggatctcttcgtgctgcgggaaagaaatgacttaatcgtctttttggcagaccagaatgcaccctattttaaacccaaagtaaaggtatctttcaagaatcacagtgcattgataacaagtgtagtccctggggattatgatggagattctcaaatggatgtccttctgacatatcttcccaaaaattatgccaagagtgaattaggagctgttatcttctggggacaaaatcaaacattagatcctaacaatatgaccatactcaataggacttttcaagatgagccactaattatggatttcaatggtgatctaattcctgatatttttggtatcacaaatgaatccaaccagccacagatactattaggagggaatttatcatggcatccagcattgaccactacaagtaaaatgcgaattccacattctcatgcatttattgatctgactgaagattttacagcagatttattcctgacgacattgaatgccaccactagtaccttccagtttgaaatatgggaaaatttggatggaaacttctctgtcagtactatattggaaaaacctcaaaatatgatggtggttggacagtcagcatttgcagactttgatggagatggacacatggatcatttactgccaggctgtgaagataaaaattgccaaaagagtaccatctacttagtgagatctgggatgaagcagtgggttccagtcctacaagatttcagcaataagggcacactctggggctttgtgccatttgtggatgaacagcaaccaactgaaataccaattccaattacccttcatattggagactacaatatggatggctatccagacgctctggtcatactaaagaacacatctggaagcaaccagcaggcctttttactggagaacgtcccttgtaataatgcaagctgtgaagaggcgcgtcgaatgtttaaagtctactgggagctgacagacctaaatcaaattaaggatgccatggttgccaccttctttgacatttacgaagatggaatcttggacattgtagtgctaagtaaaggatatacaaagaatgattttgccattcatacactaaaaaataactttgaagcagatgcttattttgttaaagttattgttcttagtggtctgtgttctaatgactgtcctcgtagataacaccctttggagtgaatcaacctggaccttatatcatgtatacaactgtagatgcaaatgggtatctgaaaaatggatcagctggccaactcagccaatccgcacatttagctctccaactaccatacaacgtgcttggtttaggtcggagcgcaaattttcttgaccatctctacgttggtattccccgtccatctggagaaaaatctatacgaaaacaagagtggactgcaatcattccaaattcccagctaattgtcattccataccctcacaatgtccctcgaagttggagtgccaaactgtatcttacaccaagtaatattgttctgcttactgctatagctctcatcggtgtctgtgttttcatcttggcaataattggcattttacattggcaggaaaagaaagcagatgatagagaaaaacgacaagaagcccaccggtttcattttgatgctatgtgacttgcctttaatattacataatggaatggctgttcacttgattagttgaaacacaaattctggcttgaaaaaataggggagattaaatattatttataaatgatgtatcccatggtaattattggaaagtattcaaataaatatggtttgaatatgtcacaaggtctttttttttaaagcactttgtatataaaaatttgggttctctattctgtagtgctgtacatttttgttcctttgtggaatgtgttgcatgtactccagtgtttgtgtatttataatcttatttgcatcatgatgatggaaaaagttgtgtaaataaaaataattaaatgagcaggaaaaaaaaaaaaaaaaaaaaaaaaaaaaaaaaaaaaaa

SEQ ID NO: 678 - DNA, 1931 bp, Homo sapiens
  misc_feature (1212)..(1212): n equals a,t,g, or c
cccgcagcagctcccaggatgaactggttgcagtggctgctgctgctgcgggggcgctgagaggacacgagctctatgcctttccggctgctcatcccgctcggcctcctgtgcgcgctgctgcctcagcaccatggtgcgccaggtcccgacggctccgcgccagatcccgcccactacagggagcgagtcaaggccatgttctaccacgcctacgacagctacctggagaatgcctttcccttcgatgagctgcgacctctcacctgtgacgggcacgacacctggggcagtttttctctgactctaattgatgcactggacaccttgctgattttggggaatgtctcagaattccaaagagtggttgaagtgctccaggacagcgtggactttgatattgatgtgaacgcctctgtgtttgaaacaaacattcgagtggtaggaggactcctgtctgctcatctgctctccaagaaggctggggtggaagtagaggctggatggccctgttccgggcctctcctgagaatggctgaggaggcggcccgaaaactcctcccagcctttcagacccccactggcatgccatatggaacagtgaacttacttcatggcgtgaacccaggagagacccctgtcacctgtacggcagggattgggaccttcattgttgaatttgccaccctgagcagcctcactggtgacccggtgttcgaagatgtggccagagtggctttgatgcgcctctgggagagccggtcagatatcgggctggtcggcaaccacattgatgtgctcactggcaaggggtggcccaggacgcaggcatcggggctggcgtggactcctactttgagtacttggtgaaaggagccatcctgcttyaggataagaagctcatggccatgttcctagagtataacaaagccatccggaactacacccgcttcgatgactggtacctgtgggttcagatgtacaaggggactgtgtccatgccagtcttccagtccttggaggcctactggcctggtcttcagagcctcattggagacattgacaatgccatgaggaccttcctcaactactacactgtatggaagcagtttggggggctcccggaattctacaacattcctcagggatacacagtggagaagcgagagggctacccacttcggccagaacttattgaaagcgcaatgtacntctaccgtgccacgggggatcccaccctcctagaactcggaagagatgctgtggaatccattgaaaaaatcagcaaggtggagtgcggatttgcaacaatcaaagatctgcgagaccacaagctggacaaccgcatggagtcgttcttcctggccgagactgtgaaatacctctacctcctgtttgacccaaccaacttcatccacaacaatgggtccaccttcgacgcggtgatcaccccctatggggagtgcatcctgggggctggggggtacatcttcaacacagaagctcaccccatcgaccctgccgccctgcactgctgccagaggctgaaggaagagcagtgggaggtggaggacttgatgagggaattctactctctcaaacggagcaggtcgaaatttcagaaaaacactgttagttcggggccatgggaacctccagcaaggccaggaacactcttctcaccagaaaaccatgaccaggcaagggagaggaagcctgccaaacagaaggtcccacttctcagctgccccagtcagcccttcacctccaagttggcattactgggacaggttttcctagactcctcataaccactggataatttttttatttttatttttttgaggctaaactataataaattgcttttggctatcaaaaaaaaaaaaaaaaaaaaaaaaaaaaaaaaaaaaaaaaaaaagggcggccgc

SEQ ID NO: 679 - DNA, 1517 bp, Homo sapiens
gggtcgacccacgcgtccgctcgctgcggcggcgactgagccaggctgggccgcgtccctgagtcccagagtcggcgcggcgcggcaggggcagccttccaccacggggagcccagctgtcagccgcctcacaggaagatgctgcgtcggcggggcagccctggcatgggtgtgcatgtgggtgcagccctgggagcactgtggttctgcctcacaggagccctggaggtccaggtccctgaagacccagtggtggcactggtgggcaccgatgccaccctgtgctgctccttctcccctgagcctggcttcagcctggcacagctcaacctcatctggcagctgacagataccaaacagctggtgcacagctttgctgagggccaggaccagggcagcgcctatgccaaccgcacggccctcttcccggacctgctggcacagggcaacgcatccctgaggctgcagcgcgtgcgtgtggcggacgagggcagcttcacctgcttcgtgagcatccgggatttcggcagcgctgccgtcagcctgcaggtggccgctccctactcgaagcccagcatgaccctggagcccaacaaggacctgcggcccggggacacggtgaccatcacgtgctccagctaccagggctaccctgaggctgaggtgttctggcaggatgggcagggtgtgcccctgactggcaacgtgaccacgtcgcagatggccaacgagcagggcttgtttgatgtgcacagcatcctgcgggtggtgctgggtgcaaatggcacctacagctgcctggtgcgcaaccccgtgctgcagcaggatgcgcacagctctgtcaccatcacagggcagcctatgacattccccccagaggccctgtgggtgaccgtggggctctctgtctgtctcattgcactgctggtggccctggctttcgtgtgctggagaaagatcaaacagagctgtgaggaggagaatgcaggagccgaggaccaggatggggagggagaaggctccaagacagccctgcagcctctgaaacactctgacagcaaagaagatgatggacaagaaatagcctgaccatgaggaccagggagctgctacccctccctacagctcctaccctctggctgcaatggggctgcactgtgagccctgcccccaacagatgcatcctgctctgacaggtgggctccttctccaaaggatgcgatacacagaccactgtgcagccttatttctccaatggacatgattcccaagtcatcctgctgcctttttttcttatagacacaatgaacagaccacccacaaccttagttctctaagtcatcctgcttgctgccttatttcacagtacatacatttcttagggacacagtacactgaccacatcaccaccctcttcttccagtgctgcgtggaccatctggctgccttttttctccaaaagatgcaatattcagactgactgaccccctgccttatttcaccaaagacacgatgca

SEQ ID NO: 680 - DNA, 2751 bp, Homo sapiens
taaccctcactaaagggaacaaaagctggagctccaccgcggtggcggccgctctagaactagtggatcccccgggctgcaggaattcggcacgagtagagccgatctcccgcgccccgaggttgctcctctccgaggtctcccgcggcccaagttctccgcgccccgaggtctccgcgccccgaggtctccgcggcccgaggtctccgcccgcaccatgcggctgggcagtcctggactgctcttcctgctcttcagcagccttcgagctgatactcaggagaaggaagtcagagcgatggtaggcagcgacgtggagctcagctgcgcttgccctgaaggaagccgttttgatttaaatgatgtttacgtatattggcaaaccagtgagtcgaaaaccgtggtgacctaccacatcccacagaacagctccttggaaaacgtggacagccgctaccggaaccgagccctgatgtcaccggccggcatgctgcggggcgacttctccctgcgcttgttcaacgtcaccccccaggacgagcagaagtttcactgcctggtgttgagccaatccctgggattccaggaggttttgagcrttgaggttacactgcatgtggcagcaaacttcagcgtgcccgtcgtcagcgccccccacagcccctcccaggatgagctcaccttcacgtgtacatccataaacggctaccccaggcccaacgtgtactggatcaataagacggacaacagcctgctggaccaggctctgcagaatgacaccgtcttcttgaacatgcggggcttgtatgacgtggtcagcgtgctgaggatcgcacggacccccagcgtgaacattggctgctgcatagagaacgtgcttctgcagcagaacctgactgtcggcagccagacaggaaatgacatcggagagagagacaagatcacagagaatccagtcagtaccggcgagaaaaacgcggccacgtggagcatcctggctgtcctgtgcctgcttgtggtcgtggcggtggccataggctgggtgtgcagggaccgatgcctccaacacagctatgcaggtgcctgggctgtgagtccggagacagagctcactggccacgtttgaccggagctcaccgcccagagcgtggacagggcttccatgagacgccaccgtgagaggccaggtggcagcttgagcatggactcccagactgcaggggagcacttggggcagcccccagaaggaccactgctggatcccagggagaacctgctggcgttggctgtgatcctggaatgaggccctttcaaaagcgtcatccacaccaaaggcaaatgtccccaagtgagtgggctccccgctgtcactgccagtcacccacaggaagggactggtgatgggctgtctctacccggagcgtgcgggattcagcaccaggctcttcccagtaccccagacccactgtgggtcttcccgtgggatgcgggatcctgagaccgaagggtgtttggtttaaaaagaagactgggcgtccgctcttccaggacggcctctgtgctgctggggtcacgcgaggctgtttgcaggggacacggtcacaggagctcttctgccctgaacgctcccaacctgcctcccgcccggaagccacaggacccactcatgtgtgtgcccacaagtgtagttagccgtccacaccgaggagcccccggaagtccccactgggcttcagtgtcctctgccacattccctgggaggaacaatgtccctcggctgttccggtgaaaagttgagccacctttggaagacgcacgggtggagtttgccagaagaaaggctgtgccagggccgtgtttggctacaggggctgccggggctcttggctctgcagcgagaaagacacagcccagcagggctggagacgcccatgtccagcaggcgcaggcctggcaacacggtccccagagtcctgagcagcagttaggtgcatggagagggtatcacctggtggccacagtcccccttctcacctcagcaatgatccccaaagtgagaggtggctcccccggcccccaccaccctcagcagccccaccccactcaaccctgagggtccccagggtcctgatgaagacctccgaccccagcgccaggctcctcggagcccaacagtcccaagggggcaggagacggggtggtccagtgctgaggggtacagccctgggccctgaccagccccggcacctgccatgctggttcccggaatgaatcagctgctgactgtctccagaagggctggaaaggatgctgccaggtgacccgaggtgcactcgccccagggagatggagtagacagcctggcctggccctcgggacacattgtctgccccgggrctatgggcaaatgcccctccttcttacttcccagaatcccctgacattcccagggtcagccaggacctgttacagccctggtcacttggaactgacagctgtgtgaggcctgcacttctcagacccagacttagaacaaaaggaggagtgaggactcaaggctacaatgaggttccagtacttgttacaagaaattggttttctgcaaaaaaagtccctacctgrgcctttaggtgaatgtgggatccactcccgcttttaacatgaaagcattagaagatgtgtggtgtttataaaaraaaaaaaaaaaaaactcgagggggggcccgtacgggaattcgccctatagtgagt

SEQ ID NO: 681 - DNA, 468 bp, Homo sapiens
gtgagaagataatcctgagaggctgcatcctgagaaataccagctggtgttttggaatggttatttttgcaggtcctgacactaaactaatgcagaatagtggtaagacaaagtttaaaaggacaagcattgatagattgatgaatactctagtactatggatttttgggtttctgatatgcttgggaattattcttgcaataggaaattcaatctgggagagtcaaactggggaccaattcagaactttcctcttttggaatgaaggagagaagagctctgtgttctccggattcttaacattctggtcatatattattattctcaatacagttgtacccatttccttatatgtgagtgtggaagtaattcgtctaggacacagttattttataaactgggaccggaagatgtattatyctcgaaaagcaatacctgcagtggctcgaacgaccacgctcaatgagg

SEQ ID NO: 682 - DNA, 181 bp, Homo sapiens
  misc_feature (178)..(178): n equals a,t,g, or c
ggtcagtgtgcagatagccttggataccagktactggactttcattaatcacgtcttcatctgggggagcattgccatttatttctccattttatttacaatgcacagtaatggcatctttggcatcttcccaaaccagtttccatttgttggtaatgcacgacattccctgacccanaag

SEQ ID NO: 683 - DNA, 612 bp, Homo sapiens
  misc_feature (47)..(47): n equals a,t,g, or c
  misc_feature (534)..(534): n equals a,t,g, or c
  misc_feature (537)..(537): n equals a,t,g, or c
  misc_feature (563)..(563): n equals a,t,g, or c
  misc_feature (565)..(565): n equals a,t,g, or c
  misc_feature (591)..(591): n equals a,t,g, or c
cagtctgggcttaagaaaccaccagaagaacccaaaccagaaatgcncaagtgtaaatgcaaaaattcttatagaagaaatagcataagaatttgcacattcggaaataagaccaccttccatgaacaaggagaagcctttggagatatctaaactgtgcaaatgaatagtcgctggctaagactgcttgcaatccttcctggccgctgatgccaacaccaatgtgagcacttttaatcatgctgacatcattggctccatcwccaatggccaaagtaacagcatttctgtacttcttcaccagctctaccacttgggctttctggagtggagtgaccctgcagcaaattacagtcttacacatgcaagcaagttctaggagatcattcttgacatcactttctagggcatgagccaaactgtggccatttatgattaaggcataatctcctgttatggtttcttctacaatagaatccaactccagctgctgctttttttcacaaactacatggccattggaaaaatttctgnttngtccaaacaaattttgttttgaaatnangagttcttctctcacttccacagcanttattccctgctatagggagg

SEQ ID NO: 684 - DNA, 1024 bp, Homo sapiens
  misc_feature (29)..(29): n equals a,t,g, or c
  misc_feature (986)..(986): n equals a,t,g, or c
tgctttcctgagttcttctctcacttccncagcattattccctgctatcccaaacmcatcattcatgtcgtcagtcagcatgttgcaggcataaccgatgttgatgscagtttcttgtttgtctcctgttaggacccagatcttaatattggctagtgataaacttgtaactgtttcaataacaccctcctgtaacttatcttctacagcagtggcacctagtagcatcaaatctctttcaatttcttcatatagcccagctattcgttcatccctctcttctgtggcaacattcgcatcttcaagcatcttatgccactctttaaagtacttgtcatccaggtctctgtatgcgatggccaaggtccgaaggccttcccctgcaaattcactgaggtggtctgacgtcaaagacaaaaggacttcattggaaggatsaagtttctcaaacagaatagtatctgctcctttggaataaagctttatctgtccttctgggtttcgarctatgacagacatcctttttctggtgttgttgaaatccaaaaaggcaagtaattgataagtaactagtgttcccaattcttctattgttatggtctctggggtccgggatttaaaratgaacccaaaatttctagcggcagtcactagagccccttcatcaggtgactgaacttggtaaatcagctctcctgcgctattctcttctgacattacagtgtggcagagagcaagtaacctaaggaattcatgaactttgggatcacccattttaatggattccatcagattgtggtcaaagaactgaaattctctatccgcttgagatttgactgagaaatccacaggctctttttcctgagttatttctgtcttctgatccaggtcatcatgtacttcaccatagattctcccattaatggaacatcttttaaaggtcatgatgttttgagtgagggtacccgttttgtcggagaaaatgnactcaatctgccccagttcttcattgagcgtggtcgtt

SEQ ID NO: 685 - DNA, 366 bp, Homo sapiens
gacgcgtgggagctcattatccatcaaactcactcargtgwcacytgagtgagtttgatggataatgagctaatgtgatatctataggtcacaattttttaaaaccaaaattttcaagtctgggataatctttcctaaatgggatcaaatgaaataatatgtgtaaaagagtcaaatgcagtcctttaccatagtaactgcctatggacgttgtctttcccttacatgcctgcctacacttaaccagatgttggttttcaagtctaatktgtcattagtttcaccacattkgctcacttttkgtaacatttttgcaagatttgaaaactttcagtaaatgttttggcactattggtaaaaaaaaaa

SEQ ID NO: 686 - DNA, 519 bp, Homo sapiens
  misc_feature (371)..(371): n equals a,t,g, or c
cctggttagggtcctacagggaaataaaattataaccgtggaggtacatttctctaccagaaagcaaaaataaagcatcatgtcttaatggttttctacaaatcaacttctaattctacagagtccttaatctggtccctattaaattcttggtcagacaaagttacatttcccaagagagtcaggtgacacttgagtgagtttgatggataatgagctaatgtgatatctataggtcacaattttttaaaaccaaaattttcaagtctgggataatctttcctaaatgggatcaaatgaaataatatgtgtaaaagagtcaaatgcagtcctttaccatagtaactgcctatggacgttgtctttccctnacatgcctgcctacacttaaccagatgttggttttcaatgtctaatttgtcattagtttcaccacatttgctcactttttgtaacatttttgcaagatttgaaaactttcagtaaatgttttggcactattggtaaaaaaaaaaaaaa

SEQ ID NO: 687 - DNA, 1867 bp, Homo sapiens
cccacgcgtccgggccacagcagagacagtggagggcagtggagaggaccgcgctgtcctgctgtcaccaagagctggagacaccatctcccaccgagagtcatggccccattggccctgcacctcctcgtcctcgtccccatcctcctcagcctggtggcctcccaggactggaaggctgaacgcagccaagaccccttcgagaaatgcatgcaggatcctgactatgagcagctgctcaaggtggtgacctgggggctcaatcggaccctgaagccccagagggtgattgtggttggcgctggtgtggccgggctggtggccgccaaggtgctcagcgatgctggacacaaggtcaccatcctggaggcagataacaggatcgggggccgcatcttcacctaccgggaccagaacacgggctggattggggagctgggagccatgcgcatgcccagctctcacaggatcctccacaagctctgccagggcctggggctcaacctgaccaagttcacccagtacgacaagaacacgtggacggaggtgcacgaagtgaagctgcgcaactatgtggtggagaaggtgcccgagaagctgggctacgccttgcgtccccaggaaaagggccactcgcccgaagacatctaccagatggctctcaaccaggccctcaaagacctcaaggcactgggctgcagaaaggcgatgaagaagtttgaaaggcacacgctcttggaatatcttctcggggaggggaacctgagccggccggccgtgcagcttctgggagacgtgatgtccgaggatggcttcttctatctcagcttcgccgaggccctccgggcccacagctgcctcagcgacagactccagtacagccgcatcgtgggtggctgggacctgctgccgcgcgcgctgctgagctcgctgtccgggcttgtgctgttgaacgcgcccgtggtggcgatgacccagggaccgcacgatgtgcacgtgcagatcgagacctctcccccggcgcggaatctgaaggtgctgaaggccgacgtggtgctgctgacggcgagcggaccggcggtgaagcgcatcaccttctcgccgccgctgccccgccacatgcaggaggcgctgcggaggctgcactacgtgccggccaccaaggtgttcctaagcttccgcaggcccttctggcgcgaggagcacattgaaggcggccactcaaacaccgatcgcccgtcgcgcatgattttctacccgccgccgcgcgagggcgcgctgctgctggcctcgtacacgtggtcggacgcggcggcagcgttcgccggcttgagccgggaagaggcgttgcgcttggcgctcgacgacgtggcggcattgcacgggcctgtcgtgcgccagctctgggacggcaccggcgtcgtcaagcgttgggcggaggaccagcacagccagggtggctttgtggtacagccgccggcgctctggcaaaccgaaaaggatgactggacggtcccttatggccgcatctactttgccggcgagcacaccgcctacccgcacggctgggtggagacggcggtcaagttgctgcgcgccgccatcaagatcaacagccggaaggggcctgcatcggacacggccagccccgaggggcacgcatctgacatggaggggcaggggcatgtgcatggggtggccagcagcccctcgcatgacctggcaaaggaagaaggcagccaccctccagtccaaggccagttatctctccaaaacacgacccacacgaggacctcgcattaaagtattttcggaaaaaaaaaaaaaaaaaaaaaaaaaaaaaaaaaaaaaaaaaaaaaaaaaaaaa

SEQ ID NO: 688 - DNA, 1722 bp, Homo sapiens
  misc_feature (401)..(401): n equals a,t,g, or c
  misc_feature (695)..(695): n equals a,t,g, or c
gggaccgcgctgtcctgctgtcaccaagagctggagacaccatctcccaccgagagtcatggccccattggccctgcacctcctcgtcctcgtccccatcctcctcagcctggtggcctcccaggactggaaggctgaacgcagccaagaccccttcgagaaatgcatgcaggatcctgactatgagcagctgctcaaggtcaccatcctggaggcagataacaggatcgggggccgcatcttcacctaccgggaccagawyacgggctggattggggagctgggagccatgcgcatgcccagctctcacaggatcctccacaagctctgccagggcctggggctcaacctgaccaagttcacccagtacgacaagaacacgtggacggaggtgcacgaantgaagctgcgcaactatgtggtggagaaggtgcccgagaagctgggctacgccttgcgtccccaggaaaagggccactcgcccgaagacatctaccagatggctctcaaccaggccctcaaagacctcaaggcactgggctgcagaaaggcgatgaagaagtttgaaaggcacacgctcttggaatatcttctcggggaggggaacctgagccggccggccgtgcagcttctgggagacgtgatgtccgaggatggcttcttctatctcagcttcgccgaggccctccgggccnacagctgcctcagcgacagactccagtacagccgcatcgtgggtggctgggacctgctgccgcgcgcgctgctgagctcgctgtccgggcttgtgctgttgaacgcgcccgtggtggcgatgacccagggaccgcacgatgtgcacgtgcagatcgagacctctcccccggcgcggaatctgaaggtgctgaaggccgacgtggtgctgctgacggcgagcggaccggcggtgaagcgcatcaccttctcgccgcgctgccccgccacatgcaggaggcgctgcggaggctgcactacgtgccggccaccaaggtgttcctaagcttccgcaggcccttctggcgcgaggagcacattgaaggcggccactcaaacaccgatcgcccgtcgcgcatgattttctacccgccgccgcgcgagggcgcgctgctgctggcctcgtacacgtggtcggacgcggcggcagcgttcgccggcttgagccgggaagaggcgttgcgcttggcgctcgacgacgtggcggcattgcacgggcctgtcgtgcgccagctctgggacggcaccggcgtcgtcaagcgttgggcggaggaccagcacagccagggtggctttgtggtacagmcgccggcgctctggcaaaccgaaaaggatgactggacggtcccttatggccgcatctactttgccggcgagcacaccgcctacccgcacggctgggtggagacggcggtcaagtcggcgctgcgcgccgccatcaagatcaacagccggaaggggcctgcatcggacacggccagccccgaggggcacgcatctgacatggaggggcaggggcatgtgcatggggtggccagcagcccctcgcatgacctggcaaaggaagaaggcagccaccctccagtccaaggccagttatctctccaaaacacgacccacacgaggacctcgcattaaagtattttcggaaaaaaaaaaaaaaaaaaaaaaaaaaaaaaaaaaaaaaaaaaaaaaaaaaaaagggcggcc

SEQ ID NO: 689 - DNA, 536 bp, Homo sapiens
  misc_feature (508)..(508): n equals a,t,g, or c
ggtcgacccacgcgtccgcccacgcgtccggcttccttaatgtaatttaaaccctggcaaacattctttagaaaccaagaggaaagaaagaacaaatatcaaaaaagacatagaatttaatattgatacaatttcacctctaaaatggatttgaagaaatgcaactttatatcaaaaaatgtcatctgatttcctttgtttcttttttaaattatgtaatcagatgattttatgtttttttttcaggggagcggaatattggtttcttttacttgttgttttcagttttctctgccattcatgtttcttttttgtgttcagtgtttcaaatacaatttgtatttaaggattttaaaataccaaactgtaactgagtacagtggatcgttttctgttaggatgttaatattatacaatgaaatctataaagtgttgtcaatttgattattgacacatataacatgtttacaaataaactgtggtattgatcaaaaaaaaaaaaaaaaancccggggggggccccggaacccaatccc

SEQ ID NO: 690 - DNA, 397 bp, Homo sapiens
  misc_feature (322)..(322): n equals a,t,g, or c
  misc_feature (394)..(394): n equals a,t,g, or c
  misc_feature (397)..(397): n equals a,t,g, or c
gtttgcgagcggctggaaccagacggtgccgatagaggaagcgggctccatggctgccctcctgctgctgcccctgctgctgttgctaccgctgctgctgctgaagctacacctctggccgcagttgcgctggcttccggcggacttggcctttgcggtgcgagctctgtgctgcaaaagggctcttcgagctcgcgccctggccgcggctgccgccgacccggaaggtcccgaggggggctgcagcctggcctggcgcctcgcggaactggcccagcagcgcgcggaacttttattacggtcgcgcgctttagctactcanaggcggagcgcgagagtaacaggctgacgcgccttcctacgtgcgctaggctgggactggggacccgacggnggn

SEQ ID NO: 691 - DNA, 716 bp, Homo sapiens
  misc_feature (630)..(630): n equals a,t,g, or c
  misc_feature (710)..(710): n equals a,t,g, or c
gcctcagcggccgggcccacggccccgagcagccatgctgggcgcgcgggcctggttgggccgcgtccttctgctgccccgcgccggtgcaggcctcgccgcragccgcaggtgtcctggagtctggcccaggacctggccccacaggagtcccagcaggggtagctcctcccgggacaaggaccgaagtgcgacggtcagtagttcagtgcccatgcctgctggagggaaaggaagccatccttcatctacaccccagagggtccccaaccgcctgatccacgagaagtcaccatacctcctacaacatgcctacaatcctgtggactggtacccctggggacaggaagccttcgacaaggccaggaaggaaaacaagccgattttcctctcagtcgggtactccacctgccactggtgccacatgatggaagaggagtccttccagaatgaggagattggccgcctgctcagtgaggactttgtgagtgtgaaggtagaccgtgaggagcggcctgacgtggacaaggtgtacatgacgttcgtgcaggccaccagcagcggcgggggctggcccatgaatgtgtggctgactcccaacctccagccctttgtcgggggcactatttncctcctgaaggatggcttgamccgagtsggttccgcacagtgttkctgagaatacgagaacartggaaacagaacaagancaccct

SEQ ID NO: 692 - DNA, 2716 bp, Homo sapiens
ggccgggcccacggcmccgagcagccatgctgggcgcgcgggcctggttgggccgcgtccttctgctgccccgcgccggtgcaggcctcgccgcgagccgcaggtctgcctgcagtcccacttccaggctgaactccctgaggtctctgattccctaggtgtcctggagtctggcccaggacctggccccacaggagtcccagcaggggtagctcctcccgggacaaggaccgaagtgcgacggtcagtagttcagtgcccatgcctgctggagggaaaggaagccatccttcatctacaccccagaggktccccaaccgcctgatccacgagaagtcaccatacctcctacaacatgcctacaatcctgtggactggtacccctggggasaggaagccttygacaaggccaggaaggaaaacaagccgattttcctctcagtcgggtactccacctgccactggtgccacatgatggaagaggagtccttccagaatgaggagattggccgcctgctcagtgaggactttgtgagtgtgaaggtagaccgtgaggagcggcctgacgtggacaaggtgtacatgacgttcgtgcaggccaccagcagcggcgggggctggcccatgaatgtgtggctgactcccaacctccagccctttgtcgggggcacctatttccctcctgaggatggcttgacccgagtcggcttccgcacagtgttgctgagaatacgagaacagtggaaacagaacaagaacaccctgctagaaaatagccagcgtgtcaccactgccctgctggcccgatcagagatcagcgtgggtgaccgccagctgccgccctctgccgccaccgtgaacaatcgctgcttccagcagctggatgagggctatgatgaggaatacggtggcttcgctgaggcccccaagtttcccacgccggtgatcctgagcttcctgttctcctactggctcagccatcgactgactcaggatggctctcgggcccagcagatggccttgcataccctgaaaatgatggctaacgggggcatccgggaccatgtggggcagggctttcaccgctactccacagaccgccagtggcacgtccctcactttgagaagatgctctatgaccaggcacagctcgctgtggcctattcgcaggccttccagctctctggtgatgaattctactctgacgtggccaaaggcatcctgcagtacgtggctcggagcctgagccaccggtccggaggcttctatagcgcagargatgcagactcgcccccagagcggggccagcggcccaaagagggcgcctactatgtgtggacggtcaaagaggttcagcagctcctcccggagcctgtgttgggtgccaccgagccgctgacctcaggccagctcctcatgaagcactacggcctcacagaggctggtaacatcagccccagtcaggaccccaagggggagctgcagggccagaatgtgctgaccgtccggtactcgctggagctgactgctgcccgctttggcttggatgtggaggccgtgcggaccttgctcaattcagggctggagaagctcttccaggcccggaagcatcggcccaagccgcacctggacagcaagatgctggctgcctggaatggcttgatggtgtcaggctatgctgtgactggggctgtcctgggccaagacaggctgatcaactatgccaccaatggtgccaagttcctgaagcggcacatgtttgatgtggccagtggccgcctgatgcggacctgctacaccggccctggggggactgtggagcacagcaacccaccctgctggggcttcctggaggactacgccttcgtggtgcggggcctgctggacctgtatgaggcctcacaggagagtgcgtggctcgagtgggctctgcggctgcaggacacacaggacaggctcttttgggactcccagggtggcggctacttctgcagtgaggctgagctgggggctggcctgcccctgcgtctgaaggacgaccaggatggagcagagcccagcgccaattccgtgtcagcccacaacctgctccggctgcatggcttcacgggccacaaggactggatggacaagtgtgtgtgcctattgaccgccttttccgagcgcatgcgtcgtgtcccggtggcgttgcccgagatggtccgcgccctctcagcccagcagcagaccctcaagcagatcgtgatctgtggagaccgtcaggccaaggacaccaaggccctggtgcagtgcgtccactctgtctacattcctaacaaggtgctgattctggctgatggggacccctcgagcttcctgtcccgccagctgcctttcctgagtaccctccgacggttggaagaccaggccactgcatatgtgtgtgagaatcaagcctgctcagtgcccatcactgatccctgcgaattacgaaaactactacatccatgactgccccaacccccttggggtggggcagaaggtgaagcatcccaactgactagagactcaggccctgcagggccctatagaacctgtggccatccctgagcaccctgccaccaggtgacctcggccatactcactgccccccttgggcacccactcaccctagaataaacttaacagtgtcccgtggtaaaaaaaaaaaaaaaaaaaaaaaaaaaagggcggccgc

SEQ ID NO: 693 - DNA, 427 bp, Homo sapiens
ccacgcgtccggtgggctcactgttgggctccagcctagtggcactgctgtccttgcccgggggctggctgcactgccccaaggactttgggaacatcaacaattgccggatggacctctacttcttcctgctggctggcattcaggccgtcacggctctcctatttgtctggatcgctggacgctatgagagggcgtcccagggcccagcctcccacagccgtttcagcagggacaggggctgaacaggccctattccagcccccttgcttcactctaccggacagacggcagcagtcccagctctggtttccttctcggtttattctgttagaatgaaatggttcccataaataaggggcatgagcccttcctcaaaaaaaaaaaaaaaaaaaaaaaaaaaaaaaaaaaaaaaaaaaaaaaaaaa

SEQ ID NO: 694 - DNA, 1257 bp, Homo sapiens
  misc_feature (549)..(549): n equals a,t,g, or c
  misc_feature (589)..(589): n equals a,t,g, or c
gttttcagcaggattttcctttcagtgaaacataatttgacttgaaaggaacccagggaaaagtgtccaggtgtgagcatgagcgggtagaggtgtgcccttgtttgcttcaggctgtctgcttttcgcccctgactgttttttctgtttctggccatggaggaagagaaagatgacagcccacaggctgacttctgcctgggcaccgccctgcactcttggggactgtggttmacggaggaaggttmaccgtccaccatgctgacggggattgcagttggagccctcctggccctggccttggttggtgtcctcatccttttcatgttcagaaggcttagacaatttcgacaagcacagcccactcctcagtaccggttccggaagagagacaaagtgatgttttacggccggaagatcatgaggaaggtgaccacactccccaacacccttgtggagaacactgccctgccccggcagcgggccaggaagaggaccaaggtgctgtctttggccaagaggattctgcgtttcaagaaggaatacccnggcctgcascccaaggacccccggccttccctgctggagnccgacttcacggagtttgacgtgaagaattctcacctgccatcggaagttctgtacatgctgaaaaacgttcgggtcctgggccactttgagaagccgctgttcctggagctttgcaaacacatcgtctttgtgcagctgcaggaaggggagcacgtcttccagcccagggagccggaccccagcatctgtgtggtgcaggacgggcggctggaggtctgcatccaggacactgacggcaccgaggtggtggtgaaagaggttctggcgggagacagcgtccacagcctgctcagcatcctggacatcatcaccggccatgctgcaccttacaaaacggtctccgtccrcgcggccatcccgtccaccatcctccggcttccagctgcggcttttcatggagtttttgagaaatatccggaaactctggtgagggtggtgcagatcatcatggtgcggctgcagagggtgacctttctggctctgcacaactacctcggcctgaccacagagctcttcaacgctgagagccaggccatccctctcgtgtctgtagccagtgtggctgccgggaaggccaagaagcaggtgttctatggcgaagaagagcggcttaaaaagccaccgcggctccaggagtcctgtgactcagatcacgggggcggccgc

SEQ ID NO: 695 - DNA, 3302 bp, Homo sapiens
  misc_feature (3274)..(3274): n equals a,t,g, or c
tcgacccacgcgtccgcgacccacgcgtccggggggaggtaactgcagtaagtcccgcttggccctggagtccacgcggattttcgaagctggggctggcaagaggccgctggacaccacgctccagtcgtcagcccacttcctagctgaacagcgcgaggcggcggcagcgagccgggtcccaccatggccgcgaattattccagtaccagtacccggagagaacatgtcaaagttaaaaccagctcccagccaggcttcctggaacggctgagcgagacctcgggtgggatgtttgtggggctcatggccttcctgctctccttctacctaattttcaccaatgagggccgcgcattgaagacggcaacctcattggctgaggggctctcgcttgtggtgtctcccgacagcatccacagtgtggctccggagaatgaaggaaggctggtgcacatcattggcgccttacggacatccaagcttttgtctgatccaaactatggggtccatcttccggctgtgaaactgcggaggcacgtggagatgtaccaatgggtagaaactgaggagtccagggagtacaccgaggatgggcaggtgaagaaggagacgaggtattcctacaacactgaatggaggtcagaaatcatcaacagcaaaaacttcgaccgagagattggccacaaaaaccccagtgccatggcagtggagtcattcayggcaacagccccctttgtccaaattggcaggtttttcctctcgtcaggcctcatcgacaaagtcgacaacttcaagtccctgagcctatccaagctggaggaccctcatgtggacatcattcgccgtggagactttttctaccacagcgaaaatcccaagtatccagagktgggagacttgcgtgtctccttttcctatgctggactgagcggcgatgaccctgacctgggcccagctcacgtggtcactgtgattgcccggcagcggggtgaccagctagtcccattctccaccaagtctggggataccttactgctcctgcaccacggggacttctcagcagaggaggtgtttcatagagaactaaggagcaactccatgaagacctggggcctgcgggcagctggctggatggccatgttcatgggcctcaaccttatgacacggatcctctacaccttggtggactggtttcctgttttccgagacctggtcaacattggcctgaaagcctttgccttctgtgtggccacctcgctgaccctgctgaccgtggcggctggctggctcttctaccgacccctgtgggccctcctcattgccggcctggcccttgtgcccatccttgttgctcggacacgggtgccagccaaaaagttggagtgaaaagaccctggcacccgcccgacacctgcgtgagccctaggatccaggtcctctctcacctctgacccagctccatgccagagcaggagccccggtcaattttggactctgcacyccctctcctcttcaggggccagacttggcagcatgtgcaccaggttggtgttcaccagctcatgtcttccccacatctcttcttgccagtaagcagctttggtgggcagcagcagctcatgaatggcaagctgacagcttctcctgctgtttccttcctctcttggactgagtgggtacggccagccactcagcccattggcagctgacaacgcagacacgctctacggaggcctgctgataaagggctcagccttgccgtgtgctgcttctcatcactgcacacaagtgccatgctttgccaccaccaccaagcacatctgtgatcctgaagggcggccgttagtcattactgctgagtcctgggtcaccagcagacacactgggcatggacccctcaaagcaggcacacccaaaacacaagtctgtggctagaacctgatgtggtgtttaaaagagaagaaacactgaagatgtcctgaggagaaaagctggacatatactgggcttcacacttatcttatggcttggcagaatctttgtagtgtgtgggatctctgaaggccctatttaagtttttcttcgttactttgctgcttcatgtgtactttcctaccccaagaggaagttttctgaaataagatttaaaaacaaaacaaaaaaaacacttaatatttcagactgttacaggaaacaccctttagtctgtcagttgaattcagagcactgaaaggtgttaaattggggtatgtggtttgattgataaaaagttacctctcagtattttgtgtcactgagaagctttacaatggatgcttttgaaacaagtatcagcaaaaggatttgttttcactctgggaggagagggtggagaaagcacttgctttcatcctctggcatcggaaactcccctatgcacttgaagatggtttaaaagattaaagaaacgattaagagaaaaggttggaagctttatactaaatgggctccttcatggtgacgccccgtcaaccacaatcaagaactgaggcctgaggctggttgtacaatgcccacgcctgcctggctgctttcacctgggagtgctttcgatgtgggcacctgggcttcctagggctgcttctgagtggttctttcacgtgttgtgtccatagctttagtcttcctaaataagatccacccacacctaagtcacagaatttctaagttccccaactactctcacacccttttaaagataaagtatgttgtaaccaggatgtcttaaatgattctttgtgtaccttttctgtcatattcagaaaccgttttgtgcctgctgggagtaattcctttagcaattaagtatttggtagctgaataaggggtcagaacttctgaaaccagagatctgtaatcatctctattggcctggggtgcctgtgctataaatgagtttcttcacatgaaaaacacagccagcccaagatgacttatctgggtttaggattcaatagtattcactaactgcttattacatgagcaatttcatcaaatctccaaactcttaaaggatgctttcggaaaacacgctgtatacctagatgatgactaaatgcaaaatccttgggctttggtttttttctagtaaggattttaaataactgccgacttcaaaagtgttcttaaaacgaaagataatgttaagaaaaatttgaaagctttggaaaaccaaatttgtaatatcattgtattttttattaaaagttttgtaataaatttctaaattatnaaaaaaaaaaaaaaaaaaaaaaaaaaaa

SEQ ID NO: 696 - DNA, 959 bp, Homo sapiens
ccacgcgtccggtattttctaaaacaataaatttatagtgttaatattcatagggtcaatcaaaatgaagcttctcctttgggcctgcattgtatgtgttgcttttgcaaggaagagacggttccccttcattggtgaggatgacaatgacgatggtcacccacttcatccatctctgaatattccttatggcatacggaatttaccacctcctctttattatcgcccagtgaatacagtccccagttaccctgggaatacttacactgacacagggttaccttcgtatccctggattctaacttctcctggattcccctatgtctatcacatccgtggttttcccttagctactcagttgaatgttcctcctctccctcctaggggtttcccgtttgtccctccttcaaggtttttttcagcagctgcagcacccgctgccccacctattgcagctgagcctgctgcagctgcacctcttacagccacacctgtagcagctgagcctgctgcaaggggccctgttgcagctgagcctgstggcagaggccacctgttggagcttgagcctgctgcagaggcacctgttgcagctgagcctgctgcagaggcacctgttggagtggagccagctgcagaggaaccttcaccagctgagcctgctacagccaagcctgctgccccagaacctcacccttctccctctcttgaacaggcaaatcagtgaaattctctagaagagtaccatgggttcatttctatactgatgcagaaataagtgaaatctacaaaagttttctttcttttccaaagactatttcattctgttgtattcagagtattcatctcactacattgatttgtttgtggtagtttttccttggacttaatttatattgaaaaaacattgataattaaataaataaaatagataatttagaccaaaaaaaaaaaaaaaa

SEQ ID NO: 697 - DNA, 2227 bp, Homo sapiens
  misc_feature (289)..(289): n equals a,t,g, or c
cggacgcgtgggtcgacccacgcgtccgggaaaaarggaaaaratgccgtgtaaaatctcgttctgtgtctgaattgccgtaggctcagatcttcatttgaggttctgtgtctgaattgccgtaggctcagatcttcatttgaggttatgttctataagttaacgttgatcttgtgtgagctttcggtagctggagtaacacaggcggcctcacagcgacctctccagcgccttccaaggcacatctgcagccagcgtaatcctcctgggagatgcctcctcaaggccntgctccagaccacgtggggarggcctgacarccaattcccaggctgtccccacccttgragagtgaccctaaacgctagacagatggggaatgggaaagaaaagaaagctgcagacctcaagttaaaattccctcaaaaacgtttttatttatctgctttttctgaaaggataaaggctttttgaaaattattttctaacaaataacatgaacacttctagaaaccctagaaaaacacaaagtattcaaaatagaaagaaaaattacccattactctttaagccagcattatccattgcggtgcttttggagttgggtgaggccgtagcctctgccaagtcaaggagcccggtggtggctgtggcattcctgcagggttgtttttttttctttgagatggagtctcactcttgtcaccccagctggaatgtggtggtgtaaacagctcactgcagccttgaccctgaggctcaagcgatccttctgccttggcctcctgagtagctgggatcccaggcgagagtcaccacaccctgtccatgttcctgcaggtcttgatatgcgaggacgctgtgtcttccctgccacattttcttcttctttcttgagacagacccttgctccatcacccaggccagagtgtggtsgtgcgaacacggctcactgcagcctcgaccctcaggctcaagcgatcctcacgcctcggacccccaaagtgctgggatcacaggcgagagtcaccatgctggcctgaatcttcagggtattttacggttgaagtgtcacttacttarccatscctgtttcaagagtgtaggtggtcaccctgtctctgycgctgacctggcctggaccctcggctgtgagagggaggggtgggctgggctggaggaacctraagccctcgtgatgtcacaagcccatctggctgggcatcccctgctgtgtcctgagctgcacatgccccaggtggcccccacagcagaggcgagccactgragggtgragggcttccacggacggtcttcaggggragaagaagggcccaggcccccaggagactcaggagaccagagcctggggtcaggggctyagcaggggctyarccagggctggatgtccggagccagccccgmagccctgkgktctttgttcttcgcactcccaccgtccgtgtgaacagctccagccccacctgcgcctccctgtgctgggctccatcagggagcccagaagacgtgtgtgcttctgaaattgggtccctacatgcctttgtcccagtgcaccttgctccttccatttactatcgagatttaaatgcctgttttctccccagaggttgacggatatattcagacgttacgacacggatcaggacggctggattcaggtgtcgtacgaacagtacctgtccatggtcttcagtatcgtatgaccctggcctctcgtgaagagcagcacaacatggaaagagccaaaatgtcacagttcctatctgtgagggaatggagcacaggtgcagttagatgctgttcttcctttagattttgtcacgtggggacccagctgtacatatgtggataagctgattaatggttttgcaactgtaatagtagctgtatcgttctaatgcagacattggatttggtgactgtctcattgtgccatgaggtaaatgtaatgtttcaggcattctgcttgcaaaaaaatctatcatgtgcttttctagatgtctctggytctatagtgcaaatgcttttattagccaataggaattttaaaataacatggaacttacacaaaaggcttttcatgtgccttacttttttaaaaaggagtttattgtattcattggaatatgtgacgtaagcaataaagggaatgttagacgtgtaaaaaaaaaaaaaaaaaaaaaaaaaaaaaaaaaaaaaaaaaaaa

SEQ ID NO: 698 - DNA, 2214 bp, Homo sapiens
  misc_feature (289)..(289): n equals a,t,g, or c
cggacgcgtgggtcgacccacgcgtccgggaaaaarggaaaaratgccgtgtaaaatctcgttctgtgtctgaattgccgtaggctcagatcttcatttgaggttctgtgtctgaattgccgtaggctcagatcttcatttgaggttatgttctataagttaacgttgatcttgtgtgagctttcggtagctggagtaacacaggcggcctcacagcgacctctccagcgccttccaaggcacatctgcagccagcgtamtcctcctgggagatgcctcctcaaggccntgctccagaccacgtgggrarggcctgacaagccaattcccaggctgtccccacccttgragagtgaccctaaacgctagacagatggggaatgggaaagaaaagaaagctgcagacctcaagttaaaattccctcaaaaacgtttttatttatctgctttttctgaaaggataaaggctttttgaaaattattttctaacaaataacatgaacacttctagaaaccctagaaaaacacaaagtattcaaaatagaaagaaaaattacccattactctttaagccagcattatccattgcggtgcttttggagttgggtgaggccgtagcctctgccaagtcaaggagcccggtggtggctgtggcattcctgcagggttgtttttttttctttgagatggagtctcactcttgtcaccccagctggaatgtggtggtgtaaacagctcactgcagccttgaccctgaggctcaagcgatccttctgccttggcctcctgagtagctgggatcccaggcgagagtcaccacaccctgtccatgttcctgcaggtcttgatatgcgaggacgctgtgtcttccctgccacattttcttcttctttcttgagacagacccttgctccatcacccaggccagagtgtggtsgtgcgaacacggctcactgcagcctcgaccctcaggctcaagcgatcctcacgcctcggacccccaaagtgctgggatcacaggcgagagtcaccatgctggcctgaatcttcagggtatttrcggttgargtgycacttacttarccatscctgtttcaagagtgtaggtggtcaccctgtctctgccgctgacctggcctggaccctcggctgtgagagggaggggtgggctgggctggaggaacctraagccctcgtgatgtcacaagcccatctggctgggcatcccctgctgtgtcctgagctgcacatgccccaggtggcccccacagcagaggcgagccactgragggtgragggcttccacggacggtcttcaggggragaagaagggcccaggcccccaggagactcaggagaccagagcctggggtcaggggctmagcaggggctyarccagggctggatgtccggagccagccccgmagccctgkgktctttgttcttcgcactcccaccgtccgtgtgaacagctccagccccacctgcgcctccctgtgctgggctccatcagggagcccagaagacgtgtgtgcttctgaaattgggtccctacatgcctttgtcccagtgcaccttgctccttccatttactatcgagatttaaatgcctgttttctccccagaggttgacggatatattcagacgttacgacacggatcaggacggctggattcaggtgtcgtacgaacagtacctgtccatggtcttcagtatcgtatgaccctggcctctcgtgaagagcagcacaacatggaaagagccaaaatgtcacagttcctatctgtgagggaatggagcacaggtgcagttagatgctgttcttcctttagattttgtcacgtggggacccagctgtacatatgtggataagctgattaatggttttgcaactgtaatagtagctgtatcgttctaatgcagacattggatttggtgactgtctcattgtgccatgaggtaaatgtaatgtttcaggcattctgcttgcaaaaaaatctatcatgtgcttttctagatgtctctggttctatagtgcaaatgcttttattagccaataggaattttaaaataacatggaacttacacaaaaggcttttcatgtgccttacttttttaaaaaggagtttattgtattcattggaatatgtgacgtaagcaataaagggaatgttagacgtgtaaaaaaaaaaaaaaaaaaaaaaaaaaaaaag

SEQ ID NO: 699 - DNA, 1005 bp, Homo sapiens
  misc_feature (1004)..(1004): n equals a,t,g, or c
atgggaaatgctcttttgaaggtacgcccgcaggtcccggtccggaattcccgggtcgacccacgcgtccggccagaagcagccatgaagtgagcctgcaggcaggccagcctgtgaccatcctggaggcccaggacaagaaggggaaccctgagtggagcctggtggaagtgaatggacagaggggttatgtgccttctggcttcttggccagggctcggagcccagttctgtggggctggagtctgccctcttagggtaccctctttggagcctacattgccaaatgatgggggaggcttagaggctctgaccctggggggaaaagaagcaaaggaaaggtggaggtggaagggaagaccaggccagggtgggtgaagcacactcaggaggcagccagaagacatgggcgggcctcgcagagtgcttggtgtggtgggggcacaggaggctccagccaggactgctcattatgtctgcataaagaactcattccgacctggggtcacaatgcacttggacagcaggtcacagctgattggccaggactctcgataggttatggccagtcttagctgtgcctgcatccgggcctgcctgtgggcgtgggtcacacgggataatgttacctgcgtgctgtgtggttgcaggaagcgggttctggaggagtccagaactgcctggtcagacagttcacttcctacacatggtatcaggagacatcataaccaatgagtcagcttttatttctctatgctggaagctgagtttatcttgggcagtgacccactgggagccctctcaagtggggaagccatggatttatcggtgtagcagagaggttcccaagactcttgactggtcctgggagtgggtgtgaccaagtcatagttctggaatgtgtgtaggcaaattcagaggctgttccagggaagaggggattttgatactgtgttaggtggggtgtgtgaggctgytggcagcaggtgaacagctactgctgng

SEQ ID NO: 700 - DNA, 2988 bp, Homo sapiens
cccacgcgtccggccagaagcagccatgaagtgagcctgcaggcaggccagcctgtgaccatcctggaggcccaggacaagaaggggaaccctgagtggagcctggtggaagtgaatggacagaggggttatgtgccttctggcttcttggccagggctcggagcccagttctgtggggctggagtctgccctcttagggtaccctctttggagcctacattgccaaatgatgggggaggcttagaggctctgaccctggggggaaaagaagcaaaggaaaggtggaggtggaagggaagaccaggccagggtgggtgaagcacactcaggaggcagccagaagacatgggcgggcctcgcagagtgcttggtgtggtgggggcacaggaggctccagccaggactgctcattatgtctgcataaagaactcattccgacctggggtcacaatgcacttggacagcaggtcacagctgattggccaggactctcgataggttatggccagtcttagctgtgcctgcatccgggcctgcctgtgggcgtgggtcacacgggataatgttacctgcgtgctgtgtggttgcaggaagcgggttctggaggagtccagaactgcctggtcagacagttcacttcctacacatggtatcaggagacatcataaccaatgagtcagcttttatttctctatgctggaagctgagtttatcttgggcagtgacccactgggagccctctcaagtggggaagccatggatttatcggtgtagcagagaggttcccaagactcttgactggtcctgggagtgggtgtgaccaagtcatagttctggaatgtgtgtaggcaaattcagaggctgttccagggaagaggggattttgatactgtgttaggtggggtgtgtgaggctgttggcagcaggtgaacagctactgctgtgttctcaggactagggaacaaaggggtatgcaaatcatagaggaaactctgggaaggcggtgataaggcctggtgggtggggaggttagggaatggcttgctttcctgtttctggttagaaggggagccagggggaacccccagtggtttcaggtggcccctgaggtcctggaggcagccgtggatgtgatgcaattggctgtgggaccttagatgtaggacacaacttcagtgttcccatccagaaagacctcactcacagggttgtgctgagaatgacatggggctaagcatgcagagctccctgtaaactgtgaagtgtgatacaaatgtaaatgacagcagtgatctcggggtggcccccggcatgctgccctcccccacgcccatgcctgtggcagcaaaccttgttcatcagtatagctttctttcctgtaacccaggatctaccttggggggcttctcaatactgcattctatgtagccagcctctttaacttggtaagtgagccaccccattctagaacctggaaattggagcccctcaaaaacagttcctgttcaaggaggactgacctgctggggcaatgttgggtgcagtgcagtccctgcttggggtggtcatgtctaggctgttgctctgggcaaagataagttgcaagattcacagaaatgggaaaatgtgaccaagtgtgatcttaacaactgacaaagtttgtaaccaacccaagttagaatgtgtgtcaaacaggaggtagtttagatatgcttccaagaacatgtctgtgttataaccatagtgcctaagcagtgagctctggtttttgaagggcttttaagaaatatatacatgtctgtgtcagtctataacttgcctcctctgggcctgttaaagcatgaagactgcatgacacaagagaaatgcaagccctacggttcctttctcagcagcgaattcacttgagaggatgctcttgactcattctctctgctctttcctgctcagatttctgataaaaatagagagcataggggaacagataatgaaataggaaacccactcgtgggttccacagatacctaccgaaggcctactgtgtgctagaattgtagctcaggagttctcagtgtagctgctcactgaagttaccatggcaggtttcaactggcagaatccaggctccgtcccacccagagattctgatgaaattggtttagggtgtggctcgggcctcaggaattcagaaagcttcccaggtgcttccaatgtgcagccagggttagggacctctaccctagacacaaagtattggacagatagacctggtgccagagatggccaagagctgtaagctaggacgtgccccacctgagctctgcactagctagttcaaacaggcgctttaaaggcagtgtgaaaggggacagcctgttctgccaggtctcagaatgtatatttattaagtgccattaaaagggacctgaacaaaattggatgtcttgtaggcataagggaggaaaataaaatatacttggaaccaagtctatgtcatgaagggaaaataaaaatgtattcagtagcacgtgggttatggtttctcatagaccaggggataagattaaaagtcactgaagagtgggaaaatgcatgttgagaagatgagaatggcctgtattttctccaggggaatctgtgtaatgtgccttttccctctccaaatgcctagaaccatggcactgtgtcttatttatttaaccgttgggctgtctcatactaaacttgcaaagatatttgcctatgaactgaacaagacttccaggagttgaagtctggttcacaagggtaccccttgcctcctgtgatggagtgagaactcttaaacccctcaggccccaactcagttgtggagatgaggacaagattacaatatcaaaagaaagatgaatgaattcttggttaatatgacgaaccccagctcaatgagtaactgatgtgaactgctgggaataaaggacttcaaagatggaaaaaaaaaaaaaaaa

SEQ ID NO: 701 - DNA, 2052 bp, Homo sapiens
tttttttttttccatctttgaagtcctttattcccagcagttcacatcagttactcattgagctggggttcgtcatattaaccaagaattcattcatctttcttttgatattgtaatcttgtcctcatctccacaactgagttggggcctgaggggtttaagagttctcactccatcacaggaggcaaggggtacccttgtgaaccagacttcaactcctggaagtcttgttcagttcataggcaaatatctttgcaagtttagtatgagacagcccaacggttaaataaataagacacagtgccatggttctaggcatttggagagggaaaaggcacattacacagattcccctggagaaaatacaggccattctcatcttctcaacatgcattttcccactcttcagtgacttttaatcttatcccctggtctatgagaaaccataacccacgtgctactgaatacatttttattttcccttcatgacatagacttggttccaagtatattttattttcctcccttatgcctacaagacatccaattttgttcaggtcccttttaatggcacttaataaatatacattctgagacctggcagaacaggctgtcccctttcacactgcctttaaagcgcctgtttgaactagctagtgcagagctcaggtggggcacgtcctagcttacagctcwtggccatctctggcaccaggtctatctgtccaatactttgtgtctagggtagaggtccctaaccctggctgcacattggaagcacctgggaagctttctgaattcctgaggcccgagccacaccctaaaccaatttcatcagaatctctgggtgggacggagcctggattctgccagttgaaacctgccatggtaacttcagtgagcagctacactgagaactcctgagctacaattctagcacacagtaggccttcggtaggtatctgtggaacccacgagtgggtttcctatttcattatctgttcccctatgctctctattttkatcagaaatctgagcargaaagagcagagagaatgagtcaagagcatcctctcaagtgaattcgctgctgagaaaggaaccgtagggcttgcatttctcttgtgtcatgcagtcttcatgctttaacaggcccagaggaggcaagttatagactgacacagacatgtatatatttcttaaaagcccttcaaaaaccagagctcactgcttaggcactatggttataacacagacatgttcttggaagcatatctaaactacctcctgtttgacacacattctaacttgggttggttacaaactttgtcagttgttaagatcacacttggtcacattttcccatttctgtgaatcttgcaacttatctttgcccagagcaacagcctagacatgaccaccccaagcagggactgcactgcacccaacattgccccagcaggtcagtcctccttgaacaggaactgtttttgaggggctccaatttccaggttctagaatggggtggctcacttaccaagttaaagaggctggctacatagaatgcagtattgagaagccccccaaggtagatcctgggttacaggaaagaaagctatactgatgaacaaggtttgctgccacaggcatgggcgtgggggagggcagcatgccgggggccaccccgagatcactgctgtcatttacatttgtatcacacttcacagtttacagggagctctgcatgcttagccccatgtcattctcagcacaaccctgtgagtgaggtctttctggatgggaacactgaagttgtgtcctacatctaaggtcccacagccaattgcatcacatccacggctgcctccaggacctcaggggccacctgaaaccactgggggttccccctggctccccttctaaccagaaacaggaaagcaagccattccctaacctccccacccaccaggccttatcaccgccttcccagagtttcctctatgatttgcatacccctttgttccctagtcctgagaacacagcagagctttc

SEQ ID NO: 702 - DNA, 628 bp, Homo sapiens
  misc_feature (137)..(137): n equals a,t,g, or c
  misc_feature (450)..(450): n equals a,t,g, or c
  misc_feature (465)..(465): n equals a,t,g, or c
  misc_feature (488)..(488): n equals a,t,g, or c
  misc_feature (585)..(585): n equals a,t,g, or c
  misc_feature (619)..(619): n equals a,t,g, or c
gcacctcaggccctccaagcgcaggatgcaggccgtggccaacgtgtccattggggccatgttctgcatgtatgggctcacagcaacctttggatacctcaccttctacagtragtggggctggggctagggctggngggagggggaaggcctggggcaggagcctctgagctctttccttctgtgaccacggacctgtcagtttccaaacagaargtgtgcctcacttgtgtggattttgtcactgtgcatgtatgtatgggtttctggggcattggtcctggtgctctctccacatcctgcatcccgtaccctctgtctcatggsccargcartgtgaaggcggagatgctgcacatgtacagccagaaggacccgctcatcctctgtgtgcgcctggccgtgctgctcgcggtgaccctcactgtgccagtcgtgctgttccctatncgccgggccctgcancagctgcttttcccaggcaaggncttcagctggccacgacatgtggccataagctctgatctgcttgtttggtcaatgtccttgtcatctgtgtgccaacatccgggatatctttggganttaatcgggtcaactcaagccccagctcatcttnatctcccag

SEQ ID NO: 703 - DNA, 923 bp, Homo sapiens
  misc_feature (9)..(9): n equals a,t,g, or c
gggaacggnaaactcgtttgggttkggccawgctgcmcatgtacagccagaaggacccgctcatcctctgtgtgcgcctgkycgtgctgctcgcggtgaccctcactgtgccagtcgtgctgttccctatccgccgggccctgcagcagctgcttttcccaggcaaggccttcagctggccacgacatgtggccatagctctgatcctgcttgttttggtcaatgtccttgtcatctgtgtgccaaccatccgggatatctttggagttatcgggtccacctcagcccccagcctcatcttcatcctccccagcatcttctacctccgcattgtaccctctgaggtggagcctttcttatcctggcccaagatccaggccctgtgctttggagtcctgggagtcctcttcatggccgtcagtctaggctttatgtttgccaactgggccacaggccagagccgcatgtctggacactgatcaggccctgctggcccaggtccctgtgcgcatgcacatggaggggtcagggccgctccctagggtccctcctgcccaacatgtggaggtggctggttcccatgaacgtggttgtcagaggcgggggacagcagaggctgcagactggcccacttccctcctccccagggatgccaagcttggatcatggccctaatcccaaccccaaccccatgggaggaggaggaggaggaagagaggaggaggaggaggaggaggaggaggaggaggaggaggccaggtcctggtggagcctttgcccagcccagtcctctctgcctcctcctggctgaagctgtttgtcaggattaccctcgggctaaagaggaaaaataaagatgttgagctaccaaaaaaaaaaaaaaaaaaaaaaaaaaaaaaaaaaaaaaaaaaaaaagggcggcc

SEQ ID NO: 704 - DNA, 1159 bp, Homo sapiens
ggaattttgttgttctctgtctctttgatttcctggaagacgacaccatgacaatttcaaagaaaatagaacaaaatgaaggaaaaagaggctctgtcttagcacattcctgtgaccagcctgctgtctgtggtgtgccctcctggcccggccttggcacatgttcgtttttgtggttgttgcctggacaggcaactctgcagggctgcttctctacgcatccctttgcctgcctgcctgtgccaggggttgtcaagggcttttgggtcagagtgggcacccctttctccaaggctccctgcaacagctggcctgtccctggtggggctgacagcttccttctcaccctgccaggctgcccaagcgccagaggtgacctatgaggcagaagagggctccttgtggacgttgctactcactagcttggatgggcacctgctggagccagatgctgagtacctccactggctgctaaccaacatcccgggtaaccgggtggctgaaggacaggtgacgtgtccctacctcccccccttccctgcccgaggctccggcatccaccgtcttgccttcctgctcttcaagcaggaccagccgattgacttctctgaggacgcacgcccctcaccctgctatcagctggcccagcggaccttccgcacttttgatttctacaagaaacaccaagaaaccatgactccagccggcttgtccttcttccagtgccgctgggatgactccgtcacctacatcttccaccagcttctggacatgcgggagccggtgtttgagttcgtgcggccgcccccttaccaccccaagcagaagcgcttcccccaccggcagcccctgcgctacctggaccggtacagggacagtcatgagcccacctatggcatctactaaggagccagagtgtgcgcatttcagagcatgggattgatcggcagcaagagtaaagacacagctccagaggcccacactgtggggtctgggccctgccttaggcagcccccctctttggccccctcccgtcaggcccagggcttggagtgaaagtgactctcaggtggtggggtggggaatgtgaataaacatgatttcttgccgggaaaaaaaaaaaaaaaaaaaaaaaaaaaaaaaaaaaaaaaaaaaaaaa

SEQ ID NO: 705 - DNA, 912 bp, Homo sapiens
  misc_feature (275)..(275): n equals a,t,g, or c
ccgggtcgacccacgcgtccgacagcagagatctgtggagtaggattgtgggctggcagtgggtttatcccacagacctaagacagstacttaatttgtatagacccttcccagcctgggcctctgggttttccttctgggtggagatcatcttctgtaggaaatggaactgcttcaagccaagaagcttttacttttactaggtctttttgtgtcctgctgktcaaatattaggaagactgaaccctgtttcggtcttgacagtattacgtttngtgatcccaaaaaaaagtgtttgagtaacctcaagtcatgctgaaagtgaaatacagcttaaagtgggattctgctggacctgactcaacttttcacctcaccgcttggctccgtgcaggcagtatttgagtatgtggttccccctcaagtctgtaggagttgtattgtcaataaagtccaaggccagagtgcttgctttctagtaagtagagagaatttttgaaattcaacgacaaacatttattaagcccttattgtgtacagggctcaaagctaagtgctttgggtgattcagggtgattagggataggattccatcttcaagaagcctcccatctaggaagaaaggtcgataagcatagttttggacacatgggagagcatggctttctctgggcccagtaattactttggtatccagatcattagagaacggaatgccttctattgaactatgtaacagtcacaggtttagatcttctcaagttattattgcctttaatcttcatatgatycctatcctgcagttaggaaatggaamccctaggatatagtgactgtgagctcagaaaattaggttgggagataagccagtagattgaggtggtagattcttcaagatcttgaaggggggaa

SEQ ID NO: 706 - DNA, 321 bp, Homo sapiens
  misc_feature (3)..(3): n equals a,t,g, or c
  misc_feature (298)..(298): n equals a,t,g, or c
ccnaaaaaaaaaaaagaaagaaaactcattctatttttctctttggagcagaggttgcaaaactgtgatgcctaacaaaaacgttgtgtataaaagctccaaaaccaagcattagcctaaattggctataactgcaacttaaatcaaaaactatatccaactagatcttcgttgtggctatgcaactttttgctttgtggcctgaaggtttttactgaggtaacaacctcttatctcttgtccttccctcaaccacaaaagcaaaacccgggaattccggaccggtacctgcaggctnccttctatagtgtcacctaaata

SEQ ID NO: 707 - DNA, 2342 bp, Homo sapiens
  misc_feature (66)..(66): n equals a,t,g, or c
  misc_feature (2332)..(2332): n equals a,t,g, or c
tccgggggctgctcctgcatcatccaacccttccaaacccctacacgatggctgtggctgcacgantcacggcagctaccacggtaacccacatcacagcctttgaccctgacagcacggggcagcaggtgtggcaggatctacttcaggatggacagctggactctcccactggtgatggggggtctgactgggagatggtgggaagagaggttgtccctgtcttgggaccaggggtgggaggcctggtaataagtaggccttgtttccatgttagggatccctatccctggggctgaaggggctcctgtcctgaattctcttgtgtttctctcaggccaaagcacccctacgcagaaaggagtaggcattgctggagctgtgtgtgtttccagcaagttgcgacctcgaggccagtgccgcctggagttttcactggcttgggacatgcccaggatcatgtttggagctaaaggccaagtccactacaggcggtatacaaggttctttggccaggatggagatgcagcacctgccctcagccactatgcactgtgccgatacgcagagtgggaagagaggatctcagcttggcagagcccggtattggatgacagatcactgcctgcctggtacaaatctgcgctgttcaatgaactatacttcctggctgatggaggcacagtgtggctggaagttcttgaggactccctaccagaggagctgggcagaaacatgtgtcacctccgccccaccctacgggactacggtcgatttggctaccttgagggccaggagtaccgcatgtacaacacatatgatgtccacttttatgcttcctttgccctcatcatgctctggcccaaacttgagctcagcctacagtatgacatggctctggccactctcagggaggacctgacacggcgacggtacctgatgagtggggtgatggcacctgtgaaaaggaggaacgtcatcccccatgatattggggacccagatgatgaaccatggctccgcgtcaatgcatatttaatccatgatactgctgattggaaggacctgaacctgaagtttgtgctgcaggtttatcgggactattacctcacgggtgatcaaaacttcctgaaggacatgtggcctgtgtgtctagctgtgatggaatctgaaatgaagtttgacaaggaccatgatggactcattgaaaatggaggctatgcagaccagacctatgatggatgggtgaccacaggccccagtgcttactgtggagggctgtggctggcagctgtggctgtgatggtccagatggctgctctgtgtggggcacaggacatccaggataagttttcttctatcctcagccggggccaagaagcctatgagagactgctgtggaatggccgctattacaactatgacagcagctctcggcctcagtctcgtagtgttatgtctgaccagtgtgctggacagtggttcctgaaggcctgtggctaggagaaggagacactgaggtgtttcctacccaacatgtggtccgtgctctccaaactatctttgagctgaacgtccaggcctttgcaggaggggccatgggggctgtgaatgggatgcagccccatggtgtccctgataaatccagtgtgcagtctgatgaagtctgggtgggtgtggtctacgggctggcagctaccatgatccaagagggcctgacttgggagggcttccagacagctgaaggctgctaccgtaccgtgtgggagcgcctgggtctggccttccagaccccagaggcatactgccagcagcgagtgttccgctcactggcctacatgcggccactgagcatatgggccatgcagctagccctgcaacagcagcagcacaaaaaggcctcctggccaaaagtcaaacagggcacaggactaaggacagggcctatgtttggaccaaaggaagccatggcaaacctgagcccagagtgagccgtctgaactgtgggagggaagtgctaacagcccagcctccagcctggcctttcctccttcccctctgaacctcctgcaaccctgagccatcaggacaatcataccccttcccttctctccacccaattgtgccagtaaatgggggttgagggtgacctaggcagcattagaatcacttatttatttctttcctcacctgttccctgactgcgtgaaatgttcagggaggtcagttgatttccccaggtacattcatggtgtgacagacacatgggtacaaataaaagacccagaaagccaaaaaaaaaaaaaaaaaaaaactcgagggggggcccggnacccaattcg

SEQ ID NO: 708 - DNA, 717 bp, Homo sapiens
ggcacgagctagctgccgccacccgaacagcctgtcctggtgccccggctccctgccccgcgcccagtcatgaccctgcgcccctcactcctcccgctccatctgctgctgctgctgctgctcagtgcggcggtgtgccgggctgaggctgggctcgaaaccgaaagtcccgtccggaccctccaagtggagaccctggtggagcccccagaaccatgtgccgagcccgctgcttttggagacacgcttcacatacactacacgggaagcttggtagatggacgtattattgacacctccctgaccagagaccctctggttatagaacttggccaaaagcaggtgattccaggtctggagcagagtcttctcgacatgtgtgtgggagagaagcgaagggcaatcattccttctcacttggcctatggaaaacggggatttccaccatctgtcccagcggatgcagtggtgcagtatgacgtggagctgattgcactaatccgagccaactactggctaaagctggtgaagggcattttgcctctggtagggatggccatggtgccagccctcctgggcctcattgggtatcacctatacagaaaggccaatagacccaaagtctccaaaaagaagctcaaggaagagaaacgaaacaagagcaaaaagaaataataaataataaattttaaaaaaaaaaaaaaaaaaaaaaaaaaa

SEQ ID NO: 709 - DNA, 713 bp, Homo sapiens
  misc_feature (27)..(27): n equals a,t,g, or c
ccgcgggaacgctgtcctggctgccgncacccgaacagcctgtcctggtgccccggctccctgccccgcgcccagtcatgaccctgcgcccctcactcctcccgctccatctgctgctgctgctgctgctcagtgcggcggtgtgccgggctgaggctgggctcgaaaccgaaagtcccgtccggaccctccaagtggagaccctggtggagcccccagaaccatgtgccgagcccgctgcttttggagacacgcttcacatacactacacgggaagcttggtagatggacgtattattgacacctccctgaccagagaccctctggttatagaacttggccaaaagcaggtgattccaggtctggagcagagtcttctcgacatgtgtgtgggagagaagcgaagggcaatcattccttctcacttggcctatggaaaacggggatttccaccatctgtcccagcggatgcagtggtgcagtatgacgtggagctgattgcactaatccgagccaactactggctaaagctggtgaagggcattttgcctctggtagggatggccatggtgccaccctcctgggcctcattgggtatcacctatacagaaaggccaatagacccaaagtctccaaaaagaagctcaaggaagagaaacgaaacaagagcaaaaagaaataataaataataaattttaaaaaacttaaaaaaa

SEQ ID NO: 710 - DNA, 1165 bp, Homo sapiens
ggcacgagccggtatgtggccccgtctggctagtcccgcctagcgcgcccatttcgagcccaagtttccagctcgggtttccaggctcagaattttccaggagtaggttcttgggcagtggctgtgggagctggaatggcgcagctggaaggttactatttctcggccgccttgagctgtacctttttagtatcctgcctcctcttctccgccttcagccgggcgttgcgagagccctacatggacgagatcttccacctgcctcaggcgcagcgctactgtgagggccatttctccctttcccagtgggatcccatgattactacattacctggcttgtacctggtgtcaattggagtgatcaaacctgccatttggatctttggatggtctgaacatgttgtctgctccattgggatgctcagatttgttaatcttctcttcagtgttggcaacttctatttactatatttgcttttctgcaaggtacaacccagaaacaaggctgcctcaagtatccagagagtcttgtcaacattaacactagcagtatttccaacactttatttttttaacttcctttattatacagaagcaggatctatgttttttactctttttgcgtatttgatgtgtctttatggaaatcataaaacttcagccttccttggattttgtggcttcatgtttcggcaaacaaatatcatctgggctgtcttctgtgcaggaaatgtcattgcacaaaagttaacggaggcttggaaaactgagctacaaaagaaggaagacagacttccacctattaaaggaccatttgcagaattcagaaaaattcttcagtttcttttggcttattccatgtcctttaaaaacttgagtatgcttttgcttctgacttggccctacatccttctgggatttctgttttgtgcttttgtagtagttaatggtggaattgttattggcgatcggagtagtcatgaagcctgtcttcattttcctcaactattctactttttttcatttactctctttttttcctttcctcatctcctgtctcaacaaataaataaataaacataaatgcatgcattcatacatacaattgataaatctaatcttggccaaaaaaaacccaaaacaaaataaaaaaaaaaaaaaaaaa

SEQ ID NO: 711 - DNA, 1160 bp, Homo sapiens
  misc_feature (345)..(345): n equals a,t,g, or c
gccggtatgtggcccygtctggctagtccygyctagcgcgcccatttcgagcccaagtttccagctcgggtttccrggctcagaattttccaggagtrggttcttgggcagtggctgtgggagcwggaatggcgcagctrgarggttactrtttctcggccgccttgagctgtacctttttagtrtcctgcctcctcttctccgccttcagccgggcgytgcgagagccctacatggacgagatcttccacctgcctcaggcgcagcgctactgtgagggccatttctccctttcccagtgggatcccatgattactacattacctggcttgtacctggtgtcanttggagtgrtcaaacctgccatttggatctttggatggtctgaacatgttgtctgctccattgggatgctcagatttgttaatcttctcttcagtgttggcaacttctatttactatatttgcttttctgcaagtacaacccagaaacaaggctgcctcaagtatccagagagtcttgtcaacattaacactagcagtatttccaacactttatttttttaactycctttattatacagaagcaggatctatgttttttacyctttttgcgtatttgatgtgtctttatggaaatcataaaacttcagccttccttggattttgtggcttcatgtttcggcaaacaaatatcatctgggctgtcttctgtgcaggaaatgtcattgcacaaaagttaacggaggcttggaaaactgagctacaaaagaaggaagacagacttccacctattaaaggaccatttgcagaattcagaaaaattcttcagtttcttttggcttattccatgtcctttaaaaacttgagtatgcttttgcttctgacttggccctacatccttctgggatttctgttttgtgcttttgtagtagttaatggtggaattgttattggcgatcggagtagtcatgaagcctgtcttcattttcctcaactattctactttttttcatttactctctttttttcctttcctcatctcctgtctcaacaaataaataaataaacataaatgcatgcattcatacatacaattgataaatctaatcttggccaaaaaaaacccaaaacaaaataaaaaaaaaaaaaaaaaactc

SEQ ID NO: 712 - DNA, 979 bp, Homo sapiens
ctcatgtggggagatgagcgtctttctcctgggaccgaagagggaacaagacggagaaggaagaggcggggctgcgactgtscccagcgtactgccgggctgccgggtccctgctctgggtacttctctgctttcgggcgtctcgtctagaagctgcagcttggcctgtctcacctctacacagaggggctgctggcgcctgacggaaaaaggtccacacacccgatggccggcccggggtggacgctgctgctactgctgctgctgctgctgctgctggggtccatggcagggtatgggccacagaagaagttgaacctgtcccataagggcatcggggagccatgcgggagacacgaggagtgccagagcaactgctgtaccatcaacagcctggccccacacacgctctgcacccctaagaccatcttcctgcagtgcctgccctggaggaagcccaatgggtacagatgctcgcacgactcagagtgccagagcagctgctgcgtccgcaacaacagcccgcaggagttgtgcacgccccaaagcgtcttcctgcagtgtgtgccctggcgcaagcccaacggcgacttctgcagcagccatcargagtgtcacagccagtgctgcatccagctgagggagtacagccccttccgctgcattccccggaccgggatcctggcccagtgcctgcccctgtgatgtgagctcgaacctgggcgcgagggaccggcctgggccctgggatgttcacgcaggaccgcgttgcgcgggggctggttccagcggaagcttcccttacggtttgtgctgctgtttctggggctctgaaaatctgtgggaactgaaaggctgtgaccagcctggtggcgcgaagtgtctgtgagaacaaatcccaggcactggggtgtagcctgattgttaaacatcmataaaggctcctggccgactgaaaaaaaaaaaaaaaaaaactcga

SEQ ID NO: 713 - DNA, 680 bp, Homo sapiens
  misc_feature (7)..(7): n equals a,t,g, or c
  misc_feature (9)..(9): n equals a,t,g, or c
  misc_feature (15)..(16): n equals a,t,g, or c
  misc_feature (22)..(22): n equals a,t,g, or c
cactcantngaacannagctcnagctccaccgcggtggcggccgctctagaactagtggatcccccgggctgcaggaattcggcacgagatatttcgctggaccctagaaaagccaccacgacctgtgggccatgatgctaccccaatggctgctgctgctgttccttctcttcttctttctcttcctcctcaccaggggctcactttctccaacaaaatacaaccttttggagctcaaggagtcttgcatccggaaccaggactgcgagactggctgctgccaacgtgctccagacaattgcgagtcgcactgcgcggagaaggggtccgagggcagtctgtgtcaaacgcaggtgttctttggccagtatagagcgtgtccctgcctgcggaacctgacttgtatatattcaaagaatgagaaatggcttagcatcgcctatggccgttgtcagaaaattggaaggcagaagttggctaagaaaatgttcttctagtgctccctccttcttgctgsctcctcctyctycacctgctctcctccctacccagagctctgtgktcaccctgttccccagagcctccaccatgagtggagggaagtggggagtgattgaaataaagagctttttcaatgaaaaaaaaaaaaaaaaaaaaaaaaactcgagggggggcccgg

SEQ ID NO: 714 - DNA, 1188 bp, Homo sapiens
gctcgaactctccactgtccccatttcctgcaacagcatctcagagggcttgaggtggctatcaggccttccatcacagcataaagctccttcagggagagaagagcgaaggcacccagrctggggaacagcagctcctactatacctaccctgcccactctggtccaaccgtgggcttggcctgactttagactggaaccccttagtgctcctgttcctggtgtggagcagatccacctaccccaggggaaatgccaactactttgccttcagacctgatgctcctgtggttgggcctgccaagcctgccctccccagtggaagaagagggccgtcttgtgaaaggcctcaggctgacccttgcagcaccagcctctgaggtactgccagactgggaagaccctcccagccacccaacagcgtgggcccagcccaggacacatcagcccgacactccaaattctatcaagagtggcatttattctccttgtggaggtgcggtgctccggggagctggtgctattgtgcttaggaaggaggtctgtccgtccgtccgtctrtmcggccggcctggccccaaatgggggcggaagaggggcacggcccgagtaaaaatcccggcctattccgggtgggaatatgtacaaggcggcggggcacaggcgggggtgggggcgggcgggccggcggccgcagcccccacccgagggcccccgcacctcgggccctacttgtagaatcagtacaaaataggtgctacctaaacgttccttctacctgaattcgctaagtcggttattgtgctgcttagttatgggggcgggagggggcccatggctttccacggcggcggggtgtagggggaagcaggagaccctgacgggcccacagccctccagctttctccttaggtaggtagacaggagtatggggtggggtgaggtgggggcgcctgtgtgtgcgtgtgcatgcggcacaggtgggcaggccccagcttgggagctgtgcaggcaccacacctggttgtgtagggtgtttggatgtgggcactgctgtgcagagcggtgggtcatccttgtgggggcagccacgcttgctgctgggggtgaggctggccacaccataggctacagctggcaccttcttctccagccatgstyttgcccctsgtggacwtggcagatgtg

SEQ ID NO: 715 - DNA, 1342 bp, Homo sapiens
ggcccgcccaggaggtattctgcctttgactgcaactcttgtcgtcttatgtgggtgttgaattgatctgtctctgcagccagatccaggctcctggaagaaccatgtccggcagctactggtcatgccaggcacacactgctgcccaagaggagctgctgtttgaattatctgtgaatgttgggaagaggaatgccagagctgccggctgaaaattacccaaccaagagaaatctgcaggatggactttctggtcctcttcttgttctacctggcttcggtgctgatgggtcttgttcttatctgcgtctgctcgaaaacccatagcttgaaaggcctggccaggggaggagcacagatattttcctgtataattccagaatgtcttcagagagccrtgcatggattgcttcattaccttttccatacgagaaaccacaccttcattgtcctgcacctggtcttgcaagggatggtttatactgagtacacctggggaagtatttggctactgtcaggagctggagttgtccttgcattaccttcttctgccctatctgctgctaggtgtaaacctgttttttttcaccctgacttgtggaaccaatcctggcattataacaaaagcaaatgaattattatttcttcatgtttatgaatttgatgaagtgatgtttccaaagaacgtgaggtgctctacttgtgatttaaggaaaccagctcgatccaagcactgcagtgtgtgtaactggtgtgtgcaccgtttcgaccatcactgtgtttgggtgaacaactgcatcggggcctggaacatcaggtacttcctcatctacgtcttgaccttgacggcctcggctgccaccgtcgccattgtgagcaccacttttctggtccacttggtggtgatgtcagatttataccaggagacttacatcgatgaccttggacacctccatgttatggacacggtctttcttattcagtacctgttcctgacttttccacggattgtcttcatgctgggctttgtcgtggttctgagcttcctcctgggtggctacctgttgtttgtcctgtatctggcggccaccaaccagactactaacgagtggtacagaggtgactgggcctggtgccagcgttgtccccttgtggcctggcctccgtcagcagagccccaagtccaccggaacattcactcccatgggcttcggagcaaccttcaagagatctttctacctgcctttccatgtcatgagaggaagaaacaagaatgacaagtgtatgactgcctttgagctgtagttcccgtttatttacacatgtggatcctcgttttcca

SEQ ID NO: 716 - DNA, 1955 bp, Homo sapiens
ggcacgagtgccatccctgtatttgctgccatgctcttccttttctccatggctacactgttgaggaccagcttcagtgaccctggagtgattcctcgggcgctaccagatgaagcagctttcatagaaatggagatagaagctaccaatggtgcggtgccccagggccagcgaccaccgcctcgtatcaagaatttccagataaacaaccagattgtgaaactgaaatactgttacacatgcaagatcttccggcctccccgggcctcccattgcagcatctgtgacaactgtgtggagcgcttcgaccatcactgcccctgggtggggaattgtgttggaaagaggaactaccgctacttctacctcttcatcctttctctctccctcctcacaatctatgtcttcgccttcaacatcgtctatgtggccctcaaatctttgaaaattggcttcttggagacattgaaaggaaactcctggaactgttctagaagtcctcatttgcttctttacactctggtccgtcgtgggactgactggatttcatactttcctcgtggctctcaaccagacaaccaatgaaagacatcaaaggatcatggacagggaagaatcgcgtccagaatccctacagccatggcaatattgtgaagaactgctgtgaagtgctgtgtggccccttgccccccagtgtgctggatcgaaggggtattttgccactggaggaaagtggaagtcgacctcccagtactcaagagaccagtagcagcctcttgccacagagcccagcccccacagaacacctgaactcaaatgagatgccggaggacagcagcactcccgaagagatgccacctccagagcccccagagccaccacaggaggcagctgaagctgagaagtagcctatctatggaagagacttttgtttgtgtttaattagggctatgagagatttcaggtgagaagttaaacctgagacagagagcaagtaagctgtcccttttaactgtttttctttggtctttagtcacccagttgcacactggcattttcttgctgcaagcttttttaaatttctgaactcaaggcagtggcagaagatgtcagtcacctctgataactggaaaaatgggtctcttgggccctggcactggttctccatggcctcagccacagggtccccttggaccccctctcttccctccagatcccagccctcctgcttggggtcactggtctcattctggggctaaaagttttcgagactggctcaaatcctcccaagctgctgcacgtgctgagtccagaggcagtcacagagacctctggccaggggatcctaactgggttcttggggtcttcaggactgaagaggagggagagtggggtcagaagattctcctggccaccaagtgccagcattgcccacaaatccttttaggaatgggacaggtaccttccactagttgtatttattagtgtagcttctcctttgtctcccatccactctgacaccttaagccccactcttttcccattagatatatgtaagtagttgtagtagagataataattgacatttctcgtagactacccagaaacttttttaatacctgtgccattctcaataagaatttatgagatgccagcggcatagcccttcacactctctgtctcatctctcctcctttctcattagccccttttaatttgtttttccttttgactcctgctcccattaggagcaggaatggcagtaataaaagtctgcactttggtcatttcttttcctcagaggaagcctgagtgctcacttaaacactatcccctcagactccctgtgtgaggcctgcagaggccctgaatgcacaaatgggaaaccaaggcacagagaggctctcctctcctctcctctcccccgatgtaccctcaaaaaaaaaaaaaaaaaa

SEQ ID NO: 717 - DNA, 1338 bp, Homo sapiens
  misc_feature (133)..(133): n equals a,t,g, or c
  misc_feature (867)..(867): n equals a,t,g, or c
  misc_feature (1338)..(1338): n equals a,t,g, or c
cttccggttctccgggcagctgccactgctgtagcttctgccacctgccacgaccgggcctctccctggcgtttggtcacctctgcttcattctccaccgcgcctatggtccctcttggagccagcgtggcgngcctggcggctcccgggtggtgagagagcggtccgggaacgatgaaggcctcgcagtgctgctgctgtctcagccacctcttggcttccgtcctcctcctgctgttgctgcctgaactaagcgggyccctggmagtcctgctgcaggcagccgaggccgcgccaggtyttgggcctcctgaccctagaccaggacattaccgccgctgccaccgggccctwacccctgcccagcagccgggccgtggtctggctgaagctgcgggggccgcggggctccgagggaggcaatggcagcaaccctgtggccgggcttgagacggacgatcacggagggaaggccggggaargctcggtgggtggcggccttgctgtgagccccaaccctggcgacaagcccatgacccagcgggccctgaccgtgttgatggtggtgagcggcgcggtgctggtgtacttcgtggtcaggacggtcaggatgagaagaagaaaccgaaagactaggagatatggagttttggacactaacatagaaaatatggaattgacacctttagaacaggatgatgaggatgatgacaacacgttgtttgatgccaatcatcctcgaagataagaatgtgccttttgatgaaagaactttatctttctacaatgaagagtggaatttctatgtttaaggaataagaagccactatatcaatgttgggggggtatttaagttacatatatttnaacaacctttaatttgctgttgcaataaataccgtatccttttattatatctttatatgtatagaagtactctgttaatgggctcagagatgttggggataaagtatactgtaataatttatctgtttgaaaattactataaaacggtgttttctgrtcggtttttgtttcctgcttaccatatgattgtaaattgttttatgtattaatcagttaatgctaattatttttgctgatgtcatatgttaaagagctataaattccaacaaccaactggtgtgtaaaaataatttaaaatytcctttactgaaaggtatttcccatttttgtggggaaaagaagccaaatttattactttgtgttggggtttttaaaatattaagaaatgtctaagttattgtttgcaaaacaataaatatgattttaaattctcttaaaaaaaaaaaaaaaaaccccgggggggggcccggn

SEQ ID NO: 718 - DNA, 802 bp, Homo sapiens
  misc_feature (337)..(337): n equals a,t,g, or c
  misc_feature (359)..(359): n equals a,t,g, or c
ggtgggtgaccagagagtcctgtctatcctaggaggagaacattcagcccaaatcccagccccatcatgcacagatcagagccatttctgaaaatgtcgctgctgattctgcttttcctgggattggcagaagcctgtactcctcgtgaagtcaacttgctgaaagggatcataggtctcatgagcagactgtcaccggatgagatcctaggcttgctgagcctccaagtactgcatgaagaaacaagtggctgcaaggaggaagttaaacccttctcaggcaccaccccatccaggaaaccactccccaagagggaagaacacgtggaayttcctngaaatgcgsctacatggtgrtngacctacctcttcgtatcctacaacaaaggggactggttcactttttcctcccaagtgttactgccaytactgtaacttggaactggacatcagggatgatccctgctgttctttctagtgagcctgctccatctcagcttagccttcacaaggcctccatctcccaggcattctaacctctgaagaaagctctctgtcccctggactgcctgtgtggagggtaatgaactgggtcctttaaggaatggcacctgggtgcccagaggcatggccagaaggtgtctgtgggggccatgccttagggggatgcacccagggcggctgagagagcaactgcaggagtttcccctaaaatctctcctccagatcgttctcgaactttccccactacttccataataaaatgtatacttgttgaaaaaaaaaaaaaaaaaaactcgag

SEQ ID NO: 719 - DNA, 1251 bp, Homo sapiens
gcaccgtggagctgcaggagatgccccttgtccaggagttgccactgctgaagcttggggtgaattaccttccgtccatcttcatcgctggggtcaattttgtgctgccgcccgtgttcaagctcattgctccactggagggctacactcggagtcgccagatcgtttttatcctgctcaggaccgtgtttcttcgcctcgcctccctggtggtcctgctcttctctctctggaatcagatcacttgtgggggcgactccgaggctgaggactgcaaaacctgtggctacaattacaaacaacttccgtgctgggagactgtcctgggccaggaaatgtacaaacttctgctctttgatctgctgactgtcttggcagtcgcgctgctcatccagtttcctagaaagctcctctgtggcctctgtcctggggcgctgggtcgtctggcggggacccaggagttccaggtgcccgacgaggtgctggggctcatctacgcgcagacggtggtctgggtggggagttttttctgccctttactgcccctgcttaacacggtcaagttcctgctgcttttctacctgaagaagcttaccctcttctccacctgctccccggctgcccgcaccttccgggcctccgcggcgaatttctttttccccttggtccttctcctgggtctggccatctccagcgttcccctgctttacagcatcttcctgatcccgccttctaagctttgtggtccattccgggggcagtcgtccatctgggcccagatccctgagtctatttccagcctccctgagaccacccagaatttcctcttcttcctggggacccaggcttttgctgtgccccttctgctgatctccagcatcctgatggcgtacactgtggctctggctaactcctacggacgcctcatctctgagctcaaacgtcagagasagacggaggcgcagaataaagtcttcctggcacggcgcgctgtggcgctgacctccaccaaaccggctctttgacccccgcagcccacgtcccgctttcagaccccaggcccattgtaagcctaggtcacaacatctgtaaactaggagaactggagaagactccacgcccttccagctttggtatctggagatttccagggcccctcgccgccacgtccctgactctcgggtgatcttccttgtatcaataaatacagccgaggttgctgagaaaaaaaaaaaaaaaaaaaagtcgagc

SEQ ID NO: 720 - DNA, 517 bp, Homo sapiens
cttcctggggacccaggcttttgctgtgccccttctgctgatctcsaggagccagacgtttggatataatggaagagcgtgtcaggagtggcttccgttsctgatctccagcatcctgatggcgtacactgtggctctggctaactcctacggacgcctcatctctgagctcaaacgtcagagasagacggaggcgcagaataaagtcttcctggcacggcgcgctgtggcgctgacctccaccaaaccggctctttgacccccgcagcccacgtcccgctttcagaccccaggcccattgtaagcctaggtcacaacatctgtaaactaggagaactggagaagactccacgcccttccagctttggtatctggagatttccagggcccctcgccgccacgtccctgactctcgggtgatcttccttgtatcaataaatacagccgaggttgctgaaaaaaaaaaaaaaaaaaaaaaaaaaaaaaaaaaaaaaaaaaaaaaaaaaaaaaaactcga

SEQ ID NO: 721 - DNA, 1441 bp, Homo sapiens
acagaaggggagacgtggcgcagcgactcggaggttcgcctccagcttgcgcatcatctgcggccgggtcccgatgagcctcctgttgcctccgctggcgctgctgctgcttctcgcggcgcttgtggccccagccacagccgccactgcctaccggccggactggaaccgtctgagcggcctaacccgcgcccgggtagagacctgcgggggatgacagctgaaccgcctaaaggaggtgagctttgaaggaagaggtccctagctctgttccccctgagcctcttggggagtgggcaacatggtcccaatgactggggcggggaggggggaaggatccctaggctgagagtctagcctaggctgggagtctagcctgcacctgacttgctttatgacctcactgggcttcagtgtctcgtctgtacctcgagtagactgaggtcatggtctctgatgctctggttcctccccaggtgaaggctttcgtcacgcaggacattccattctagtatccttctgttctgggggaggggaaatgggatgggcacctgggagaatctccacgtaacttcagaaaggggtggcagatggttttcaactgacaagttgaattgattggtagtggctcccagaggattctgaggtggtctccatgttgggtgggcaagagagattgactagtgatgactgccacagaatggagaggagggccctttacttctttgaaccctaattttctcacgtataagcggagaccctggcccctcccgggcacagagtaagctctgagcaaaggaggcaatgctgttcccatcagtaaggctgcggaaaccaccacctccctctgcccaccaccccgctccttaacaccacctccagtcacaacctggtgatgaaacacctccctggggccgaccctgagctcgtgctgctgggccgccgctacgaggaactagaggtgaggccgtgggaggtgggctgggggcgaggccagaggcgaggcccagcctgctgaccccgcccctcctccgcctcagcgcatcccactcagtgaaatgacccgcgaagagatcaatgcgctagtgcaggagctcggcttctaccgcaaggcggcgcccgacgcgcaggtgccccccgagtacgtgtgggcgcccgcgaagcccccagaggaaacttcggaccacgctgacctgtaggtccgggggcgcggcggagctgggacctacctgcctgagtcctggagacagaatgaagcgctcagcatcccgggaatacttctcttgctgagagccgatgcccgtccccgggccagcagggatggggttggggaggttctcccaaccccactttcttccttccccagctccactaaattccctcctgccttaaaaaaaaaaaaaaaaaaaaaaaaaaaaaaaaaaaaaaaaagggcggccgc

SEQ ID NO: 722 - DNA, 2674 bp, Homo sapiens
  misc_feature (2607)..(2607): n equals a,t,g, or c
  misc_feature (2611)..(2611): n equals a,t,g, or c
  misc_feature (2621)..(2621): n equals a,t,g, or c
  misc_feature (2634)..(2634): n equals a,t,g, or c
  misc_feature (2650)..(2650): n equals a,t,g, or c
  misc_feature (2660)..(2660): n equals a,t,g, or c
  misc_feature (2669)..(2669): n equals a,t,g, or c
gatccctcccatctcacagtacctcacaggtctcttcccccgagcagtgcattgctggagcgaggagaagctcacgaatcagctgcaggtctctgttttgaaaaagcagagatacagaggcagaggaaaagggtggactcctatgtgacctgttcttagagcaagacaatcaccatctgaattccagaagccctgttcatggttggggatattttctcgactgcatggaatcagaaagaagcaaaaggatgggaaatgcctgcattcccctgaaaagaattgcttatttcctatgtctcttatctgcgcttttgctgactgaggggaagaaaccagcgaagccaaaatgccctgccgtgtgtacttgtaccaaagataatgctttatgtgagaatgccagatccattccacgcaccgttcctcctgatgttatctcattatcctttgtgagatctggttttactgaaatctcagaagggagttttttattcacgccatcgctgcagctcttgttattcacatcgaactcctttgatgtgatcagtgatgatgcttttattggtcttccacatctagagtatttattcatagaaaacaacaacatcaagtcaatttcaagacatactttccggggactaaagkcattaattcacttgagccttgcaaacaacaatctccagacactcccaaaagatattttcaaaggcctggattctttaacaaatgtggacctgaggggtaattcatttaattgtgactgtaaactgaaatggctagtggaatggcttggscacaccaatgcaactgttgaagacatctactgcgaaggccccccagaatacaagaagcgcaaaatcaatagtctctcctcgaaggatttcgattgcatcattacagaatttgcaaagtctcaagacctgccttatcaatcattgtccatagacactttttcttatttgaatgatgagtatgtagtcatcgctcagccttttactggaaaatgcattttccttgaatgggaccatgtggaaaagaccttccggaattatgacaacattacaggcacatccactgtagtatgcaagcctatagtcattgaaactcagctctatgttattgtggcccagctgtttggtggctctcacatctataagcgagacagttttgcaaataaattcataaaaatccaggatattgaaattctcaaaatccgaaaacccaatgacattgaaacattcaagattgaaaacaactggtactttgttgttgctgacagttcaaaagctggttttactaccatttacaaatggaacggaaacggattctactcccatcaatccttacacgcgtggtacagggacactgatgtggaatatctagaaatagtcagaacacctcagacactcagaacgcctcatttaattctgtctagtagttcccascgtcctgtaatttatcagtggaacaaagcaacacaattattcactaaccaaactgacattcctaacatggaggatgtgtacgcagtgaagcacttctcagtgaaaggggacgtgtacatttgcttgacaagattcattggtgattccaaagtcatgaaatggggaggctcctcgttccaggatattcagaggatgccatcgcgaggatccatggtgttccagcctcttcaaataaataattaccaatatgcaattcttggaagtgattactcctttactcaagtgtataactgggatgcagagaaagccaaatttgtgaaatttcaggaattaaatgttcaggcaccaagatcattcacacatgtgtccattaataagcgtaattttctttttgcttccagttttaagggaaatacacagatttacaaacatgtcatagttgacttaagcgcatgagacaccaaattctgtggctgccatcagaaattttctacagtacatgacccggatgaactcaatgcatgatgactcttcttatcacacttgcaaatgaatgcctttcaaacattgagactgctagaaccaagcactaccagtatctccatccttaactgtccagtccagtgatgtgggaagttaccttttataagacaaaatttaattgtgtaactgttctttgcagtgaagatgtgtaaataagcgtttaatggtatctgttactccaaaaagaaatattaatatgtacttttccatttatttattcatgtgtacagaaacaactgccaaataaaatgtttacattttctttcataaaaaaaaaaaaaaaaaaactcgagggggggcccggtacccaattcgccctatagtgagtcgtattacaattcactggccgtcgttttacaacgtcgtgactgggaaaaccctggcgttacccaacttaatcgccttgcagcacatccccctttcgccagctggcgtaatagcgaagaggccgcaccgatcgcccttcccaacagttgcgcagcctgaatggcgaatggcaaattgtaagcgttaatattttgttaaaattccgcgttaaattttgttaaatcagctcattttttaacccaataggccgaaattcggcaaaaatcccttattaatcaaaagaaatagaaccganaatnggggttgaantgttgtttccaantttgggaaacaaaaantcccacttantttaaaagnaaacg

SEQ ID NO: 723 - DNA, 2207 bp, Homo sapiens
ggcacgagcacgaatcagctgcaggtctctgttttgaaaaagcagagatacagaggcagaggaaaagggtggactcctatgtgacctgttcttagagcaagacaatcaccatctgaattccagaagccctgttcatggttggggatattttctcgactgcatggaatcagaaagaagcaaaaggatgggaaatgcctgcattcccctgaaaagaattgcttatttcctatgtctcttatctgcgcttttgctgactgaggggaagaaaccagcgaaccaaaatgccctgccgtgtgtacttgtaccaaagataatgctttatgtgagaatgccagatccattccacgcaccgttcctcctgatgttatctcattatcctttgtgagatctggttttactgaaatctcagaagggagttttttattcacgccatcgctgcagctcttgttattcacatcgaactcctttgatgtgatcagtgatgatgcttttattggtcttccacatctagagtatttattcatagaaaacaacaacatcaagtcaatttcaagacatactttccggggactaaagtcattaattcacttgagccttgcaaacaacaatctccagacactcccaaaagatattttcaaaggcctggattctttaacaaatgtggacctgaggggtaattcatttaattgtgactgtaaactgaaatggctagtggaatggcttggccacaccaatgcaactgttgaagacatctactgcgaaggccccccagaatacaagaagcgcaaaatcaatagtctctcctcgaaggatttcgattgcatcattacagaatttgcaaagtctcaagacctgccttatcaatcattgtccatagacactttttcttatttgaatgatgagtatgtagtcatcgctcagccttttactggaaaatgcattttccttgaatgggaccatgtggaaaagaccttccggaattatgacaacattacaggcacatccactgtagtatgcaagcctatagtcattgaaactcagctctatgttattgtggcccagctgtttggtggctctcacatctataagcgagacagttttgcaaataaattcataaaaatccaggatattgaaattctcaaaatccgaaaacccaatgacattgaaacattcaagattgaaaacaactggtactttgttgttgctgacagttcaaaagctggttttactaccatttacaaatggaacggaaacggattctactcccatcaatccttacacgcgtggtacagggacactgatgtggaatatctagaaatagtcagaacacctcagacactcagaacgcctcatttaattctgtctagtagttcccaacgtcctgtaatttatcagtggaacaaagcaacacaattattcactaaccaaactgacattcctaacatggaggatgtgtacgcagtgaagcacttctcagtgaaaggggacgtgtacatttgcttgacaagattcattggtgattccaaagtcatgaaatggggaggctcctcgttccaggatattcagaggatgccatcgcgaggatccatggtgttccagcctcttcaaataaataattaccaatatgcaattcttggaagtgattactcctttactcaagtgtataactgggatgcagagaaagccaaatttgtgaaatttcaggaattaaatgttcaggcaccaagatcattcacacatgtgtccattaataagcgtaattttctttttgcttccagttttaagggaaatacacagatttacaaacatgtcatagttgacttaagcgcatgagacaccaaattctgtggctgccatcagaaattttctacagtacatgacccggatgaactcaatgcatgatgactcttcttatcacacttgcaaatgaatgcctttcaaacattgagactgctagaaccaagcactaccagtatctccatccttaactgtccagtccagtgatgtgggaagttaccttttataagacaaaatttaattgtgtaactgttctttgcagtgaagatgtgtaaataagcgtttaatggtatctgttactccaaaaagaaatattaatatgtacttttccatttatttattcatgtgtacagaaacaactgccaaataaaatgtttacattttctttcataaaaaaaaaaaaaaaaaaa

SEQ ID NO: 724 - DNA, 470 bp, Homo sapiens
  misc_feature (315)..(315): n equals a,t,g, or c
ccgccgccgccgctacagcgaccctgaccgccgtccgagccgccagacacccagagagacgccagaggccgcggaggggcgaagacccggagtaactctcccttccaccccaacccggatcgccagccctcgagagctctgtgctccacgccgaggatgcaccgtctctggattggtccggccttcttcctaatgacatcgctcagcgtctctggagccgtcatcccgcggaatgggggcccagggggtgtcagytcggggccttgcctcttgcagctactctgtggtcaggccgggtcctccaccatcaggaanatcccatcctgagctctgtctcctgcccctcctgctgtgggatgctgagcacagagcccacagcccatctgcctcttcacctccctgaatccgtgtccatctgcaataaacgacagcctcggctgcctcgtgctgaaaaaaaaaaaaaaaaaaaa

SEQ ID NO: 725 - DNA, 1186 bp, Homo sapiens
gaattcggcacgagattgaatgttccagataatccctttcccagtcctgcctgacatctgggtagggggtttgtccctggaattctgggacactggctggggtttgaggagagaagccagtacctacctggctgcaggatgaagctggccagtggcttcttggttttgtggctcagccttgggggtggcctggctcagagcgacacgagccctgacacggaggagtcctattcagactggggccttcggcacctccggggaagctttgaatccgtcaatagctacttcgattcttttctggagctgctgggagggaagaatggagtctgtcagtacaggtgccgatatggaaaggcaccaatgcccagacctggctacaagccccaagagcccaatggctgcggctcctatttcctgggtctcaaggtaccagaaagtatggacttgggcattccagcaatgacaaagtgctgcaaccagctggatgtctgttatgacacttgcggtgccaacaaatatcgctgtgatgcaaaattccgatggtgtctccamtcgatctgctctgaccttaagcggagtctgggctttgtctccaaagtggaagcctgtgattccctggttgacactgtgttcaacaccgtgtggaccttgggctgccgcccctttatgaatagtcagcgggcagcttgcatctgtgcagaggaggagaaggaagagttatgaggaagaagtgattccttcctggttttgagtgacaccacagctgtcagccttcaagatgtcaagtcttcgartcagcgtgactcattcgttcttccaacagtttggacaccacaaagcaggagaaagggaacatttttctacagctggaaagtgagtcctatcctttgaggaaatttgaaaaaagacatggagtggtttgaaagctactcttcatttaagactgctctccccaaccaagacacatttgcctggaaattcagttcttagcttaaagactaaaatgcaagcaaaccctgcaattcctggacctgatagttatattcatgagtgaaattgtggggagtccagccatttgggaggcaatgactttctgctggcccatgtttcagttgccagtaagcttctcacatttaataaagtgtactttttagaacatttggaaaaaaaaaaaaaaaaaactcga

SEQ ID NO: 726 - DNA, 470 bp, Homo sapiens
  misc_feature (444)..(444): n equals a,t,g, or c
  misc_feature (458)..(458): n equals a,t,g, or c
  misc_feature (469)..(470): n equals a,t,g, or c
ctgcaggaattcggcacgagcggcacgagtgccaatacaactgctgtcgccctcaatgcgccagcccaccctgcaaggctcctaccacctggacccgcagtagccctcctactgctccgggggagctgcagtctctgttgctgccaccaaccgcataaggcgagctgcaaagccatgccatctgcaggctccaatgtaccatagatgactcctcctcttcctcctcctccagcctggcttggagcagctagatgggcaaagctagaaaagcctaaaacgggatgcagggagtggtagcattagagcctcaccttgtcacgctggccactgggtggcagggaccagtttcagcaaaggcactcacacccaccctccaaagtccagcctctmmttctggcaaaagctggccaggaactggggcccagggtgagtgggtgtgctttnccaaaaaccagggnaggttatagcnn

SEQ ID NO: 727 - DNA, 1821 bp, Homo sapiens
ggaattcggcacgagcgtggatccaagatggcgacggcgatggattggttgccgtggtctttactgcttttctccctgatgtgtgaaacaagcgccttctatgtgcctggggtcgcgcctatcaacttccaccagaacgatcccgtagaaatcaaggctgtgaagctcaccagctctcgaacccagctaccttatgaatactattcactgcccttctgccagcccagcaagataacctacaaggcagagaatctgggagaggtgctgagaggggaccggattgtcaacacccctttccaggttctcatgaacagcgagaagaagtgtgaagttctgtgcagccagtccaacaagccagtgaccctgacagtggagcagagccgactcgtggccgagcggatcacagaagactactacgtccacctcattgctgacaacctgcctgtggccacccggctggagctctactccaaccgagacagcgatgacaagaagaaggaaagtgatatcaaatgggcctctcgctgggacacttactgaccatgagtgacgtccagatccactggttttctatcattaactccgttgttgtggtcttcttcctgtcaggtatcctgagcatgattatcattcggaccctccggaaggacattgccaactacaacaaggaggatgacattgaagacaccatggaggagtctgggtggaagttggtgcacggcgacgtcttcaggccccccccagtaccccatgatcctcagctccctgctgggctcaggcattcagctgttctgtatgatcctcatcgtcatctttgtagccatgcttgggatgctgtcgccctccagccggggagctctcatgaccacagcctgcttcctcttcatgttcatgggggtgtttggcggattttctgctggccgtctgtaccgcactttaaaaggccatcggtggaagaaaggagccttctgtacggcaactctgtaccctggtgtggtttttggcatctgcttcgtattgaattgcttcatttggggaaagcactcatcaggagcggtgccctttcccaccatggtggctctgctgtgcatgtggttcgggatctccctgcccctcgtctacttgggctactacttcggcttccgaaagcagccatatgacaaccctgtgcgcaccaaccagattccccggcagatccccgagcagcggtggtacatgaaccgatttgtgggcatcctcatggctgggatcttgccttcggcgccatgttcatcgagctcttcttcatcttcagtgctatctgggagaatcagttctattacctctttggcttcctgttccttgttttcatcatcctggtggtatcctgttcacaaatcagcatcgtcatggtgtacttccagctgtgtgcagaggattaccgctggtggtggagaaatttcctagtctccgggggctctgcattctacgtcctggtttatgccatcttttatttcgttaacaagtgactgcagcgccaagcggcatccaccaagcatcaagttggagaaaagggaacccaagcagtagagagcgatattggagtcttttgttcattcaaatcttggatttttttttttccctaagagattctctttttagggggaatgggaaacggacacctcataaagggttcaaagatcatcaatttttctgactttttaaatcattatcattattatttttaattaaaaaaatgcctgtatgcctttttttggtcggattgtaaataaatataccattgtcctacaaaaaaaaaaaaaaaaaactcgagggggggcc

SEQ ID NO: 728 - DNA, 1094 bp, Homo sapiens
ccacgcgtccggtgcacggcgacgtcttcaggcccccccagtaccccatgatcctcagctccctgctgggctcaggcattcagctgttctgtatgatcctcatcgtcatctttgtagccatgcttgggatgctgtcgccctccagccggggagctctcatgaccacagcctgcttcctcttcatgttcatgggggtgtttggcggattttctgctggccgtctgtaccgcactttaaaaggccatcggtggaagaaaggagccttctgtacggcaactctgtaccctggtgtggtttttggcatctgcttcgtattgaattgcttcatttggggaaagcactcatcaggagcggtgccctttcccaccatggtggctctgctgtgcatgtggttcgggatctccctgcccctcgtctacttgggctactacttcggcttccgaaagcagccatatgacaaccctgtgcgcaccaaccagattccccggcagatccccgagcagcggtggtacatgaaccgatttgtgggcatcctcatggctgggatcttgcccttcggcgccatgttcatcgagctcttcttcatcttcagtgctatctgggagaatcagttctattacctctttggcttcctgttccttgttttcatcatcctggtggtatcctgttcacaaatcagcatcgtcatggtgtacttccagctgtgtgcagaggattaccgctggtggtggagaaatttcctagtctccgggggctctgcattctacgtcctggtttatgccatcttttatttcgttaacaagctggacatcgtggagttcatcccctctctcctctactttggctacacggccctcatggtcttgtccttctggctgctaacgggtaccatcggcttctatgcagcctacatgtttgttcgcaagatctatgctgctgtgaagatagactgattggagtggaccacggccaagcctgctccgtcctcggacaggaagccaccctgcgtgggggactgcaggcacgcaaaataaaataactcctgctcgtttggaatgtaaaaaaaaaaaaaaaaaaaaaaaaaaaaaaaaaaa

SEQ ID NO: 729 - DNA, 1042 bp, Homo sapiens
  misc_feature (11)..(11): n equals a,t,g, or c
  misc_feature (15)..(15): n equals a,t,g, or c
  misc_feature (941)..(941): n equals a,t,g, or c
  misc_feature (1016)..(1016): n equals a,t,g, or c
  misc_feature (1022)..(1022): n equals a,t,g, or c
  misc_feature (1028)..(1028): n equals a,t,g, or c
ggttcgtcaanaaanctttaagaggtaccccccggaatttttgggtcgacccacgcgtccgctttcttctatttcttgtggatattatggctaataacacarcaagtttagggagtccatggccagaaaacttttgggaggaccttatcatgtccttcactgtatccatggcaatcgggctggtacttggaggatttatttgggctgtgttcatttgtctgtctcgaagaagaagagccagtgctcccatctcacagtggagttcaagcaggagatctaggtcttcttacacccacggcctcaacagaactggattttaccgccacagtggctgtgaacgtcgaagcaacctcagcctggccagtctcaccttccagcgacaagcttccctggaacaagcaaattcctttccaagaaaatcaagtttcagagcttctactttccatccctttctgcaatgtccaccacttcctgtggaaactgagagtcagctggtgactctcccttcttccaatatctctcccaccatcagcacttcccacagtctgagccgtcctgactactggtccagtaacagtcttcgagtgggcctttcaacaccgcccccacctgcctatgagtccatcatcaaggcattcccagattcctgagtagggtggcttttggtttttgtttctttcttgtcttgtcttttattgaaaggaaatcaaaaataggctaaacagaattttgagggcatggcccaaataactcatgagttccaagttgaaacatggttgtgcaagttggacattacaatgtaaaacacattttcttcaaacacgttttcccttttgtttcaaaaaatgtaatattttcccccaagcgttttatatttatgtattttgtattcaatgtgaggcttattaaaaatagtgattctaatgtaagaatcagctaangatgcattatatatattttaattaaaattaaaacttcagawatttgkgggattacaatcccawttacytcccaanggggcnttaaanggggggaaaaaaaa

SEQ ID NO: 730 - DNA, 1556 bp, Homo sapiens
tttttttttttttttttttttttttgaataaaacttgacataaatttatttttatttcacaatccacaaaacatttcaaattaaagaaatacattaaaagtctccagtttttgctttaatttcacatttcatacactcacaatatttaggaaatagtcattttgactgtcttataactgggataagggtgcagcaacaattctgccagatggttaaatgccccagaggatttctgctcttctcttcctaatttgggagctataaagcagtttttactcccaacacaaattcttgataaaaaccatactctttgctgatttttcatgttagacattaaggatgacatgcaagtaaaaaaaaaaaaaaaaaaaaaagtagccctgataccaagttaatattcccttgaaaccttacttggctgctaaatytctttgttgaaaaccaacttataacaaattggttatccggttagcttttttccctttttcttccattttcttcttgctccctctttctcttactttttccttttggcatgtttaattagagaacattttctataagcattattaagaataattgtccttaaggaatgatggataatataagggaaatgaaaataataaagaaaatgctacatggaatctcttattcttgaaccatgttcagacactattagctgtgaccactgcaataggaaatgaaaaagagggtactttttcactgaaaatcccactgttcaaagaaacaaagaaacggccacataaactaaatattcacaatactggaaatgraccacagactttttgagtaatactccagtgaactcatgtccttaaatgagaagggcagccacagacatctgcccactggaactctctggtggccacatttagggatgcattcttccttacaagggcagccacctgtggaagtggattcttaaataactgtgtgcaccaaagaccatctggcatggcttaatcactgtacagactctgcagagaagttggaattgagattcgtagagaagcaaaccaggaatgatgcctgatgattaagagtcaatccaggaaggagaattcttcatgggcaacatctatttcaataacaaactctctccccagtgactcatacttatttgtctgcaaagttacaaaagaagatccccagagaaagtgctttccaagttgctagatgtaagtttaagaaagaaaatttttcccttaagaaaaacgtgagcttggttttaaacttgaggcttgtttttaggtcaaatgaattggattttttcctgttgcttttctaacaatgtaacgacaacggtgaagaaaaggtaaatcatcatgttagtaaatccaaggattttgcctccaggaagtagataactattcttgggaaaaacacataaagagtttgtccagaaaaaattagtgtcaaaaatgaaacatccaatgacaccaaaagagttcagtttcctgtgcttgagtcccacacttcttataatgatcaaatcaaggaactttagaatgtcctatgttctgtcattttgtgcc

SEQ ID NO: 731 - DNA, 615 bp, Homo sapiens
  misc_feature (18)..(18): n equals a,t,g, or c
  misc_feature (20)..(20): n equals a,t,g, or c
  misc_feature (584)..(584): n equals a,t,g, or c
cctgtatataaaattggncnctatggtcccgtacaatgaagaaatgcaaagatagttaagaaagactcggccttcaaggagcctaaatgtgtagaaaaggactaaggcaaaacaataacttttttgagctcttgccatgtgtgaagcactttatacacctgtaaggtaggtaacgttgttcttattaaacatgaagaaaatgagactttgtgagaagcaatacagtatagaagttaagaatatggactctaaagctagatttcagaggtttgaagtagctctgctacttactggctgtgtgactttgagcagattacttaacctgtctgtgcctatgtttacttttattgttgtaaaaagatatgcaacataaaatattccatttcaaccgtttttacgtgtatacttcactgacattagttgcattcactatgttgtgcaaacgtagggtcgctatgaagattaaatgagttaattcatataaagccctcagaagagtgtctggcacatggtgagtattggctgtactgtggtcgatgtcattgttagagagctttagtgatttgcttaagacagaaaggtanactggggtgcggtgggctcacgccctggtta

SEQ ID NO: 732 - DNA, 1125 bp, Homo sapiens
gtaccggtccggaattcccgggtcgacccacgcgtccgcccacgcgtccgctccccagtagctgggatgaccggcactcgccaccaagcctagctaattttttttgtattttgactagagatggggtttcaccatgttagtcaagctgctcttgttttgttgttgttgttgttgttgttgttgttgtttgatactgagtctcgctccagcctggcgacagagcgagactccatctcaaaaaaaaaaaacaaaaaaaccaaaaaaaaaaacagaaaagaaacaaaaaacgttgttttaattttaattaactcaaatagcttcatgtggctagctgccgccctgtagaacagcacagttctagaactttcgagaccttctccctgttatccacacttactttacagagtagactcagcacttcgagtcccctgtccttcaggccaggccaaatcttggtccccagagcccagtgtggcagaggccatcgaaaactgacccacgcactctagcccagccctggatttacagccaagcrctgtatagggatgggtgactcttttgtttttgtttttgttttgagttgggtctctcgctctctcacccaggctggagtgcagtggcataatcatggctcgctgtagccttgacctcctgggctcgggccatcctcctgcctcagcctcctgcagaactggggctgcgggcacatgccaccacacccagctattttttattttatttttttgtagagtcagggtctcactgtgttgcccagactggtcttgaactcctggcctcaagctatcttcctgcctcggcctcccaaagtgctgggattacaggtgtgagccactgtgcctggcctcttggtgactctttgcaagggcattgctggctggctgatatggcctgcagcctctgcctgtaaccatcagagcgatactctcattatcggcaaggtgggacccmccctggcccaagagacagggcctgttattccactgtatggaggagaagctgaggcttarggaaggcagatgacttggcaaggtcataaagacagcaagctgcaggaccagctcattctaaggcatgaaccccctgggggcccaacttaccaatgaa

SEQ ID NO: 733 - DNA, 2297 bp, Homo sapiens
  misc_feature (481)..(481): n equals a,t,g, or c
  misc_feature (1408)..(1408): n equals a,t,g, or c
  misc_feature (2248)..(2248): n equals a,t,g, or c
  misc_feature (2277)..(2277): n equals a,t,g, or c
tcagtttgccctgcatgtgtacctggccccctcctgggcggatacggcaggcaaacggtgcaagggcggctgccgggagaaggtgggcagctggagtgggactgggggagacaggatcaatgtgacctgcggtggtccccaggtggccgggatgcagtacctgcacggcgtccygggccccatcatcaacaaggtgtttgaggagaagtacgtggagctggaccccagcaaagtggawgttaaggatgtagggtgaggccgggggtaactccgggggktgcggggygcagcggcagcgggttgggatcaggccctgtcagcatgtgtgtttgtgcttctgcccacccgtgtattgtcccctgtgtccgtgtcctggctgctgtgagagccactgttcctgtcgtggccctggcgctgaccgcgacctcctctgccaacccgccccgttccacgcaggtgctccgggctgcaccgcccgcanaccgaggccgaggtgctggagcagagcgcgcagacgctgcgcgcccacctgggggccctgctgagcgcgctcagccgctcggttcgcgcgtgccccgccgtggtgcgcgccaccttccgccagctcttccggcgcgtgcgcgagcgyttccccggcgcccagcacgagaatgtaccgttcatcgccgtcaccagcttcctgtgcctgcgcttcttctctcccgccatcatgtcgcccaagctcttccacctgcgggagcgccacgcggacgcccgcaccagccgcaccctgctcctgttggccaaggcagtccagaacgtgggtaaaatggacacgccggcttccagggccaaggaggcttggatggagccgctgcagcccaccgtgcgccagggcgtggcgcagctgaaggacttcatcaccaagctcgtggacatcgaggagaaggacgagctggacctgcagcggacgctgagtttgcaggcgccacctgtgaaggaggggccactcttcatccacaggaccaagggcaagggccccctcatgtcctcctccttcaagaagctctacttctccctcactaccgaggccctcagcttcgcgaagacgcccagctccaagaaaagcgccctcatcaagttagccaacatccgggcagcrgaaaaggttgaggaaaagagctttggcggctcgcacgtcatgcaggtcatctacacggacgacgccggcaggccccagactgcctacctgcagtgcaagtgtgtgaatgagcttaaccagtggctgtctgcgctgcggaaggtgagcatcaacaacaccggactgctgggctcctaccaccctggcgtcttccgtggggacaagtggagctgctgccaccaaaaagagaagacaggtcagggctgcgataagacccggtcacggtgnaccctgcaggagtggaatgaccctcttgaccatgaccttgaggcccagctcatctaccggcacctgctgggcgtggaggccatgctgtgggagaggcaccgggagctgagcgggggcgcagaggcaggcacggtgcccacgagccctggcaaagtccccgaggactcattggcccggctgctccgggtgctgcaggacctccgcgaggcccatagctccagcccggccggctccccaccctcaragcccaactgcctcctggagctgcagacgtgaggcccgccctacgctccccttgctgagtcccctgccaagcgctcggagcccccccaggacactctgcaccccctcaccccggtcctcctcattagggtgcagggcctaggtctcttccaggtgggggaggggggagagtcaggaataaggggatccccagaagtgcagagctgagcaggcttgggcctgtcatggctggccggaagtgtccccagctccctacagacgctgtagccatcactgcctctccagggaccctcctctcctgcccaggacagacccagccagaaccactgctaggatgggccgcacccaggggtctggcctccagggacctagagaatgggagggagaacggggccccaggagacccggccgccaccccacccgctacccttgggtgccacagggctgtgctgttgccaacagtaaacctgctcttactgtcaaaaaaaaaaaaaaaaaaaaaaaaaaaaaaaaaaaaaaaaaaaaaaaaaaaaaaaaaaaaaaaaaaaaaaaaaaaaaaaaaaaaaaaaaaaaaaaaaaaaaaaaaaaaaaaaaaanaaaaaaaaaaaaaaaaaaaaaaaaaaaanaaaaaaaaaaaaaaaaaaaa

SEQ ID NO: 734 - DNA, 482 bp, Homo sapiens
  misc_feature (455)..(455): n equals a,t,g, or c
  misc_feature (457)..(457): n equals a,t,g, or c
ttacccagcaacccaagtcatatcctgatgatatccatactcctcagtcaygcatcccgtggtgcrggggctgaccccaagaggagctgctgcccccagagggtggggagccgaggcagggcctkggtcagacttaccaggctatgctcccagcccagccctcactagggacccccgartgcatctctctcctctccargcctctgtttctccatctgtgcaaccacagtgttggacatggtartcccaagtgtctgctcgtaactttgccctctctgtgcccccaggtcagggctgcgataagacccggtcacggtgaccctgcaggagtggaatgaccctcttgaccrtgaccttgaggcccagctcatctaccggcacctgctgggcgtggaggccatgctgtgggaraggcaccgggagctgagcgagggcgcagaggcaggcacgtgctnangagccctggcaaagtccccgaggat

SEQ ID NO: 735 - DNA, 1081 bp, Homo sapiens
  misc_feature (9)..(9): n equals a,t,g, or c
  misc_feature (17)..(17): n equals a,t,g, or c
  misc_feature (35)..(35): n equals a,t,g, or c
  misc_feature (1077)..(1077): n equals a,t,g, or c
tgcacctcncactattngggttacaaaagctgganctccaccgcggtggcggccgctctagaactagtggatcccccgggctgcaggaattcggcacgagtcgcccgcttgactagcgccctggaacagccatttgggtcgtggagtgcgagcacggccggccaatcgccgagtcagagggccaggaggggcgcggccattcgccgcccggcccctgctccgtggctggttttctccgcgggcgcctcgggcggaacctggagataatgggcagcacctgggggagccctggctgggtgcggctcgctctttgcctgacgggcttagtgctctcgctctacgcgctgcacgtgaaggcggcgcgcgcccgggaccgggattaccgcgcgctctgcgacgtgggcaccgccatcagctgttcgcgcgtcttctcctccaggtggggcaggggtttcgggctggtggagcatgtgctgggacaggacagcatcctcaatcaatccaacagcatattcggttgcatcttctacacactacagctattgttaggttgcctgcggacacgctgggcctctgtcctgatgctgctgagctccctggtgtctctcgctggttctgtctacctggcctggatcctgttcttcgtgctctatgatttctgcattgtttgtatcaccacctatgctatcaacgtgagcctgatgtggctcagtttccggaaggtccaagaaccccagggcaaggctaagaggcactgagccctcaacccaagccaggctgacctcatctgctttgctttggcatgtgagccttgcctaagggggcatatctgggtccctagaaggccctagatgtggggcttctagattaccccctcctcctgccatacccrcacatgacaatggaccaaatgtgccacacgctcgctcttttttacacccagtgcctctgactctgtccccatgggctggtctccaaagctctttccattgcccagggagggaaggttctgagcaataaagtttcttagatcaatcaaaaaaaaaaaaaagggsggccgtctaaagwtcccccgangggg

SEQ ID NO: 736 - DNA, 720 bp, Homo sapiens
  misc_feature (20)..(20): n equals a,t,g, or c
ccacgcgtccgctccgcggncgcctcgggcggaacctggagataatgggcagcacctgggggagccctggctgggtgcggctcgctctttgcctgacgggcttagtgctctcgctctacgcgctgcacgtgaaggcggcgcgcgcccgggaccgggattaccgcgcgctctgcgacgtgggcaccgccatcagctgttcgcgcgtcttctcctccaggttgcctgsggacacgctgggcctctgtmctgatgctgctgagctccctggtgtctctcgctggttctgtctacctggsctggatcctgttcttcgtgctctatgawtttctgcattgtttgtaatcaccacctatgctatcaacgtgacctgatgtggctcagtttccggaaggtccaagaaccccagggcaaggctaagaggcactgagccctcaacccaagccaggctgacctcatctgctttgctttggcatgtgagccttgcctaagggggcatatctgggtccctagaaggccctagatgtggggcttctagattaccccctcctcctgccatacccgcacatgacaatggaccaaatgtgccacacgctcgctcttttttacacccagtgcctctgactctgtccccatgggctggtctccaaagctctttccattgcccagggagggaaggttctgagcaataaagtttcttagatcaaaaaaaaaaaaaaaaaa

SEQ ID NO: 737 - DNA, 1932 bp, Homo sapiens
  misc_feature (293)..(293): n equals a,t,g, or c
ggcacgaggccgccctgggtgtcagcggctcggctcccgcgcacgctccggccgtcgcgcasctcggcacctgcaggtccgtgcgtcccgcggctggcgcccctgactccgtcccggccagggagggccatgatttccctcccggggcccctggtgaccaacttgctgcggtttttgttcctggggctgagtgccctcgcgcccccctcgcgggcccagctgcaactgcacttgcccgccaaccggttgcaggcggtggagggaggggaagtggtgcttccagcgtggtacancttgcacggggaggtgtcttcatcccagccatgggaggtgccctttgtgatgtggttcttcaaacagaaagaaaaggaggatcaggtgttgtcctacatcaatggggtcacaacaagcaaacctggagtatccttggtctactccatgccctcccggaacctgtccctgcggctggagggtctccaggagaaagactctggcccctacagctgctccgtgaatgtgcaagacaaacaaggcaaatctaggggccacagcatcaaaaccttagaactcaatgtactggttcctccagctcctccatcctgccgtctccagggtgtgccccatgtgggggcaaacgtgaccctgagctgccagtctccaaggagtaagcccgctgtccaataccagtgggatcggcagcttccatccttccagactttctttgcaccagcattagatgtcatccgtgggtctttaagcctcaccaacctttcgtcttccatggctggagtctatgtctgcaaggcccacaatgaggtgggcactgccaatgtaatgtgacgctggaagtgagcacagggcctggagctgcagtggttgctggagctgttgtgggtaccctggttggactggggttgctggctgggctggtcctcttgtaccaccgccggggcaaggccctggaggagccagccaatgatatcaaggaggatgccattgctccccggaccctgccctggcccaagagctcagacacaatctccaagaatgggaccctttcctctgtcacctccgcacgagccctccggccaccccatggccctcccaggcctggtgcattgacccccacgcccagtctctccagccaggccctgccctcaccaagactgcccacgacagatggggcccaccctcaaccaatatcccccatccctggtggggtttcttcctctggcttgagccgcatgggtgctgtgcctgtgatggtgcctgcccagagtcaagctggctctctggtatgatgaccccaccactcattggctaaaggatttggggtctctccttcctatargggtcacctctagcacagaggcctgagtcatgggaaagagtcacactcctgacccttagtactctgcccccacctctctttactgtgggaaaaccatctcagtaagacctaagtgtccaggagacagaaggagaagaggaagtggatctggaattgggaggagcctccacccacccctgactcctccttatgaagccagctgctgaaattagctactcaccaagagtgaggggcagagacttccagtcactgagtctcccaggcccccttgatctgtaccccacccctatctaacaccacccttggctcccactccagctccctgtattgatataacctgtcaggctggcttggttaggttttactggggcagaggatagggaatctcttattaaaactaacatgaaatatgtgttgttttcatttgcaaatttaaataaagatacataatgtttgtatgaraaaaaaaaaaaaaaaaaaaaaagggcggccgctctagaggatccctcgaggggcccaagcttacgcgtgcatgcgacgtcatagctctctccctatagtgagtcgtattataagctagg

SEQ ID NO: 738 - DNA, 1595 bp, Homo sapiens
gcctaaagagagctcccccaggaccagccctggccaagggattgctgcagccctcatccaccttccaagcactggaaacaaacattggagaccaagtgaggcgtcactcaacagccgtagtaatcagggaaatgacaagttacatactgatatcctttgttttgctgattggagttgggtgcattgaaaaagatcagtcgtgcccagtgtttgggggaaggaagcgtcttcacctgttgtttgtgggaggacagttgaggcaggtssagctgggagctccccgacctccaggagggcaagatccaagccatcagcgactcggacgrggtgaactacccctggtacggcaacaccacagagacctgcaccatcgtgggccccaccaagagggactccaagttcatcatcagcatgaatgacaacttttaccccagcgtcacatgggccgtgcccgtcagcgagagcaacgtggccaagctcaccaacatctaccgggaccagagcttcaccacctggctggtggccaccaacacctccaccaacgacatgatcatcctgcagacgctgcactggcgcatgcagctcagcatcgaggtgaaccccaaccggcccctgggccagcgcgcccggctgcgggagcccatcgcccaggaccagcccaaaatcctgagcaagaatgagcccatcccgcccagcgccctggtcaagcccaatgccaacgatgcccaggtcctcatgtggcggcccaagtaygggcagccgctggtggtgatcccgcccaagcaccggtgacagccaggaccacccgctaggttagactcacaaataataataccgctgaaaacaaaactcagactcactcttcagtcattcagcaagatacaaccattctaccctctccagcgggcggatctcactgtgctgatgcccccgggaaggcctccccggctctcggcacctgcttcctttcagggagaggggagatctaagcaggacagacagaccccacgtgcgccctcagggtgacctctggtctccttgcctctcctttttctcagtttcagtcgctcacttgtaacagattccctgaaacactgctttttccgttttttaaaaaaactcctcttttgggggctcaggggcaggaggagggggagctgattaggagggaagctccagcccccgatcaaagagacagatccacactgctgccgatttgtggcgctggccggccttccccccaggtccctccgccctctgtcatgcggccttatgtagacttgctttgccaaacttttgccttaagctgaattgaaaggaagaaaaccaatcggagaaagaaagcaggatctcttttctaccggacttttcctcttctgccagaggtggagggagggttggggtcgcccgcgagartctcttgarcccttcttcccggttgtcttgggagaagggtgaggatgggcatttagacccgaaaccagctgctcactctttctttttggcagaaataaaaccacargtagaaaaaaaaaaaaaaaaaaaaaaaaaaaaaaaaaaaaaaaaaaaaaaaaaaaaaaaaaaaaaaaaaaaaa

SEQ ID NO: 739 - DNA, 970 bp, Homo sapiens
  misc_feature (854)..(854): n equals a,t,g, or c
tgaagggcmcggccaatktacgctggggtaaaagttgtcawtcatgctgatgatgaattgaartccctcttggtggggcccacgatggtgcaggtcctcctgtggtgttgcccgtaccagggtagttcaccccgtccgagtcgctgatggcttggatcttgccctcctggaggtcggggagctcccagctggacatgccctgctcgccgtactggttgtagaactccatgtggctgcacgcctggatccagccaactacccaagtctccttcttggggatgggcggcatgaccacctgggccgaggcccggaagtggggtgtccggtagcggagcaccacgctggaggactcatcgatgctagtggggacggggtcgatggaggctttcacatcaatcaccgtgatcccttcccggaagactctggctttgcctccgatgctctgaatacagcccatggcatacaggagcgctctgatctccagggaaggccagcagtcacagaaaaaaccaggcattgaaaggacagaggctgcaggacccagtacagacggcgctgctctccaatctcaactctcaagaccgatatccataggatagaaaactcactgagtagactggggttgcatatatcactaccgcggcctgtttataaataaggattctgctgcatttcatgagccctgggctctctcttcttctcctcgcagtggacaaaaatcaccgatattctttgggttaaaaaaagtttgtagtttaatgaataattatgcggttctgacatccagcccttctgtgcctcacacgcggggacggcagctcgcagactctccctgaagtcttcggaggaagcangcgagcgccggcagactcataaataaggaaggctctgtccccgcgcggccgcgccaccctcgcggcagaagcctgacttcctgccctccggccttccgcacgcgctcccggcacga

SEQ ID NO: 740 - DNA, 711 bp, Homo sapiens
  misc_feature (345)..(345): n equals a,t,g, or c
ggcacgagcgaagaccctgttcggaccctgccccgattccagactcaggtagatcgtcggcataccctctaccgtggacaccaggcagccctggggctgatggagagagatcaggtatcccccagggagtaggggctaccttgaggggatgatagacctcccccactcccagtgkkactctggaaatatgaaggaactagggagtggaagagatttcagagctggggagaggagttcctcccttcaaagccagcaactgcctttggggaatgtcggggggtctctcctttctcctgcttgtttraggtggtacacagtccccccttcamctggsgggaagctgtnccggacaractcatctcagctttcccttggggcaggatcgggggcagcagctccagcagaaacagcaggatctggagcaggaaggcctcgaggccacacaggggctgctggccggcgagtgggccccacccctctggragctgggcagcctcttccaggccttcgtgaagagggagagccaggcttatgcgtaagcttcatagcttctgctggcctggggtggacccaggacccctggggcctgggtgccctgagtggtggtaaagtggagcaatcccttcacgctccttggccatgttctgagcggccagcttggcctttgccttaataaatgtgctttattttcaaaaaaaaaaaaaaaaaact

SEQ ID NO: 741 - DNA, 973 bp, Homo sapiens
ggcacgagcccagcggaagccaagccaccaggccccccagcgtccacgcggagcatgaacattgaggatggcgcgtgcccgcggctccccgtgccccccgctgccgcccggtaggatgtcctggccccacggggcattgctcttcctctggctcttctccccacccctgggggccggtggaggtggagtggccgtgacgtctgccgccggagggggctccccgccggccacctcctgccccgtggcctgctcctgcagcaaccaggccagccgggtgatctgcacacggagagacctggccgaggtcccagccagcatcccggtcaacacgcggtacctgaacctgcaagagaacggcatccaggtgatccggacggacacgttcaagcacctgcggcacctggagattctgcagctgagcaagaacctggtgcgcaagatcgaggtgggcgccttcaacgggctgcccagcctcaacacgctggagctttttgacaaccggctgaccacggtgcccacgcaggccttcgagtacctgtccaagctgcgggagctctggctgcggaacaaccccatcgagagcatcccctcctacgccttcaaccgcgtgccctcgctgcggcgcctggacctgggcgagctcaagcggctggaatacatctcggaggcggccttcgaggggctggtcaacctgcgctacctcaacctgggcatgtgcaacctcaaggacatccccaacctgacggccctggtgcgcctggaggagctggagctgtcgggcaaccggctggacctgatccgcccgggctccttccagggtctcaccagcctgcgcaagctgtggctcatgcacgcccaggtagccaccatcgagcgcaacgccttcgacgacctcaagtcgctggaggagctcaacctgtcccacaacaacctgatgtcgctgccccacgacctcttcacgcccctgcaccgc

SEQ ID NO: 742 - DNA, 984 bp, Homo sapiens
gaattcggcacgagcccagcggaagccaagccaccaggccccccagcgtccacgcggagcatgaacattgaggatggcgcgtgcccgcggctccccgtgccccccgctgccgcccggtaggatgtcctggccccacggggcattgctcttcctctggctcttctccccacccctgggggccggtggaggtggagtggccgtgacgtctgccgccggagggggctccccgccggccacctcctgccccgtggcctgctcctgcagcaaccaggccagccgggtgatctgcacacggagagamctggccgaggtcccagccagcatcccggtcaacacgcggtacctgaacctgcaagagaacggcatccaggtgatccggacggacacgttcaagcacctgcggcacctggagattctgcagctgagcaagaacctggtgcgcaagatcgaggtgggcgccttcaacgggctgcccagcctcaacacgctggagctttttgacaaccggctgaccacggtgcccacgcaggccttcgagtacctgtccaagctgcgggagctctggctgcggaacaaccccatcgagagcatcccctcctacgccttcaaccgcgtgccctcgctgcggcgcctggacctgggcgagctcaagcggctggaatacatctcggaggcggccttcgargggctggtcaacctgcgctacctcaacctgggcatgtgcaacctcaaggacatccccaactgacggccctggtgcgcctggaggagctggagctgtcgggcaaccggctggacctgatccgcccgggctccttccagggtctcaccagcctgcgcaagctgtggctcatgcacgcccaggtagccaccatcgagcgcaacgccttcgacgacctcaagtcgctggaggagctcaacctgtcccacaacaacctgatgtcgctgccccacgacctcttcacgcccctgcaccgcctcgta

SEQ ID NO: 743 - DNA, 553 bp, Homo sapiens
gtgtgccggatttggttagctgagcccaccgagaggcgcctgcaggatgaaagctctctgtctcctcctcctccctgtcctggggctgttggtgtctagcaagaccctgtgctccatggaagaagccatcaatgagaggatccaggaggtcgccggctccctaatatttagggcaataagcagcattggcctggagtgccagagcgtcacctccaggggggacctggctacttgcccccgaggcttcgccgtcaccggctgcacttgtggctccgcctgtggctcgtgggatgtgcgcgccgagaccacatgtcactgccagtgcgcgggcatggactggaccggagcgcgctgctgtcgtgtgcagccctgaggtcgcgcgcagtggcaacagcgcgggcggaggcggctccaggtccggagggttgcgggggagctggaaataaacctggagatgatgatgatgatgatgatggaaaaaaaaaaaaaaaaaaaaaaaaaaaaaaaaaaaaaaaaaaaaaaaaaaaaaaaaaaaaaaaaaaaaaaaaaaaaa

SEQ ID NO: 744 - DNA, 1614 bp, Homo sapiens
ggtgattggtagttactatgtggggacacaattacttgggctgaaataatccacctgttgtggttggggtcctctggggcattccagggtgagaggttgtcactgccacctgggccatgtgggccggcaccagcattttgtggttacgaattctacagtcacaaatatctttgggcaaatccccttctatacctcaaggcagcttttggtttgcaaccccactggccagagggaagggccagtcacttggctctctcactgccctgcgccccagatggttctagggctgctgttttcccttggccctgccaacaccactgtttttacttctgctcattggctgagtgcagtggttcctggaagccagtggcacgtttccccgcgtagctcgcttatcccacagcacacacccaagggttctgttgctaacacgctgaattaattctttgctcatcttacagagtgtgttttgactgcccccatttctgaggccttgtaaggccagagctttgttgcttcatcggcaggttgggacttagatggccgtgaatgtttcctctctgctgctgcagtaagtaagtgcccgcaccatagtgtgtttggaggctgaagttgaagcgaggctgtgaggggagatggacgtgtgaggagggatgatggggcttgagcaaagtgggggaggggcaaagcagttggcccaacacattccccacccctttgagaggtctgaggcctgcagacctggctcggagcccacctggtagtcctcagactgtgtgtgtgtgtgtgtgtgtgtgtgtgtgtgtgtgtgtgtgtgtgtgtaaaagagagaagttgtggagaaatggggggctgattctgctcagattcatcaggatgagtagaaggcacccagctctcaccctggcctgacatgtgtgtccctgagcaggttacagtcctctctgagcctctgcttcccatctggaccctgctgggcagggcttctgagctccttagcactagcaggaggggctccaggggccctccctccatggcagccaggacaggactctaaaatgaggacagcagagctcgtggggggctcccacggacccgccgtgggcccaggggaggcagagcctgagccaacagcagtggtgctgtggaccgtggatcctgagggtggcctggggcaagtaccggctgagggtccaggtgggctttgtgtacctttgggtcctggggccctggtgacttggactccaggttagagtcaagtgacaggagaaaggctggtggggccctgtgcttccgacttcatttcgagtgatggcagttcccaggaaggaatccacagctgacggtggctgacagatcagagaatggaaggcgaggcaggcgggcgtctgcgtgacctcaggtgcttggggcccagcagacccagagaaccatttccactaggccagggtgccggaagtgtccacaggtcttagattccctgttcagatgaaaagatttgtgcctttaatgataaaagtgatctgcatagagtcaaaaattcaagccatgggtataaaatgcaagtaaaatccctgccctcacctatcccaccctactacacagagatgtcct

SEQ ID NO: 745 - DNA, 1087 bp, Homo sapiens
  misc_feature (14)..(14): n equals a,t,g, or c
  misc_feature (55)..(55): n equals a,t,g, or c
  misc_feature (63)..(64): n equals a,t,g, or c
  misc_feature (174)..(174): n equals a,t,g, or c
caagttaaagtaangtggccccggcaaccaataagtgttgtttttggaagggctngaaagttnnaaagcgagggcttgtaaaggggaagatgggaccgttgtgaaggaaggatgattggggctttgaagcaaaagtgggggaagggggcaaaggcagttggcccaacacattcnccacccctttgagaggtctgaggcctgcagacctggctcggagcccacctggtagtcctcagactgtgtgtgtgtgtgtgtgtgtgtgtgtgtgtgtgtgtgtgtgtgtgtgtaaaagagagaagttgtggagaaatggggggctgattctgctcagattcatcaggatgagtagaaggcacccagctctcaccctggcctgacatgtgtgtccctgagcaggttacagkcctctctgagcctctgcttcccatctggaccctgctgggcagggcttctragctccttagcactagcaggaggggctccaggggccctccctccatggcagccaggacaggactctaaaatgaggacagcagagctcgtggggggctcccacggacccgccktgggcccaggggaggcagagcctgagccaacagcagtggtgctgtggaccgtggatcctgagggtggcctggggcaagtaccggctgagggtccaggtgggctttgtgtacctttgggtcctggggccctggtgacttggactccaggttagagtcaagtgacaggagaaaggctggtggggccctgtgcttccgacttcatttcgagtgatggcagttcccaggaaggaatccacagctgacggtggctgacagatcagagaatggaaggcgaggcaggcgggcgtctgcgtgacctcaggtgcttggggcccagcagacccagagaaccatttccactaggccagggtgccggaagtgtccacaggtcttagattccctgttcagatgaaaagatttgtgcctttaatgataaaagtgatctgcatagagtcaaaaattcaagccatgggtataaaatgtcaagtaaaatccctgccctcacctatcccaccctactacacagagatgtcctctcgagg

SEQ ID NO: 746 - DNA, 1201 bp, Homo sapiens
  misc_feature (66)..(66): n equals a,t,g, or c
  misc_feature (1182)..(1182): n equals a,t,g, or c
  misc_feature (1184)..(1184): n equals a,t,g, or c
gaattccggaacaaawgcyggagctccaccgcggtggcggccgctctagaactagtggatcccctnkgctgcaggaattcggcacgagctgctgtctgtgcttcgggatcctgccctccagaagtcctccaaggcttggtacttgctgcgtgtccaggtcctgcagctggtggcagcttaccttagcctcccgtcaaacaacctctcacactccctgtgggagcagctctgtgcccaaggctggcagacacctgagatagctctcatagactcccataagctcctccgaagcatcatcctcctgctgatgggcagtgacattctctcaactcagaaagcagctgtggagacatcgtttttggactatggtgaaaatctggtacaaaaatggcaggttctttcagaggtgctgagctgctcagagaagctggtctgccacctgggccgcctgggtagtgtgagtgaagccaaggccttttgcttggaggccctaaaacttacaacaaagctgcagataccacgccagtktgccctgttcctggtgctgaagggcgagctggagctggcccgcaatgacattgatctctgtcagtcggacctgcagcaggttctgttcttgcttgagtcttgcacagagtttggtggggtgactcagcacctggactctgtgaagaaggtccacctgcagaaggggaagcagcaggcccaggtcccctgtcctccacagctcccagaggaggagctcttcctaagaggccctgctctagagctggtgccactgtggccaaggagcctggccccatagcaccttctacaaactcctccccagtcttgaaaaccaagccccagcccatacccaacttcctgtcccattcacccacctgtgactgctcgctctgcgccagccctgtcctcacagcagtctgtctgcgctgggtattggtcacggcaggggtgaggctggccatgggccaccaagcccagggtctggatctgctgcaggtcgtgctgaagggctgtcctgaagccgctgagcgcctcacccaagctctccaagcttccctgaatcataaaacacccccctccttggttccaagcctcttggatgagatttggctaagcatacacactgttgcactggagggcctgaaccagccatcaaacgagagcctgcagaaggtncncagtaaggctgaagttt

SEQ ID NO: 747 - DNA, 628 bp, Homo sapiens
  misc_feature (567)..(567): n equals a,t,g, or c
  misc_feature (596)..(596): n equals a,t,g, or c
ttgggaagctggtmcscctgcaggtaccggtccggaattcccgggtcgacccacgcgtycgttccagattcaattgaaagtgcattgcagggtgatgaaagatgtgtgcttgatactatgcgtttggttgaccttctcttggtgctattatttgaaggacgaaaagctttgccaaagtctagtgctggatctacaggcagaatcccaggactccggagattagatagttctggggagcgctcacatcggcagcttatagattgtattcgaagtaaagataccgatgcacttatagatgcaattgacacaggaggtcagaaaatatttttttaaatataaaaagaaagttgtgagataaccatataggcagtttctagttttcggacagtactcttagaaatccagataacaaagtggcaccccttcgatattctcccctatccctgtgcataattatgtaattatcagcttggttcttggtgaaacctgaataaatgctttttgatgcaaaaaaaaaaaaaaaagaaaaataaaaaaaaaagataaaaaaaaaccttaaaaaaaaanaaaaaaaaaaaaaaaaaaaaaaagaaaanaaaaaaaaaaaacaaaaaaaaaaaaaaaaaaa

SEQ ID NO: 748 - DNA, 425 bp, Homo sapiens
  misc_feature (367)..(367): n equals a,t,g, or c
  misc_feature (380)..(380): n equals a,t,g, or c
  misc_feature (408)..(408): n equals a,t,g, or c
atcgtgctcaagtacatcatggctggttgccccttgtttctgggtaatctctgggatgtgactgaccgcgacattgaccgctacacggaagctctgctgcaaggctggcttggaagcaggcccagggccccccttctctactatgtaaaccaggcmcgccaagctccccgactcaagtatcttattggggctgcacctatacctatggcttgcctgtctctctgcggtaaccccatggagctgtcttattgatgctagaagcctcataactgttctacctccaaggttagatttaatccttaggataactcttttaaagtgattttccccagtgttttatatgaaacatttccttttgatttaaccncagataataaagntacatccatttaaaaaaaaaaaaaaaancccgagggggggcccgg

SEQ ID NO: 749 - DNA, 1016 bp, Homo sapiens
  misc_feature (1)..(1): n equals a,t,g, or c
ncggacgcgtgggaggcacaggcctgagaagtctgcggctgagctgggagcaaatcccccaccccctacctgggggacagggcaagtgagacctggtgagggtggctcagcaggaaggaaggagaggtgtctgtgcgtcctgcacccacatctttctctgtcccctccttgccctgtctggaggctgctagactcctatcttctgaattctatagtgcctgggtctcagcgcagtgccgatggtggcccgtccttgtggttcctctctacttggggaaatcaggtgcagcggccatggctacagcaagacccccctggatgtgggtgctctgtgctctgatcacagccttgcttctgggggtcacagagcatgttctcgccaacaatgatgtttcctgtgaccacccctctaacaccgtgccctctgggagcaaccaggacctgggagctggggccggggaagacgcccggtcggatgacagcagcagccgcatcatcaatggatccgactgcgatatgcacacccagccgtggcaggccgcgctgttgctaaggcccaaccagctctactgcggggcggtgttggtgcatccacagtggctgctcacggccgcccacctgcaggaagaaagttttcagagtcgtctcggccactactccctgtcacagtttattgaatctgggccggagatgtccagggggtcaattcaatcccgcacagggtagttcaagctgacatctaaggacgtgagttcgttcaacggagaacgaagaatggtcacaacacaggtgagcataagggtaccgcgatggtcgcatggagggaccacgtgttgggttgtagggcacacaaacgaccaaggcatcctggagcacaggatatcgcgagaatcaaagccgaaggtccaaacactagtacagttgaggaacgggatgtgaaatagtacgaggcaaataacacccggggttccacatgaaatagctttttctcgcctcttccctcccccttcctctgg

SEQ ID NO: 750 - DNA, 1490 bp, Homo sapiens
  misc_feature (1)..(1): n equals a,t,g, or c
ngccaggaaggcacaggcctgagaagtctgcggctgagctgggagcaaatcccccaccccctgtctggaggctgctagactcctatcttctgaattctatagtgcctgggtctcagcgcagtgccgatggtggcccgtccttgtggttcctctctacctggggaaataaggtgcagcggccatggctacagcaagacccccctggatgtgggtgctctgtgctctgatcacagccttgcttctgggggtcacagagcatgttctcgccaacaatgatgtttcctgtgaccacccctctaacaccgtgccctctgggagcaaccaggacctgggagctggggccggggaagacgcccggtcggatgacagcagcagccgcatcatcaatggatccgactgcgatatgcacacccagccgtggcaggccgcgctgttgctaaggcccaaccagctctactgcggggcggtgttggtgcatccacagtggctgctcacggccgcccactgcaggaagaaagttttcagagtccgtctcggccactactccctgtcaccagtttatgaatctgggcagcagatgttccagggggtcaaatccatcccccaccctggctactcccaccctggccactctaacgacctcatgctcatcaaactgaacagaagaattcgtcccactaaagatgtcagacccatcaacgtctcctctcattgtccctctgctgggacaaagtgcttggtgtctggctgggggacaaccaagagcccccaagtgcacttccctaaggtcctccagtgcttgaatatcagcgtgctaagtcagaaaaggtgcgaggatgcttacccgagacagatagatgacaccatgttctgcgccggtgacaaagcaggtagagactcctgccagggtgattctggggggcctgtggtctgcaatggctccctgcagggactcgtgtcctggggagattacccttgtgcccggcccaacagaccgggtgtctacacgaacctctgcaagttcaccaagtggatccaggaaaccatccaggccaactcctgagtcatcccaggactcagcacaccggcatccccacctgctgcagggacagccctgacactcctttcagaccctcattccttcccagagatgttgagaatgttcatctctccagcccctgaccccatgtctcctggactcagggtctgcttcccccacattgggctgaccgtgtctctctagttgaaccctgggaacaatttccaaaactgtccagggcgggggttgcgtctcaatctccctggggcactttcatcctcaagctcagggcccatcccttctctgcagctctgacccaaatttagtcccagaaataaactgagaagtggaaacaaacacaacccccgatcatataaacgcagcacacttcacccaccggcactacccgccacgccagccacccccaccacaaacggccgctccttacccg

SEQ ID NO: 751 - DNA, 1441 bp, Homo sapiens
aggaaggaaggagaggtgtctgtgcgtcctgcacccacatctttctctgtcccctccttgccctgtctggaggctgctagactcctatcttctgaattctatagtgcctgggtctcagcgcagtgccgatggtggcccgtccttgtggttcctctctacttggggaaatcaggtgcagcggccatggctacagcaagacccccctggatgtgggtgctctgtgctctgatcacagccttgcttctgggggtcacagagcatgttctcgccaacaatgatgtttcctgtgaccacccctctaacaccgtgccctctgggagcaaccggacctgggagctggggccggggaagacgcccggtcggatgacagcagcagccgcatcatcaatggatccgactgcgatatgcacacccagccgtggcaggccgcgctgttgctaaggcccaaccagctctactgcggggcggtgttggtgcatccacagtggctgctcacggccgcccactgcaggaagaaagttttcagagtccgtctcggccactactccctgtcaccagtttatgaatctgggcagcagatgttccagggggtcaaatccatcccccaccctggctactcccaccctggccactctaacgacctcatgctcatcaaactgaacagaagaattcgtcccactaaagatgtcagacccatcaacgtctcctctcattgtccctctgctgggacaaagtgcttggtgtctggctgggggacaaccaagagcccccaagtgcacttccctaaggtcctccagtgcttgaatatcagcgtgctaagtcagaaaaggtgcgaggatgcttacccgagacagatagatgacaccatgttctgcgccggtgacaaagcaggtagagactcctgccagggtgattctggggggcctgtggtctgcaatggctccctgcagggactcgtgtcctggggagattacccttgtgcccggcccaacagaccgggtgtctacacgaacctctgcaagttcaccaagtggatccaggaaaccatccaggccaactcctgagtcatcccaggactcagcacaccggcatccccacctgctgcagggacagccctgacactcctttcagaccctcattccttcccagagatgttgagaatgttcatctctccagcccctgaccccatgtctcctggactcagggtctgcttcccccacattgggctgaccgtgtctctctagttgaaccctgggaacaatttccaaaactgtccagggcgggggttgcgtctcaatctccctggggcactttcatcctcaagctcagggcccatcccttctctgcagctctgacccaaatttagtcccagaaataaactgagaagtggaaaaaaaaaaaaaaaaaaaaaaaaaaaaaaaaaaaaaaaaaaaaaaaaaaa

SEQ ID NO: 752 - DNA, 1516 bp, Homo sapiens
  misc_feature (34)..(34): n equals a,t,g, or c
ttcacgtgcacactgatcacaacgtcacgcctgncagggcaccggtccgggaattcccgggtcgacccacgcgtccgcaggagaggtgtctgtgcgtcctgcacccacatctttctctgtcccctccttgccctgtctggaggctgctagactcctatcttctgaattctatagtgcctgggtctcagcgcagtgccgatggtggcccgtccttgtggttcctctctacttggggaaatcaggtgcagcggccatggctacagcaagacccccctggatgtgggtgctctgtgctctgatcacagccttgcttctgggggtcacagagcatgttctcgccaacaatgatgtttcctgtgaccacccctctaacaccgtgccctctgggagcaaccaggacctgggagctggggccggggaagacgcccggtcggatgacagcagcagccgcatcatcaatggatccgactgcgatatgcacacccagccgtggcaggccgcgctgttgctaaggcccaaccagctctactgcggggcggtgttggtgcatccacagtggctgctcacggccgcccactgcaggaagaaagttttcagagtccgtctcggccactactccctgtcaccagtttatgaatctgggcagcagatgttccagggggtcaaatccatcccccaccctggctactcccaccctggccactctaacgacctcatgctcatcaaactgaacagaagaattcgtcccactaaagatgtcagacccatcaacgtctcctctcattgtccctctgctgggacaaagtgcttggtgtctggctgggggacaaccaagagcccccaagtgcacttccctaaggtcctccagtgcttgaatatcagcgtgctaagtcagaaaaggtgcgaggatgcttacccgagacagatagatgacaccatgttctgcgccggtgacaaagcaggtagagactcctgccagggtgattctggggggcctgtggtctgcaatggctccctgcagggactcgtgtcctggggagattacccttgtgcccggcccaacagaccgggtgtctacacgaacctctgcaagttcaccaagtggatccaggaaaccatccaggccaactcctgagtcatcccaggactcagcacaccggcatccccacctgctgcagggacagccctgacactcctttcagaccctcattccttcccagagatgttgagaatgttcatctctccagcccctgaccccatgtctcctggactcagggtctgcttcccccacattgggctgaccgtgtctctctagttgaaccctgggaacaatttccaaaactgtccagggcgggggttgcgtctcaatctccctggggcactttcatcctcaagctcagggcccatcccttctctgcagctctgacccaaatttagtcccagaaataaactgagaagtggaatcttaaaaaaaaaaaaaaaaaaaaaaaaaaaaaaaaaaaaaaagggcggccgc

SEQ ID NO: 753 - DNA, 1381 bp, Homo sapiens
gataactcaggcccggtgcccagagcccaggaggaggcagtggccaggaaggcacaggcctgagaagtctgcggctgagctgggagcaaatcccccaccccctacctgggggacagggtgcagcggccatggctacagcaagacccccctggatgtgggtgctctgtgctctgatcacagccttgcttctgggggtcacagagcatgttctcgccaacaatgatgtttcctgtgaccacccctctaacaccgtgccctctgggagcaaccaggacctgggagctggggccggggaagacgcccggtcggatgacagcagcagccgcatcatcaatggatccgactgcgatatgcacacccagccgtggcaggccgcgctgttgctaaggcccaaccagctctactgcggggcggtgttggtgcatccacagtggctgctcacggccgcccactgcaggaagaaagttttcagagtccgtctcggccactactccctgtcaccagtttatgaatctgggcagcagatgttccagggggtcaaatccatcccccaccctggctactcccaccctggccactctaacgacctcatgctcatcaaactgaacagaagaattcgtcccactaaagatgtcagacccatcaacgtctcctctcattgtccctctgctgggacaaagtgcttggtgtctggctgggggacaaccaagagcccccaagtgcacttccctaaggtcctccagtgcttgaatatcagcgtgctaagtcagaaaaggtgcgaggatgcttacccgagacagatagatgacaccatgttctgcgccggtgacaaagcaggtagagactcctgccagggtgattctggggggcctgtggtctgcaatggctccctgcagggactcgtgtcctggggagattacccttgtgcccggcccaacagaccgggtgtctacacgaacctctgcaagttcaccaagtggatccaggaaaccatccaggccaactcctgagtcatcccaggactcagcacaccggcatccccacctgctgcagggacagccctgacactcctttcagaccctcattccttcccagagatgttgagaatgttcatctctccagcccctgaccccatgtctcctggactcagggtctgcttcccccacattgggctgaccgtgtctctctagttgaaccctgggaacaatttccaaaactgtccagggcgggggttgcgtctcaatctccctggggcactttcatcctcaagctcagggcccatcccttctctgcagctctgacccaaatttagtcccagaaataaactgagaagtggaatcttaaaaaaaaaaaaaaaaaaaaaaaaaaaaaaaaaaaaaaa

SEQ ID NO: 754 - DNA, 1439 bp, Homo sapiens
cccacgcgtccgcaggagaggtgtctgtgcgtcctgcacccacatctttctctgtcccctccttgccctgtctggaggctgctagactcctatcttctgaattctatagtgcctgggtctcagcgcagtgccgatggtggcccgtccttgtggttcctctctacttggggaaatcaggtgcagcggccatggctacagcaagacccccctggatgtgggtgctctgtgctctgatcacagccttgcttctgggggtcacagagcatgttctcgccaacaatgatgtttcctgtgaccacccctctaacaccgtgccctctgggagcaaccaggacctgggagctggggccgggggaagacgcccggtcggatgacagcagcagccgcatcatcaatggatccgactgcgatatgcacacccagccgtggcaggccgcgctgttgctaaggcccaaccagctctactgcggggcggtgttggtgcatccacagtggctgctcacggccgcccactgcaggaagaaagttttcagagtccgtctcggccactactccctgtcaccagtttatgaatctgggcagcagatgttccagggggtcaaatccatcccccaccctggctactcccaccctggccactctaacgacctcatgctcatcaaactgaacagaagaattcgtcccactaaagatgtcagacccatcaacgtctcctctcattgtccctctgctgggacaaatgcttggtgtctggctgggggacaaccaagacccccaagtgcacttccctaaggtcctccagtgcttgaatatcacgtgctaagtcagaaaaggtgcgaggatgcttacccgagacagatagatgacaccatgttctgcgccggtgacaaagcaggtagagactcctgccagggtgattctggggggcctgtggtctgcaatggctccctgcagggactcgtgtcctggggagattacccttgtgcccggcccaacagaccgggtgtctacacgaacctctgcaagttcaccaagtggatccaggaaaccatccaggccaactcctgagtcatcccaggactcagcacaccggcatccccacctgctgcagggacagccctgacactcctttcagaccctcattccttcccagagatgttgagaatgttcatctctccagcccctgaccccatgtctcctggactcagggtctgcttcccccacattgggctgaccgtgtctctctagttgaaccctgggaacaatttccaaaactgtccagggcgggggttgcgtctcaatctccctggggcactttcatcctcaagctcagggcccatcccttctctgcagctctgacccaaatttagtcccagaaataaactgagaagtggaatcttaaaaaaaaaaaaaaaaaaaaaaaaaaaaaaaaaaaaaaa

SEQ ID NO: 755 - DNA, 1191 bp, Homo sapiens
gctgggctggaacacaagarcccacagggctgccgtccacactctcccggtcagagtcctgggaccacatggggacgctgccatggcttcttgccttcttcattctgggtctccaggcttgggatactcccaccatcgtctcccgcaaggagtggggggcaagaccgctcgcctgcagggccctgctgaccctgcctgtggcctacatcatcacagaccagctcccagggatgcagtgccagcagcagagcgtttgcagccagatgctgcgggggttgcagtcccattccgtctacaccataggctggtgcgacgtggcgtacaacttcctggttggggatgatggcagggtgtatgaaggtgttggctggaacatccaaggcttgcacacccagggctacaacaacatttccctgggcatcgccttctttggcaataagataagcagcagtcccagccctgctgccttatcagctgcagagggtctgatctcctatgccatccagaagggtcacctgtcgcccaggtatattcagccacttcttctgaaagaagagacctgcctggaccctcaacatccagtgatgcccagraaggtttgccccaacatcatcaaacgatctgcttgggaagccagagagacacactgccctaaaatgaacctcccagccaaatatgtcatcatcatccacaccgctggcacaagctgcactgtatccacagactgccagactgtcgtccgaaacatacagtcctttcacatggacacacggaacttttgtgacattggatatcaataaggccaggcgtggcggcgattacgtctgtaatcccaggactttgggaggccaaggcgggcagatcacttcaggccaggaattcaagagcagcctggccaatatggcgaaactctgtctctactgaaaacaaacaaacaaacaaacaaacaaacaaagaaacaacaaaaattagccgggtgtggtggcacacgcctgtagtcccagctactcaggaggctgaggcataagaattgcttgaaccctggaggcggaggttgcagtgagctgagattgggccaccgcactccagtctgggagacagagtgagactgtctcaaaacaacaacaaaaaaatccctaacataatctcaaaaaaaaaaaaaaaaaaaaaaaaaaaaaaaagggcggccgc

SEQ ID NO: 756 - DNA, 1626 bp, Homo sapiens
  misc_feature (525)..(525): n equals a,t,g, or c
  misc_feature (542)..(542): n equals a,t,g, or c
  misc_feature (562)..(562): n equals a,t,g, or c
  misc_feature (607)..(607): n equals a,t,g, or c
ccacgcgtccgacgcggcgcacgcggcagtcctgatggcccggcatgggttaccgctgctgcccctgctgtcgctcctggtcggcgcgtggctcaagctaggaaatggacaggctactagcatggtccaactgcagggtgggagattcctgatgggaacaaattctccagacagcagagatggtgaagggcctgtgcgggaggcgacagtgaaaccctttgccatcgacatatttcctgtcaccaacaaagatttcagggattttgtcagggagaaaaagtatcggacagaagctgagatgtttggatggagctttgtctttgaggactttgtctctgatgagctgagaaacaaagccacccagccaatgaagtctgtactctggtggcttccagtggaaaaggcattttggaggcagcctgcaggtcctggctctggcatccgagagagactggagcacccagtgttacacgtgagctggratgacgcccgtgcctaatgtgcytkgsgggggraaacgactgncccacsggagggaagantggggagtttttccgcccgnaggggggcttgaarggtccaagtttaccccatggggggaactggnttccagccaaaccgcaccaacctgtggcagggaaagttccccaagggagacaaagctgaggatggcttccatggagtctccccagtgaatgctttccccgcccagaacaactacgggctctatgacctcctggggaacgtgtgggagtggacagcatcaccgtaccaggctgctgagcaggacatgcgcgtcctccggggggcatcctggatcgacacagctgatggctctgccaatcaccgggcccgggtcaccaccaggatgggcaacactccagattcagcctcagacaacctcggtttccgctgtgctgcagacgcaggccggccgccaggggagctgtaagcagccgggtggtgacaaggagaaaagccttctagggtcactgtcattccctggccatgttgcaaacagcgcaattccaagctcgagagcttcagcctcaggaaagaacttccccttccctgtctcccatccctctgtggcaggcgcctctcaccagggcaggagaggactcagcctcctgtgttttggagaaggggcccaatgtgtgttgacgatggctgggggccaggtgtttctgttagaggccaagtattattgacacaggattgcaaacacacaaacaattggaacagagcactctgaaaggccattttttaagcattttaaaatctattctctccccctttctccctggatgattcaggaagctgmacattgtttcctcaaggcagaattttcctggttctgttttctcagccagttgctgtggaaggagaatgctttctttgtggcctcatctgtggtttcgtgtccctctgaaggaaactagtttccactgtgtaacaggcagacatgtaactatttaaagcacagttcagtcctaaaagggtctgggagaaccagatgatgtactaggtgaagcattgcattgtgggaatcacaaagcaaatagtactccagaaagaccctgtctcaaaaaaaaaaaaaaaaaaaaaaaaaaaaaaaaaaaaaaa

SEQ ID NO: 757 - DNA, 549 bp, Homo sapiens
  misc_feature (496)..(496): n equals a,t,g, or c
gggacgcgtcgttgcagcagcggctcccagctcccagccaggattccgcgcgccccttcacgcgccctgctcctgaacttcagctcctgcacagtcctccccaccgcaaggctcaaggcgccgccggcgtggaccgcgcacggcctctaggtctcctcgccaggacagcaacctctcccctggccctcatgggcaccgtcagctccaggcggtcctggtggccgctgccactgctgctgctgctgctgctgctcctgggtcccgcgggcgcccgtgcgcaggaggacgaggacggcgactacgaggagctggtgctagccttgcgttccgaggaggacggcctggccgaagcacccgagcacggaaccacagccaccttccaccgctgcgccaaggatccgtggaggttgcctggcacctacgtggtggtgctgaaggaggagacccacctctcgcagtcagagcgcactgcccgccgcctgcaggcccaggctgnccgccggggatacctaccaagatcctgcatgtcttccatggccttcttcctgg

SEQ ID NO: 758 - DNA, 1120 bp, Homo sapiens
  misc_feature (6)..(6): n equals a,t,g, or c
  misc_feature (13)..(13): n equals a,t,g, or c
  misc_feature (17)..(17): n equals a,t,g, or c
  misc_feature (1020)..(1020): n equals a,t,g, or c
  misc_feature (1084)..(1084): n equals a,t,g, or c
cttaancgggggnccanggggaaaactcgtgacmytatagaaggtacgcctgcaggtaccggtccggaattcccgggtcgacccacgcgtccggagccaggcagtgagactggctcgggcgggccgggacgcgtcgttgcagcagcggctcccagctcccagccaggattccgcgcgccccttcacgcgccctgctcctgaacttcagctcctgcacagtcctccccaccgcaaggctcaaggcgccgccggcgtggaccgcgcacggcctctaggtctcctcgccaggacagcaacctctcccctggccctcatgggcaccgtcagctccaggcggtcctggtggccgctgccactgctgctgctgctgctgctgctcctgggtcccgcgggcgcccgtgcgcaggaggacgaggacggcgactacgaggagctggtgctagccttgcgttccgaggaggacggcctggccgaagcacccgagcacggaaccacagccaccttccaccgctgcgccaaggatccgtggaggttgcctggcacctacgtggtggtgctgaaggaggagacccacctctcgcagtcagagcgcactgcccgccgcctgcaggcccaggctgcccgccggggatacctcaccaagatcctgcatgtcttccatggccttcttcctggcttcctggtgaagatgagtggcgacctgctggagctggccttgaagttgccccatgtcgactacatcgaggaggactcctctgtctttgcccagagcatcccgtggaacctggagcggattacccctccacggtaccgggcggatgaataccagccccccgacggaggcagcctggtggaggtgtatctcctagacaccagcatacagagtgaccaccgggaaatcgagggcagggtcatggtcaccgacttcgagaatgtgcccgaggaggacgggacccgcttccacagacaggccagcaagtgtgacagtcatggacccacctggcaggggtggtcagcggncgggatgccggcgtggccaagggtgccagcatgcgcagcctgcgcgtgctttcccaaaaaaaanccccttttggggggccccccccaaaaaaaggggggg

SEQ ID NO: 759 - DNA, 1893 bp, Homo sapiens
  misc_feature (1)..(1): n equals a,t,g, or c
  misc_feature (5)..(5): n equals a,t,g, or c
  misc_feature (1853)..(1853): n equals a,t,g, or c
  misc_feature (1871)..(1871): n equals a,t,g, or c
ngggntttttttttttttttttttttttaggacaacgtttgtttgtttttattttaaaaagtcaccatattaataaaaatgctacaaaacccagaataaatatcttcaagttacaaaagcaaaacaggtctagaaaagttggctgtaaaaaggcaacagagaggacagacccaaaagataaatgtctgcttgcttgggtggggctggtgctcaaggagggacagttgttggccctctcccccgaccatgccttagaagcatctccgccaggccagtgaatcaggcctgggtgataacggaaaaagttccatgcctgcaggcatcgttctgccatcactcaccgagcttcctggtctgtgttccccttcccagcctcactgttacccgtaaaaatgaggagcccagccgggtgaagtaagaagaggcttggcttcagagccagcccaatctgcgtttctggctcagttcctgctgtgtgagcttggcaggcacgccccctctggttccaggtttcttcctctgtgaagtaggggtgcgaakwgtgtactgccgggtagtggagcgggttggctgagacagtgcatgcaccactgcacactgccgagtcagtcctaggtgatggctccccgcaggccacctttgggtgttgctagcacagcctggcatagagcagagtaaaggtggctcaggaaaccaagcacagcctgtgaccaccaggggcrcacctgtctccagctctggctagatgccatccagaaagctaagcctccattaatcagggagcccccaggggcttctccacagttagctggagatgagggccatcagcacctttcacactmaccccccaacgatgtttgtccctgcagcccctaccgccccctcccctatccatgggaagaatcctgcctccttggtggagacctgaggattgaatgcctggcacggaacaagagctcaataaaagtcattctgcccacggacatcggcacattgggagcagctggcagcacccgagcacagctcgacctgtttgaatggtgaaatgccccacagtgagggagggagcttcctggcacctccacctggggaggaggcacccagagtgagtgagttccaggcaaggaggctgccccactcaagggccaggccagcagccccggaaaggcggaagcatccccatcccctcgtgccaggccatggagggctgagagagggacaagtcggaaccattttaaagctcagccccagcccttgaccctccccagacacccatcctgggatggggctgtcactggagctcctgggaggcctgcgccaggtgccggctccggcagcagatggcaacggctgtcacggcctcttcgctggtgctgcctgtagtgctgacgtcccggctcctgactacacacgtgttgtctacggcgtaggcccccaggacgtgggaggtcccagggagggcactgcagccagtcagggtccagccctcctcgcaggccacggtcacctgctcctgaggggccgggattccatgctccttgactttgcattccagacctggggcatggcagcaggaagcgtggatgctggcctccctgtggcccacgcactggttgggctgacctcgtggcctcagcacaggcggcttgtgggtrccaarrtcctccacctcccagtgggagctgcagcctgtgaggacgtggccctgttggtggcagtggacacgggtccccatgctggcctcagctggtggagctgtgtggacgctgcagttggcctggggtagcagacagcacctggcaatggcgtagacaccctcacccccaaaagcgttgtgggcccgggagcccaanttsaaagaagattccccnttcccccccstcccccgtgtgc

SEQ ID NO: 760 - DNA, 1187 bp, Homo sapiens
  misc_feature (39)..(39): n equals a,t,g, or c
  misc_feature (46)..(46): n equals a,t,g, or c
  misc_feature (1052)..(1052): n equals a,t,g, or c
  misc_feature (1108)..(1108): n equals a,t,g, or c
  misc_feature (1129)..(1129): n equals a,t,g, or c
  misc_feature (1138)..(1138): n equals a,t,g, or c
  misc_feature (1158)..(1158): n equals a,t,g, or c
  misc_feature (1172)..(1172): n equals a,t,g, or c
gcacccacctggcaggggtggtcagcggccgggatgttnggcgtgntcaagggtgccagcatgcgcagcctgcgcgtgctcaactgccaagggaagggcacggttagcggcaccctcataggcctggagtttattcggaaaagccagctggtccagcctgtggggccactggtggtgctgctgcccctggcgggtgggtacagccgcgtcctcaacgccgcctgccagcgcctggcgagggctggggtcgtgctggtcaccgctgccggcaacttccgggacgatgcctgcctctactccccagcctcagctcccgaggtcatcacagttggggccaccaatgcccaggaccagccggtgaccctggggactttggggaccaactttggccgctgtgtggacctctttgccccaggggaggacatcattggtgcctccagcgactgcagcacctgctttgtgtcacagagtgggacatcacaggctgctgcccacgtggctggcattgcagccatgatgctgtctgccgagccggagctcaccctggccgagttgaggcagagactgatccacttctctgccaaagatgtcatcaatgaggcctggttccctgaggaccagcgggtactgacccccaacctggtggccgccctgccccccagcacccatggggcaggttggcagctgttttgcaggactgtgtggtcagcacactcggggcctacacggatggccacagccatcgcccgctgcgccccagatgaggagctgctgagctgctccagtttctccaggagtgggaagcggcggggcgagcgcatggaggcccaagggggcaagctggtctgccgggcccacaacgcttttgggggtgagggtgtctacgccattgccaggtgctgcctgctaccccaggccaactgcagcgtycacacagcttcaccagctgaggccagcatggggacccgtgtccactgcaccaacagggccacgtcctcacaggctgcagcttccactgggaggtggaagaaccttggcacccacaagcccgncttgtgctgaagccaccaaggtcaagcccaaccaagtgccgtgggccacaaggganggccaagcattccacgctttncttgcttgncattgcccccaagtcttggnaatggcaaaagtcnaaggaagcattggga

SEQ ID NO: 761 - DNA, 2351 bp, Homo sapiens
ccacgcgtccggcagaagcagcagcagcagaagacacagcgccggtccaggaggcggctcgagctgttcgtaaagtcgcccgacagctttttctccgtagtatgcgagttgacaaaacagccagagaacagggctccccattacaatcttttcgagatcttttcccttgctaaccggatctgatttgtgcgaaaacatgccttgcacttgtacctggaggaactggagacagtggattcgacctttagtagcggtcatctacctggtgtcaatagtggttgcggttcccctatgcgtgtgggaattacagaaactggaggttggaatacacaccaaggcttggtttattgctggaatctttttgctgtgactattcctatatcactgtgggtgatattgcaacacttagtgcattatacacaacctgaactacaaaaaccaataataaggattctttgggatggtacctatttacagttttagatagttggatagctttgaaatatcccggaattgcaatatatgtggatacctgcagagaatgctatgaagcttatgtaatttacaactttatgggattccttaccaattatctaactaaccggtatccaaatctggtattaatccttgaagccaaagatcaacagaaacatttccctcctttatgttgctgtccaccatgggctatgggagaagtattgctgtttaggtgcaaactaagtgtattacagtacacagttgtcagacctttcaccaccatcgttgctttaatctgtgagctgcttggtatatatgacgaagggaactttagcttttcaaatgcttggacttatttggttataataaacaacatgtcacagttgtttgccatgtattgtctcctgctcttttataaagtactaaaagaagaactgagcccaatccaacctgttggcaaatttctttgtgtaaagctggtggtttttgtttctttttgatttggcgtttaccttttcctaacatataggcaagcagtagttattgctttgttggtaaaagttggcgttatttctgaaaagcatacgtgggaatggcaaactgtagaagctgtggccaccggactccaggattttattatctgtattgagatgttcctcgctgccattgctcatcattacacattctcatataaaccatatgtccaagaagcagaagagggctcatgctttgattcctttcttgccatgtgggatgtctcagatattagagatgatatttctgaacaagtaaggcatgttggacggacagtcaggggacatcccaggaaaaaattgtttcccgaggatcaagatcaaaatgaacatacaagtttattatcatcatcatcacaagatgcaatttccattgcttcttctatgccaccttcacccatgggtcactaccaagggtttggacacactgtgactccccagactacacctaccacagctaagatatctgatgaaatccttagtgatactataggagagaaaaaagaaccttcagataaatccgtggattcctgaacagtatggaaaagcaaactgtgcaactactacattatatcattacctggtatcccatggattttgtgcttgggacagaccataaatgatggaaaatgtcaacacaaaaatagctgaaagccaggtacaactactgcatttatatatgtaagttttgtatatcaaaaataattggtctaaatttcctagacttagacttgatttcttaacattagggtatcgcatactcaaatggtagacaatgaccccaactaaatcttcctgatgttacactgctttatcaagaggatggacttttttttttttgagacagacagagtcttgctctgtcacccaggctggagtgcagtggcgcaatctcgggtcactgcaagctctgcctcccaagttcatgccattctcctgcctcagccctcccaagtagctgggactacaggcacctgccaccatgcccagctaattttttttttttcagtagagacagggtctcaccatgttagccaggatggtcttgatctgacctcgtgatccgccgacctcggcctcccaaagtgctggaattacaggcgtgagccactgcgcctggccaagaatggacattttttaaaaaaacatcagtacttcctaccactgctgcatgagtataatgctccggaattatcagaaagcataatgcagaaatacgaattagtggaacttaatcatgtgccatataagcttacctaacaaacagttatatccctattcctcaactgaatgtctttcaataaataagaatttatcatttaaaaaaaaaaaaaaaaaaaa

SEQ ID NO: 762 - DNA, 1001 bp, Homo sapiens
cgcgctggaaccctgtggcggcggccatggccatatggcgctgcccgcctggctgcagccaggtataggaagaatgcgtatcttttcatctattacttaatccagttctgtggccactcttggatatttacaaatatgacagtcagattcttttcatttggaaaaggtaaaactccgaaacagtttttttatttttaacttttaatccttgttttcacctcatcctgcttatattaaatttctacacacctcaaccttctaccacgggatacagattcaatggttgacactttttatgctattggacttgtgatgcgactttgccaatccgtatctctcctggaactgctgcacatatatgttggcattgagtcaaaccatcttctcccaaggtttttgcagctcacagaaagaataatcatcctttttgtggtgatcaccagtcaagaggaagtccaagagaaatatgtggtgtgtgttttattcgtcttttggaatctattggatatggttaggtacacttatagcatgttatcagtcataggaatatcctatgctgtcttgacatggctcagtcaaacactatggatgccaatttatcctttgtgtgttcttgctgaagcatttgccatctatcaatcgctgccttattttgaatcatttggcacttattccaccaagctgccctttgacttatccatctatttcccatatgtgctgaaaatatatctcatgatgctctttataggtatgtattttacctacagtcatctatactcakaaagaagagacatcctcggaatctttcccattaaaaaaaagaagatgtgaagtacagcattccagtgtgacacgagaaaagacaggctgtggattcagtgcagtaaataaaacacaggaagtattctggtggaaaaaaaaaaaaaaaaaaaaaaaaaaraaraaaaaaaaawaaaaaaaaaaaaaaaaaaaaaaaaaaaaaaaaaaaaaaaaaaaaaaaa

SEQ ID NO: 763 - DNA, 669 bp, Homo sapiens
ccacgcgtccggacactttttatgctattggacttgtgatgcgactttgccaatccgtatctctcctggaactgctgcacatatatgttggcattgagtcaaaccatcttctcccaaggtttttgcagctcacagaaagaataatcatcctttttgtggtgatcaccagtcaagaggaagtccaagagaaatatgtggtgtgtgttttattcgccttttggaatctattggatatggttaggtacacttatagcatgttatcagtcataggaatatcctatgctgtcttgacatgggctcagtcaaacactatggatgccaatttatcctttgtgtgttcttgctgaagcatttgccatctatcaatcgctggcttattttgaatcatttggcacttattccaccaagctgccctttgacttatccatctatttcccatatgtgctgaaaatatatctcatgatgctctttataggtatgtattttacctacagtcatctatactcagaaagaagagacatcctcggaatctttcccattaaaaaaaagaagatgtgaagtacagcattccagtgtgacacgagaaaagacaggctgtggattcagtgcagtaaataaaacacaggaagtattctggtggaaaaaaaaaaaaaaaaaaaaaaaaaaaaa

SEQ ID NO: 764 - DNA, 1356 bp, Homo sapiens
  misc_feature (1231)..(1231): n equals a,t,g, or c
cccacgcgtccgaaagaatgttgtggctgctcttttttctggtgactgccattcatgctgaactctgtcaaccaggtgcagaaaatgcttttaaagtgagacttagtatcagaacagctctgggagataaagcatatgcctgggataccaatgaagaatacctcttcaaagcgatggtagctttctccatgagaaaagttcccaacagagaagcaacagaaatttcccatgtcctactttgcaatgtaacccagaggtatcattctggtttgtggttacagacccttcaaaaaatcacacccttcctgctgttgaggtgcaatcagccataagaatgaacaagaaccggatcaacaatgccttctttctaaatgaccaaactctggaatttttaaaaatcccttccacacttgcaccacccatggacccatctgtgcccatctggattattatatttggtgtgatattttgcatcatcatagttgcaattgcactactgattttatcagggatctggcaacgtagaagaaagaacaaagaaccatctgaagtggatgacgctgaagataagtgtgaaaacatgatcacaattgaaaatggcatcccctctgatcccctggacatgaagggagggcatattaatgatgccttcatgacagaggatgagaggctcacccctctctgaagggctgttgttctgcttcctcaagaaattaaacatttgtttctgtgtgactgctgagcatcctgaaataccaagagcagatcatatattttgtttcaccattcttcttttgtaataaattttgaatgtgcttgaaagtgaaaagcaatcaattatacccaccaacaccactgaaatcataagctattcacgactcaaaatattctaaaatatttttctgacagtatagtgtataaatgtggtcatgtggtatttgtagttattgatttaagcatttttagaaataagatcaggcatatgtatatattttcacacttcaaagacctaaggaaaaataaattttccagtggaggatacatataatatggtgtagaaatcattgaaaatggatcctttttgacgatcacttatatcactctgtatatgactaagtaaacaaaagtgagaagtaattattgtaaatggatggataaaattggaattactcatatacagggtgggattttatcctgttatcacaccaacagttgattatatattttctgnatatcagcccctaataggacaattctatttgttgaccatttctacaatttgtaaaagtccaatctgtgctaacttaataaagtaataatcatccaaaaaaaaaaaaaaaaaaaaaaaaaaaaaaa

SEQ ID NO: 765 - DNA, 1063 bp, Homo sapiens
  misc_feature (444)..(444): n equals a,t,g, or c
  misc_feature (962)..(962): n equals a,t,g, or c
ggtcgacccacgcgtccggcagtgaacactctttgctaaatttctgactgaatccaagatttttccttagaatagattcttaaaagtgggggccaggtgcggtggctcacacctataatcccagcaccttgggaggccgaggtggccagatcattgaggtcaggagtttgaaaccagcctggccaacatggtgaaaccccgtctctactaaaaatacaaaaattagccaggtgtgtggggcgtgcgcctgtagtcccagctacttgggaggctgaggcaggagaatcgcttgagcctgggaagcagaggttgcatgggccgggatcacgccactgcactccagcctgggtgacagcaagactccatctaagaaaacaaaaaaaaaaagtacgattggtgcgccagagtgaacacaaaatgtaaagacttgtgtatttgtgaganccttttgaagcatgctatctccccagctamaccctcttcaggtgcccctttcctgctcctcctgcttttcaaactgtggctcgtggttccaggctcaagcacggacatcagtraggactgggagaaagactttracttggacatgactgaagaggaggtgcagatggcactttccaaagtggatgcctccggggaggtgagtgggcctggtgggtcagagggaagcgagcctaatggtcctgggtgtgagagctctccccagccagcccagctgtcccctcaggagggtccctgctcctgtytgaggtgacaggtggtgggaaaggagctggagcttcctgctcagacccacaacattggtcatcagcaggytgcacttttcctcagttccagggtggatagagggtcaagttcttgaccttagctctgtatcaaaattgcctgagaaactgcttaagaaaacagatgtcatgctgagcacggtggctcacacctgtaatcccaacactttgggaggnccaaggtgggaggattgcttgaggcgaggagttcaagaccagcctggccaatatagtgagaccccatttctgtttttgaaaaaaaaaaaaaaagggcggcc

SEQ ID NO: 766 - DNA, 1311 bp, Homo sapiens
  misc_feature (1036)..(1036): n equals a,t,g, or c
  misc_feature (1112)..(1112): n equals a,t,g, or c
  misc_feature (1168)..(1168): n equals a,t,g, or c
  misc_feature (1223)..(1223): n equals a,t,g, or c
gaaaaaagaaagcaatatggaaaccgaactaaggagattttaaactgagatataagatgctttcaattattcccaatgacaggctatttatcaatttaatatttttaagcaacttcctcccatcagtgctctgggaaccagctgggcagatgtggtacacccatgtcagataccccagtggcaggctcctgtcactgtagcacttggtccctccatccctcccagccttcctagctccttgctcctggaaacctccccccatcaatctctgacatttcagaggaaatactgtttgtcacctcttaaggaatctgggaggacggcctgtgagatatggcgtcagttacagcctcttaaagagtcaatagcccctgcagaggccagaacactggaacaaatgtaaggaaggtatagtttttaaagatttttgacttgaattaaataggattggttacttcttgcccctcccgagggtggactgtgcacagaagagacctcttcaccgggtttgctgctctttttcgcactgtgagttggggttctaacagtcagcgttggtccataacaaaatggaaatcctttctttcccctcctgttaatgccccctgtctgtgcagtgactgtgcaaccagcaccttttgtggtcgaatcagccagcagaagtgcccctcgtgttcctggattctctcttctgtggttccatttctttgagtcctgggttctcgccctgaatggctcaacagggggaaaggcagacagcttcttcgtgccagaaacatttttttttttttttgaaatartgagccaagattgcgccactgcattccatcctcagcaacagarcaagactccaactcawaacaaaacaaaagattgargtwattgtggcaacacctgcctttttttctaagctgcaattctctactgttttcaagaaaaatacaagttagcctatttacagaatgttttgaattgactcctgtcctctggttaaaactcctcttgagataattgatagctgaaaaggtaggatggntctctcaaacttgacttccatctaaatcaacgctgagttgattaacttagatatcaagaaaaattgcctcattagnttacccctgaggagatgcctatgaaggtacatcctttttacaattaataagacagntttcacatgaagaaacaatttgaaatatttaataagaaaatggggtgaaggcaancattacggttgggaaaagaccatgcaagcctttatagaggataacgatttatatattcactattaatttggccgggtaataggaacct

SEQ ID NO: 767 - DNA, 718 bp, Homo sapiens
  misc_feature (1)..(1): n equals a,t,g, or c
  misc_feature (678)..(678): n equals a,t,g, or c
  misc_feature (687)..(687): n equals a,t,g, or c
  misc_feature (699)..(699): n equals a,t,g, or c
  misc_feature (708)..(708): n equals a,t,g, or c
natccccctggctgcaggaattcggcacgaggaactctgagcaccgtggcttccagcatcaatgccttggcaacagtgacctttgaggattttgtcaagagctgttttcctcatctctccgacaagctgagcacctggatcagtaaaggcttatgtctcttatttggcgtgatgtgtacctctatggctgtggctgcatctgtcatgggaggtgttgtgcaggcttccctcagcattcacggcatgtgtggaggaccaatgctgggcttattctccctgggaatcgtgttcccttttgtgaattggaagggtgcactaggaggtcttcttactggaatcaccttgtcattttgggtggccattggggccttcatttaccctgcaccagcctctaagacatggcctttgcctctatcaacagaccaatgtatcaaatcaaatgtgacagcaacagggcctccagtactatccagcagacctggaatagctgatacctggtactcgatctcctacctttactacagtgcagtgggctgcttaggatgcattgttgctggagtaatcatcagcctcataacaggtcgccaaagaggtgaggatattcaaccactggttaattagaccagtttgtaatttaatttgcttttggtctaagaaagtacaaaaccactatgctgngtgtggagntcagcatgacantggggacanagcaggaaaa

SEQ ID NO: 768 - DNA, 614 bp, Homo sapiens
  misc_feature (52)..(52): n equals a,t,g, or c
aatcccaaaggttgtctttaaatatttctcaaaagagaaagccttgaaagangcatacaatagagtaaaaatwaattaccagtatttattattagaaaagatagaaagacagacaaatcagtggaggaattaaaacagagaaactggagtttataaaacagagcccaatccttgccttctctccctccactcaaatagaaaaggagaatggagaaagagaaagaaggtattaggctacagtttataagagagatgagaaaaaaatacatttgggaatagagggaaagggtcaaaaggggtcacatttggagaaatatctgaaaatgagaaggagcagaatttttggaaacattttttaaagtctggcaacgctaattaagctgttgatctaaggatttgcaaattgagaggtgcaattattttccaaatgatttgtgacactcttattaattagaatatatattctgtgaatattgaaatctgagccaaaactagttagctttattaatatcttagggaaagaagagagaaagaaagagggagggagagagagaaagaaagaaagaaagaaagaaagaaagaaagaaagaaaaaaaaaaaaaaaaaactcgtag

SEQ ID NO: 769 - DNA, 465 bp, Homo sapiens
ggcggccctctgcgcctacgcggtcacctacacagcgatgtacgtgactctcgtgttccgcgtgaagggctcccgcctggtcaaaccctcgctctgcctggccttgctgtgcccggccttcctggtgggcgtggtccgcgtggccgagtaccgaaaccactggtcggacgtgctggctggcttcctgacaggggcggccatcgccacctttttggtcacctgcgttgtgcataactttcagarccggccaccctctggccgaargctctctccccaragtgcctaccctcgcctgcctgggcctyagtttccacatctgcacaatgggggtgaccatccctgccctgctggctgcaggarcggctgtgagtcttcagcgtggatgcagcctgggggaagccatagggcagctttcacaggcctggccttaccatgggcgggagggagaccgcatccgaagaggag

SEQ ID NO: 770 - DNA, 1194 bp, Homo sapiens
gagcccagcaacgtgcaaggggaaaggggacaggattctggatggccatttgcttcactgggatgcaaaacctcttttgagtactagaatcagtatttcttcttccatctctgctgtacctgagaagaaatggccaaacgcaccttctctaacttggagacattcctgattttcctccttgtaatgatgagtgccatcacagtggcccttctcagcctcttgtttatcaccagtgggaccattgaaaaccacaaagatttaggaggccattttttttcaaccacccaaagccctccagccacccagggctccacagccgcccaacgctccacagccacccagcattccacagccacccagagctccaacagccaactcaaacttctccagtgcctttaaccccagagtctcctctatttcagaacttcagtggctaccatattggtgttggacgagctgactgcacaggacaagtagcagatatcaatttgatgggctatggcaaatccggccagaatgcacagggcatcctcaccaggctatacagtcgtgccttcatcatggcagaacctgatgggtccaatcgaacagtgtttgtcagcatcgacataggcatggtatcccaaaggctcaggctggaggtcctgaacagactgcagagtaaatatggctccctgtacagaagagataatgtcatcctgagtggcactcacactcattcaggtcctgcaggatatttccagtataccgtgtttgtaattgccagtgaaggatttagcaatcaaacttttcagcacatggtcactggtatcttgaagagcattgacatagcacacacaaatatgaaaccaggcaaaatcttcatcaataaaggaaatgtggatggtgtgcagatcaacagaagtccgtattcttaccttcaaaatccgcagtcagagagagcaaggtattcttcaaatacagacaaggaaatgatagttttgaaaatggtagatttgaatggagatgacttgggccttatcagtttttcattcagcaagtctgcactagggacctactatgagccacgcaatacttccttggaatgatgtattccctggccttgaaataaggaatctagtacccatgtttgtgctactggaatgaatccattaaactctctgagactcaaaaaaaaaaaaaaaaaaaaaaaaa

SEQ ID NO: 771 - DNA, 2334 bp, Homo sapiens
  misc_feature (2278)..(2278): n equals a,t,g, or c
  misc_feature (2290)..(2290): n equals a,t,g, or c
gggagtgtggctgcagaacccaggtggcagggctttcctcaggccccttactcctgacctggacgaggccggggcttcctcaaggaggctctctgactgccacccctgcctgcctgcccggccctgcacaacatgcagccctccggcctcgagggtcccggcacgtttggtcggtggcctctgctgagtctgctgctcctgctgctgctgctccagcctgtaacctgtgcctacaccacgccaggcccccccagagccctcaccacgctgggcgcccccagagcccacaccatgccgggcacctacgctccctcgaccacactcagtagtcccagcacccagggcctgcaagagcaggcacgggccctgatgcgggacttcccgctcgtggacggccacaacgacctgcccctggtcctaaggcaggtttaccagaaagggctacaggatgttaacctgcgcaatttcagctacggccagaccagcctggacaggcttagagatggcctcgtgggcgcccagttctggtcagcctatgtgccatgccagacccaggaccgggatgccctgcgcctcaccctggagcagattgacctcatacgccgcatgtgtgcctcctattctgagctggagcttgtgacctcggctaaagctctgaacgacactcagaaattggcctgcctcatcggtgtagagggtggccactcgctggacaatagcctctccatcttacgtaccttctacatgctgggagtgcgctacctgacgctcacccacacctgcaacacaccctgggcagagagctccgctaagggcgtccactccttctacaacaacatcagcgggctgactgactttggtgagaaggtggtggcagaaatgaaccgcctgggcatgatggtagacttatcccatgtctcagatgctgtggcacggcgggccctggaagtgtcacaggcacctgtgatcttctcccactcggctgcccggggtgtgtgcaacagtgctcggaatgttcctgatgacatcctgcagcttctgaagaagaacggtggcgtcgtgatggtgtctttgtccatgggagtaatacagtgcaacccatcagccaatgtgtccactgtggcagatcacttcgaccacatcaaggctgtcattggatccaagttcatcgggattggtggagattatgatggggccggcaaattccctcaggggctggaagacgtgtccacatacccagtcctgatagaggagttgctgagtcgtggctggagtgaggaagagcttcagggtgtccttcgtggaaacctgctgcgggtcttcagacaagtggaaaaggtacaggaagaaaacaaatggcaaagccccttggaggacaagttcccggatgagcagctgagcagttcctgccactccgacctctcacgtctgcgtcagagacagagtctgacttcaggccaggaactcactgagattcccatacactggacagccaagttaccagccaagtggtcagtctcagagtcctccccccacatggccccagtccttgcagttgtggccaccttcccagtccttattctgtggctctgatgacccagttagtcctgccagatgtcactgtagcaagccacagacaccccacaaagttcccctgtttgcaggcacaaatatttcctgaaataaatgttttggacatagaaaaaaaaaaaaaaaaaagggcggccgctctagaggatccctcgaggggcccaagcttacgcgtgcatgcgacgtcatagctctctccctatagtgagtcgtattataagctaggcactggccgtcgttttacaacgtcgtgactgggagatctgctagcttgggatctttgtgaaggaaccttacttctgtggtgtgacataattggacaaactacctacagagatttaaagctctaaggtaaatataaaatttttaagtgtataatgtgttaaactagctgcatatgcttgctgcttgagagttttgcttactgagtatgatttatgaaaatattatacacaggagctagtgattctaattgtttgtgtattttagattcacagtcccaaggctcatttcaggcccctcagtcctcacagtctgttcatgatcataatcagccataccacatttgtagaggttttacttgctttaaaaaacctyccacacctccccctgaacctgaaacataaaatgaatgcaattggtggtggtaacttggttaatggagcttataatggtaccaataaagcantgcatcacaaanttcccaaataaagcattttttcctggaatttaaatgggggttgg

SEQ ID NO: 772 - DNA, 720 bp, Homo sapiens; identical to SEQ ID NO: 736
  misc_feature (20)..(20): n equals a,t,g, or c

SEQ ID NO: 773 - DNA, 759 bp, Homo sapiens
  misc_feature (16)..(16): n equals a,t,g, or c
  misc_feature (22)..(22): n equals a,t,g, or c
  misc_feature (36)..(36): n equals a,t,g, or c
  misc_feature (51)..(52): n equals a,t,g, or c
  misc_feature (57)..(58): n equals a,t,g, or c
ggattaacaaattttncacacnaggaaaacaggttnttgacccaattaggnnttttnncaaaaaagcttatttttaggttgacacttattagaagttacgccttgcaggttaccggttccggaattcccgggtcgaaccccaaggggttcgcggaccccagacatgaggaggctcctcctggtcaccagcctggtggttgtgctgctgtgggaggcaggtgcagtcccagcacccaaggtccctatcaagatgcaagtcaaacactggccctcagagcaggacccagagaaggcctggggcgcccgtgtggtggagcctccggagaaggacgaccagctggtggtgctgttccctgtccagaagccgaaactcttgaccaccgaggagaagccacgaggtcagggcaggggccccatccttccaggcaccaaggcctggatggagaccgaggacaccctgggccgtgtcctgagtcccgagcccgaccatgacagcctgtaccaccctccgcctgaggaggaccagggcgaggagaggccccggttgtgggtgatgccaaatcaccaggtgctcctgggaccggaggaagaccaagaccacatctaccacccccagtagggctccaggggccatcactgcccccgccctgtcccaaggcccaggctgttgggactgggaccctccctaccctgccccagctagacaaataaaccccagcaggccgggaaaaaaaaaaaaaaaaaaaaaagggcggccgc

SEQ ID NO: 774 - DNA, 733 bp, Homo sapiens
  misc_feature (652)..(652): n equals a,t,g, or c
  misc_feature (675)..(675): n equals a,t,g, or c
  misc_feature (685)..(685): n equals a,t,g, or c
  misc_feature (704)..(704): n equals a,t,g, or c
  misc_feature (719)..(719): n equals a,t,g, or c
ggcacagcaaaaggggcttctattgtattggtcatattttattttggtttaaaaaattttagagtaaatgtggcaaaatgttaatgcttgttaaatctgagtggagagtacattggtgttaagtgtgctgctatgcagggtgagtgaattactcaataactaaataattgtgacataatatatttatttatgcttccctgttatgatctacacataaaattactggagcattattgcttaacttcttgtaaaaaagttctgcaattgtagtgttattaagaaagtaatattgatttgtatagtgacagaggattttttcagtgkcactttgccagcagagatcttcatggtgggcattgsccctgcccatgtctcacttggccctgggcttgccccactaggtaccctgcccacctggccaggcaggctgtgcttggcttgagctctggcccagatcctgcacttgctctgcggcttgagccaggcatgccatgacctacttccaccttgggagccgcgtctggatgaggggaatgctgtgacacttgaacagaaggtggcatgtgaccccaaagcccaaaagggggtggtacagcatgctacagtcttcagctacatcacagccacaatggagtgttgtgccaaagtcctntccatgttgcagcagaaggtgtntcaggtacanttgttgactgccgtggggnctgagtctttccatnccagataagtggct

SEQ ID NO: 775 - DNA, 741 bp, Homo sapiens
  misc_feature (44)..(44): n equals a,t,g, or c
  misc_feature (69)..(69): n equals a,t,g, or c
  misc_feature (79)..(79): n equals a,t,g, or c
gtatagttgaccaagagggatttttttcagtgtcactttgcccnagcagaagatttttcaatggtgggncattgccccntgcccaatgtctcacttggcccttgggcttgccccactaggtaccctgccgacctggccaggcaggctgtgcttggcttgagctcttggcccagatccctgcacttgctctgcggctgagccaggcatgccatgacctacttccaccttgggagccggcgtctggatgaggggaatgctgtgacacttgaacagaggtgggcatgtgaccccaaagcccccaaagggggtgttacagcatgctaamagttctttcagtctcacatccacagcccaacaaatggaggtgtgtggtgcccagaggtcccttctcccattgtttggcaagcaggaggggtgtgctacagggttacagctttgtttgcacttgccgtttggtgggtcctgagttcttttcccatgtccaagaataaggttgtgctgacagctagcggttgagtgaggcaaagagttttactcagtaacaaaacagctctcagcagagaaggaagcctgagttggacagcacccttacctgaagttgggtagtcttcccaccacctaaaagtgggtagcccaaagtgtggctgagcctggggcttttatatgctcagaatgggagtgtatgtgctaattggtttgtgagtatgcaaaaaaagctaaaaaaaaaaaaaaaaaactcga

SEQ ID NO: 776 - DNA, 951 bp, Homo sapiens
ccccccccccgagtttttttttttttttttgcattttattttaaagttttattatgaaaacacacagaatcaamkgtgttatccatgtatttgcaacagcagagaaacagtgacagtggaccatccccataggggacacttatcctttggctaaactaatataaataatggaaatgacacctaatacaataacacggcacataaaaaagattaaattaagagaagggacaggaactgcggagaggagtcctgagtatggaggagatgtgtctcatggagaagcatccgggctcaggtgaccttccctgaagacttcctgtctctgagcagctcagttcagttccaggtcatacacgtactcctggacccaggaytcactgggatcagcacagacttgcttgcttcttttggtttggaataccacagctggctgggagcagaggctgctggtctcatagtaatctaccacaaagttgcgaggaagcttcctcgcggtgtaagaaaagcagcaggcggtgggagggtctgagcccattggtgctgagagcgctggagagcagaaggcagctactagcatgaggagagacaggacagtcacgcagagcttcatggtattggtggaaaagaggttttctcagaggtgaggctgcagaactcagaagcttcagaacccagctgtgtcctgtgctgatactgasttgggaatctctctttatagggactctgaggcctaggacaaatgtgggggcacaggagagtgagtggaatttccatggtagagatgaygtcatgctcctgaagctagctgagtgaggagttcctctcagcttctcttccccagggcgatgtcatcatagaggaaagatgagggaggtgcaggcgagaagaaaagggaagtggtacagccaaaggcagtgaccgagactggggagagagttgcaaaccccagag

SEQ ID NO: 777 - DNA, 990 bp, Homo sapiens
gcatgccagtgcctactctgtgcctgctgtgggccctggcaatggtgacccggcctgcctcagcggcccccatggscggcccagaactggcacagcatgaggagctgaccctgctcttccacgggaccctgcagctgggccaggccctcaacggtgtgtacaggaccacggagggacggctgacaaaggccaggaacagcctgggtctctatggccgcacaatagaactcctggggcaggaggtcagccggggccgggatgcagcccaggaacttcgggcaagcctgttggagactcagatggaggaggatattctgcagctgcaggcagaggccacagctgaggtgctgggggaggtggcccaggcacagaaggtgctacgggacagcgtkcagcggctagaagtccagytragragcgcctggctgggccctgcctaccgagaatttgaggtcttaaaggctcacgctgacaagcaagagcccacatcctatggccctcacaggccacgtcagcggcagaggcgggagatggtggcacagcagcatcggctgcgacagatccaggagaggtgagcctggcaggggtttggcaggcagggcagttggatggggggcgcacagggcagctggaaaggggccccctcacctgggctgagccacatctccctccccagactccacacagcggcgctcccagcctgaatctgcctggatggaactgaggaccaatcatgctgcaaggaacacttccacgccccgtgaggcccctgtgcagggaggagctgcstgttcactgggaymagccagggcgccgggccccacttctgagcacagagcagagacagacgcaggcggggacaaaggcagaggatgtagtccccattggggaggggtggaggaaggacatgtaccctttcatgcctacacacccctcattaaagcagagtcgtggcatctcaaaaaaaaaaaaaaaaaaaaaaaactcgta

SEQ ID NO: 778 - DNA, 1932 bp, Homo sapiens
aatttttttttttttttttttttttttgaaaaaaaaaatgggtagtgtatattttgcaggtttaagacaactcaggacaataaaaacaatggactttacatgtgtatatatatagctctcttaggcaccataatcagtatgagccaacaatatttaaacttgattcaggccacattcagacatttgctcttatatacaaatatttaaattaaatacaatctgaaatgtgttctgttacatacaaaaaaggaaaaactatacaacgcagagcagtgtgtgtgttttaaataattacatttacatgtaagctaaatggaaccagcaatggtgctcaagtttttatcatcccttccagaaaatctttttctaccatctcttctattttttgcctggctttgctggaacatggtttgtggttctccagtttcatgtccttattagggaaggcatttgagtagaggataggactccctgagtgtcctccacatcggcttgtgactttgctgttgaagacttgactgagcacattgaagaacggcaggagctgctccatactgcgcacggtgcagatggtgagcagcaagtgccctggctcccaacccaatgttctccctgagttgtcttcctctggatttttctgcagaaaacaaaaagtgaactggtattaatacaacagacaatgtggtatgttagaaaaattaaaaatatataaactttggcaattggtcaagaaatgaatacaaatgacattaagtttctaactcctgacctgatcaaaacccttggtgcttctgagaccttttactgccatttattagttttacatggagcagtctaacattgtagtaatagttcccaactagaatgcgcagataagcttagttaacagaaatagctttgaacaggaatagagtcaaacataaaagttttatgttgtgctttgtatttactcaaaaagctcccaggtttctgaaccctcactactgtaaccaaggactaggtcacaaaattactacagaaaaaaggaacaaagtgctttatacatttcataatatatccccttttattataattagttaattcccttttatctaaatggcctaaatttgccatgatggtagcagtgtccaaagtgaataattactgtcagtactgcatcacagagaaaggaagggatccctcaggagacactgctgtctccttctgggttgtgctaaacaacatagggaggaaagctggacctggagtcaaaggaattgagttagtgtgctggctctgccatacttacggcacccttgggcaggatatacaaaggttcctcacttataaaatgggacagtctaaaactaccttttagtagagaagtcaaatgagaaggtatgtgaaaactctgtcaactaaatataaagactaataatttgggtattaagaggctagtttgagaagccacctgaattacacaaacacagctacagacatcattctgtctagagaaagataagagagaacaggttggttgaacttgggcagaatcacagatacaattccacactaaagaatgaaaataagcaatgaactagacagaaggaagaaatcatgaagacttaggaagcagaattacaatctgtcatattaacaaatggagtttgccttctaagatcagatgttgctcagaaactttcattgtttacctaataatttaatatcactagtttcctagtgggtcaagcagatgcaaaatccagcttattttcttctatgtgctctcaagcttattgcttattttaaagtaaaatcctgaaaaaggaaaatattaggttggtgcaaacgtaattgcggtttttgcattgttgaaatttgccgttttatattggagtacattcttaaataaatgtggttatgttatacaaaaaaaaaaaaaaaaaactcgag

SEQ ID NO: 779 - DNA, 1636 bp, Homo sapiens
  misc_feature (1624)..(1624): n equals a,t,g, or c
tcgacccacgcgtccggctgagtgtgagctgagcctgccccaccaccaagatgatcctgagcttgctgttcagccttgggggccccctgggctgggggctgctgggggcatgggcccaggcttccagtactagcctctctgatctgcagagctccaggacacctggggtctggaaggcagaggctgaggacaccagcaaggaccccgttggacgtaactggtgcccctacccaatgtccaagctggtcaccttactagctctttgcaaaacagagaaattcctcatccactcgcagcagccgtgtccgcagggagctccagactgccagaaagtcaaagtcatgtaccgcatggcccacaagccagtgtaccaggtcaagcagaaggtgctgacctctttggcctggaggtgctgccctggctacacgggccccaactgcgagcaccacgattccatggcaatccctgagcctgcagatcctggtgacagccaccaggaacctcaggatggaccagtcagcttcaaacctggccaccttgctgcagtgatcaatgaggttgaggtgcaacaggaacagcaggaacatctgctgggagatctccagaatgatgtgcaccgggtggcagacagcctgccaggcctgtggaaagccctgcctggtaacctcacagctgcagtgatggaagcaaatcaaacagggcacgaattccctgatagatccttggagcaggtgctgctaccccacgtggacaccttcctacaagtgcatttcagccccatctggaggagctttaaccaaagcctgcacagccttacccaggccataagaaacctgtctcttgacgtggaggccaaccgccaggccatctccagagtccaggacagtgccgtggccagggctgacttccaggagcttggtgccaaatttgaggccaaggtccaggagaacactcagagagtgggtcagctgcgacaggacgtggaggaacgcctgcacgcccagcactttaccctgcaccgctcgatctcagagctccaagccgatgtggacaccaaattgaagaggctgcacaaggctcakgaggccccagggaccaatggcagtctggtgttggcaacgcctggggctggggcaaggcctgagccggacagcctgcaggccaggctgggccagctgcagaggaacctctcagagctgcacatgaccacggcccgcagggaggaggagttgcagtacaccctggaggacatgagggccaccctgacccggcacgtggatgagatcaaggaactgymctccgaatcggacgagactttcgatcagattagcaagktgkwgcggcaggtggaggagctgcaggtgaaccacacggcgctccgtgagctgcgcgtgatcctgatggagaagtctctgatcatggaggagaacaaggaggaggtggagcggcagctcctggagctcaacctcacgctgcagcacctgcagggtggcatgccgacctcatcaagtacgtgaaggactgcaattgccagaagctctatttagacctggacgtcatccgggagggcagagggacgccacgcgtgccctggaggagacccaggtgagcctggacgarcggnggcaagctggac

SEQ ID NO: 780 - DNA, 645 bp, Homo sapiens
tcgacccacgcgtccgccaaaagcagacatagcttcagatgcagcttgatccagggctcagatgccatgatcagaatccaattcttgcatctgtttctttgggttggcttcattttcaggcagcccccttcctcatatcctcaagatggcagagacagcccatggtctttcccttgcagagacagatcaccaggaaacaatacctctatccctagccatgaaacagtcttgaactttattctgacttgatcagccaagtccctgttggaaccatcactgcctagcttaggcctgagacagtgctgcacctctactaccaaaggccgggctggccttccctaaagtgtatgtgctgcgtgggggagaggtacggatctgaaccaaaacgagggctgtccagcgtcagcaaatatctcccgcagtcccagtgcctccagcaggaggcaaagcatcaacccctccgtctggctcctctactgaaaattccctcagcagcctcacaggccttaggcttgtcttagctacttcttcatctacttttttgctttcttaattatttttcttttcttttttcttattttattttattttattttagatggagtttcgctccgtcgcccaggctgaagtgcagtttcagacatg

SEQ ID NO: 781 - DNA, 729 bp, Homo sapiens
  misc_feature (725)..(725): n equals a,t,g, or c
tcgacccacgcgtccggccatttagaaataatcaactcttaatcagcctgggatagtcagtactaaaagcaccttcatgagctgtgaaaaatttaatgcatttatttacatatttagttttaaattttagtatattgttagttgaggtatagtttccaaacaaagagccgtgaaatgtttagtaactgtctctgtacctctggatgaggacagctcagccgggaatggagggggactgggtgaggagaccagaatgtcagtgtggccacgcagcacacttttgttttgtcttctgtccttgagcactggcttgttcctggataaactaggcataataatacctatcctgctgtgtgggtggaagttaaatgtgataatgatgtgtgtgagatgcctgcacagtgcctggaggtattgaagaattattgctgcctwttctttttctacctaccacttacccgctacccccgggtgctacatgttagaaaacactgtgtaaagtgtggatgcttctgaaaaatctccctgccagcagttagtgccaatagcgtgcagaaaataagatgcaatgatttggcttcttttctgtttggcaataagaagcttatttgcmcatagcctgatttctttcaatctgcaaaaaaaaaaaaaaaaaaaaaaaaaaaaaaaaaaaaaaaaaaaaaaaaaaaaaaaaaaaaaaaaaaaaaaaaaaaaaaaaaargggnggcc

SEQ ID NO: 782 - DNA, 997 bp, Homo sapiens
  misc_feature (855)..(855): n equals a,t,g, or c
  misc_feature (881)..(881): n equals a,t,g, or c
  misc_feature (916)..(916): n equals a,t,g, or c
  misc_feature (957)..(957): n equals a,t,g, or c
attggaagttgttttgcaacctgggcttttatacagaagaatacgaatcacaggtgtgtgagcatctacttaattaatttgcttacagccgatttcctgcttactctggcattaccagtgaaaattgttgttgacttgggtgtggcaccttggaagctgaagatattccactgccaagtaacagcctgcctcatctatatcaatatgtatttatcaattatcttcttagcatttgtcagcattgaccgctgtcttcagctgacacacagctgcaagatctaccgaatacaagaacccggatttgccaaaatgatatcaaccgttgtgtggctaatggtccttcttataatggtgccaaatatgatgattcccatcaaagacatcaaggaaaagtcaaatgtgggttgtatggagtttaaaaaggaatttggaagaaattggcatttgctgacaaatttcatatgtgtagcaatatttttaaatttctcagccatcattttaatatccaattgccttgtaattcgacagctctacagaaacaaagataatgaaaattacccaaatgtgaaaaaggctctcatcaacatacttttagtgaccacgggctacatcatatgctttgttccttaccacattgtccgaatcccgtataccctcagccagacagaagtcataactgattgctcaaccaggatttcactcttcaaagccaaagaggctacactgctcctggctgtgtcgaacctgtgctttgatcctatcctgtactatcacctctcaaaagcattccgctcaaaggtcactgagacttttgcctcmcctaaagagaccaaggtyagaaagaaaaattaagangtggaaataatggctaaaagacaggntttttgtggtaccaattctgggctttatgggaccntaaagttattatagcttggaaggtaaaaaaaaaaaaagggngggcgctctagaggttccccgaggggccagcttagggtgc

SEQ ID NO: 783 - DNA, 437 bp, Homo sapiens
  misc_feature (422)..(423): n equals a,t,g, or c
  misc_feature (427)..(427): n equals a,t,g, or c
  misc_feature (437)..(437): n equals a,t,g, or c
gaattcggcacgagggcggcaccagggagcctgggcgcccggggctccgccgcgaccccatcgggtagaccacagaagctccgggacccttccggcacctctggacagcccaggatgctgttggccaccctcctcctcctcctccttggaggcgctctggcccatccagaccggattatttttccaaatcatgcttgtgaggaccccccagcagtgctcttagaagtgcagggcaccttacagaggcccctggtccgggacagccgcacctcccctgccaactgcacctggctcacaaaaagagtgcaacaaatgcttctattccatagctacggcattgctcagtaagttgaggtcaaaaataaaggaatcatacatctcaaaaaaaaaaaaaaaaaaaaaaaaaaaaaaaaaaaaaaaannaaanaaaaaaaaan

SEQ ID NO: 784 - DNA, 1084 bp, Homo sapiens
ggatggcgctacgtctgctgcggagggcggcgcgcggagctgcggcggcggcgctgctgaggctgaaagcgtctctagcagctgatatccccagacttggatatagttcctcatcccatcacaagtacatcccccggagggcagtgctttatgtacctggaaatgatgaaaagaaaataaagaagattccatccctgaatgtagattgtgcagtgctcgactgtgaggatggagtggctgcaaacaaaaagaatgaagctcgactgagaattgtaaaaactcttgaagacattgatctgggccctactgaaaaatgtgtgagagtcaactcagtttccagtggtctggcggaagaagacctagagacccttttgcaatcccgggtccttccttccagcctgatgctaccaaaggtggaaagtcctgaagaaatccagtgggcagtgtgtgaagaaaccctgaaggtcgggcctcaagtaggtctctttctagatgcagtccgtttttggaggaraagactttcgagccacataggtgcamcaagtartaaagaaaccctggatawtctctacgcccggcaaaagattgttgtcatagcgaaagcctttggtctccaagccgtaratctggkgkacattgactttcgagatggarctkggctgcttagacagtcacgagaaggagccgccatgggcttcactggtaagcaggtgattcaccctaaccaaattgccgtggtccaggagcagttttctccttcccctgaaaaaattaagtgggctgaagaactgattgctgcctttaaagaacatcaacaattaggaaagggggcctttactttccaagggagtatgatcgacatgccattactgaagcaggcccagaacactgttacgcttgccacctccatcaaggaaaaatgatctgttaaatgaagctgtcatcaggctaaagggtattgaagctgcagagggatcaacttgtgcttgccagaggacgccaatgaagtttgaaacaccaacaatcagagattttgtttctgttcctcattaaatcatgagcttttgtgccgagaaaaaaaaaa

SEQ ID NO: 785 - DNA, 1168 bp, Homo sapiens
ggcacgagcccccgccccctccctccctcccctcccttccccggccccggctctggccccggcccattcgctgttgggtcttctgctagggaggatgtcgggttcgtcgctgcccagcgccctggccctctcgctgttgctggtctctggctccctcctcccagggccaggcgccgctcagaacgtgagagtacaatctggacaggatcagaagtagagaatgaagttgtaagagaaagggaaagacagaagaaaggctgcagtagtacaaggagaaaagcaggatgcaagaatgaggaatgaatctttgtttgaggagcatccggaaaaatataagctgtcagaaagagtaaatagaccagggacctctaaagtaaattcacacatcaaagttaaaataatgttggagaatcacctcctgtgaaaaattggcttagctttcagtatgcctctttaaacaaaacattatcattttatacaaatttttaaaatgttgttcataatatggagtttaattttaagcaccttagataatgcatttgttagcttgtttgtgaaatttttatggattttttttttcaaaattcctaattttagttggtaaggattaacttcgggaagacaggaaacccctccagtaaaattaattggttataaatggttacatattttaggcttatatacataacaaaacttctaactgaatttaaaagtgatcttgtgtaaaaacattattctagtgatattgatgtctaaatttaaaagagtgaatacacaagtaaaatatatctgctttttaaggatctattcagtttaggaaggagagtcaaaatttgtatttaatttcaatttattatattgtctgaaactgaaagtaggcctaacttttgtttgcttttgtgtatgtacaaaggcaaacatttatcaatcaactcttattaatttgagattattttgacctgattgctcagaacttttgtctatctgtatagaaatggggttttctaaatatttaaagaatttcctacgtatgtaaatttacttgcacacagtaagttaggggagacatttaatattcctcagatacctgctgttttcttgttgtgtttcttgtttttcaaataaataaactgagtgttatctgttcattaaaatagaatgtagtcag

SEQ ID NO: 786 - DNA, 616 bp, Homo sapiens
  misc_feature (3)..(3): n equals a,t,g, or c
  misc_feature (592)..(592): n equals a,t,g, or c
  misc_feature (611)..(611): n equals a,t,g, or c
  misc_feature (613)..(613): n equals a,t,g, or c
agngacagcagttccctggcttctggaaggagtgtcggtctatccaaaaaatgtactaacagatatgtaaaccctgatgaatacagtatgtgttatgagaagtggcccaacgaagcagctcatccaagtgagattctgaagttgggctggcgagtacacgaatggctttcttactagagagaagtgggaccctgctaatctgtagcatgtggtggcatcatggttactcaaatatcactggaacagaaggtgaaagaagaaatctgaagagaaataaaacaaattttcggcggttccaagatggccgaataggaacagctccagtctacagctcccagtgtgagagatgcagaagatgggtgatttctgcatttccaactgagcaaacggsacaccagaagattatatcccatgcctggctgggagggtcccatgcccacggagcctcgctcattgctagcacagcagtctgagatccatctgcaaggtgggcagtawggctggsggaggggcacccaccattgctgaggcttgagtaggtaaacgaagcarycaggaagctcgaactgggtggagcccaccgcaactcaangaggcctggctacctctgnanact

SEQ ID NO: 787 - DNA, 3546 bp, Homo sapiens
ccacgcgtccgcaggtacagccaaccatgtcccagttcgaaatggacacgtatgctaagagccacgaccttatgtcaggtttctggaatgcctgctatgacatgcttatgagcagtgggcagcggcgccagtgggagcgcgcccagagtcgtcgggccttccaggagctggtgctggaacctgcgcagaggcgggcgcgcctggaggggctacgctacacggcagtgctgaagcagcaggcaacgcagcactccatggccctgctgcactggggggcgctgtggcgccagctcgccagcccatgtggggcctgggcgctgagggacactcccatcccccgctggaaactgtccagcgccgagacatattcacgcatgcgtctgaagctggtgcccaaccatcacttcgaccctcacctggaagccagcgctctccgagacaatctgggtgaggttcccctgacacccaccgaggaggcctcactgcctctggcagtgaccaaagaggccaaagtgagcaccccacccgagttgctgcaggaggaccagctcggcgaggacgagctggctgagctggagaccccgatggaggcagcagaactggatgagcagcgtgagaagctggtgctgtcggccgagtgccagctggtgacggtagtggccgtggtcccagggctgctggaggtcaccacacagaatgtatacttctacgatggcagcactgagcgcgtggaaaccgaggagggcatcggctatgatttccggcgcccactggcccagctgcgtgaggtccacctgcggcgtttcaacctgcgccgttcagcacttgagctcttctttatcgatcaggccaactacttcctcaacttcccatgcaaggtgggcacgaccccagtctcatctcctagccagactccgagaccccagcctggccccatcccaccccatacccaggtacggaaccaggtgtactcgtggctcctgcgcctacggcccccctctcaaggctacctaagcagccgctccccccaggagatgctgcgtgcctcaggccttacccagaaatgggtacagcgtgagatatccaacttcgagtacttgatgcaactcaacaccattgcggggcggacctacaatgacctgtctcagtaccctgtgttcccctgggtcctgcaggactacgtgtccccaaccctggacctcagcaacccagccgtcttccgggacctgtctaagcccatcggtgtggtgaaccccaagcatgcccagctcgtgagggagaagtatgaaagctttgaggacccagcagggaccattgacaagttccactatggcacccactactccaatgcagcaggcgtgatgcactacctcatccgcgtggagcccttcacctccctgcacgtccagctgcaaagtggccgctttgactgctccgaccggcagttccactcggtggcggcagcctggcaggcacgcctggagagccctgccgatgtgaaggagctcatcccggaattcttctactttcctgacttcctggagaaccagaacggttttgacctgggctgtctccagctgaccaacgagaaggtaggcgatgtggtgctacccccgtgggccagctctcctgaggacttcatccagcagcaccgccaggctctggagtcggagtatgtgtctgcacacctacacgagtggatcgacctcatctttggctacaagcagcgggggccagccgccgaggaggccctcaatgtcttctattactgcacctatgagggggctgtagacctggaccatgtgacagatgagcgggaacggaaggctctggagggcattatcagcaactttgggcagactccctgtcagctgctgaaggagccacatccaactcggctctcagctgaggaagcagcccatcgccttgcacgcctggacactaactcacctagcatcttccagcacctggacgaactcaaggcattcttcgcagaggttgtcagtgatggtgtacccctggtgctagccctggtcccccaccggcagccccactccttcatcacccagggttccccagacctgttggtgactgtgagtgccagtgggctgctgggcacccacagctggttgccctatgaccgcaacataagcaactacttcagcttcagcaaagaccccaccatgggcagccacaagacgcagcgactgctgagtggcccgtgggtgccaggcagtggtgtgagtggacaagcactggcagtggccccggatggaaagctgctattcagcggtggccactgggatggcagcctgcgggtgactgcactaccccgtggcaagctgttgagccagctcagctgccaccttgatgtagtaacctgccttgcactggacacctgtggcatctacctcatctcaggctcccgggacaccacgtgcatggtgtggcggctcctgcatcagggtggtctgtcagtaggcctggcaccaaagcctgtgcaggtcctgtatgggcatggggctgcagtgagctgtgtggccatcagcactgaacttgacatggctgtgtctggatctgaggatggaactgtgatcatacacactgtacgccgcggacagtttgtagcggcactacggcctctgggtgccacattccctggacctattttccacctggcattggggtccgaaggccagattgtggtacagagctcagcgtgggaacgtcctggggcccaggtcacctactccttgcacctgtattcagtcaatgggaagttgcgggcttcactgcccctggcagagcagcctacagccctgacggtgacagaggactttgtgttgctgggcaccgcccagtgcgccctgcacatcctccaactaaacacactgctcccggccgcgcctcccttgcccatgaaggtggccatccgcagcgtggccgtgaccaaggagcgcagccacgtgctggtgggcctggaggatggcaagctcatcgtggtggtcgcggggcagccctctgaggtgcgcagcagccagttcgcgcggaagctgtggcggtcctcgcggcgcatctcccaggtgtcctcgggagagacggaatacaaccctactgaggcgcgctgaacctggccagtccggctgctcgggccccgcccccggcaggcctggcccgggaggccccgcccagaagtcggcgggaacaccccggggtgggcagcccagggggtgagcggggcccaccctgcccagctcagggattggcgggcgatgttaccccctcagggattggcgggcggaagtcccgcccctcgccggctgaggggccgccctgagggccagcactggcgtctgcggccgcagcagcactttttgcacagtctggggcggggttccccggcttccaagtcgctgtttcgtcaaagcacgagggccgcctgtggccttaattcctaacggcggccccggttctcccttctcggcaataaaccaggcctagttttgtaaaaaaaaaaaaaaaaaaaaaaaaaaaaaaaaaaaaaaa

SEQ ID NO: 788 - DNA, 1842 bp, Homo sapiens
  misc_feature (67)..(67): n equals a,t,g, or c
  misc_feature (98)..(98): n equals a,t,g, or c
  misc_feature (212)..(212): n equals a,t,g, or c
  misc_feature (1838)..(1838): n equals a,t,g, or c
gcgaccgcgcccttcagctagctcgctcgctcgctctgcttccctgctgccggctgcgcatggcttnggcgttggcggcgctggcggcggctcgagcngcctgcgsagccggtaccagcagttgcagaatgaagaagagtctggagaacctgaacaggctgcaggtgatgctcctccaccttacagcagcatttctgcagagagcgcacatnattttgactacaaggatgagtctgggtttccaaagcccccatcttacaatgtagctacaacactgcccagttatgatgaagcggagaggaccaaggctgaagctactatccctttggttcctgggagagatgaggattttgtgggtcgggatgattttgatgatgctgaccagctgaggataggaaatgatgggattttcatgttaacttttttcatggcattcctctttaactggattgggtttttcctgtctttttgcctgaccacttcagctgcaggaaggtatggggccatttcaggatttggtctctctctaattaaatggatcctgattgtcaggttttccacctatttccctggatattttgatggtcagtactggctctggtgggtgttccttgttttaggctttctcctgtttctcagaggatttatcaattatgcaaaagttcggaagatgccagaaactttctcaaatctccccaggaccagagttctctttatttattaaagatgttttctggcaaaggccttcctgcatttatgaattctctctcaagaagcaagagaacacctgcaggaagtgaatcaagatgcagaacacagaggaataatcacctgctttaaaaaaataaagtactgttgaaaagatcatttctctctatttgttcctaggtgtaaaattttaatagttaatgcagaattctgtaatcattgaatcattagtggttaatgtttgaaaaagctcttgcaatcaagtctgtgatgtattaataatgccttatatattgtttgtagtcattttaagtagcatgagccatgtccctgtagtcggtagggggcagtcttgctttattcatcctccatctcaaaatgaacttggaattaaatattgtaagatatgtataatgctggccattttaaaggggttttctcaaaagttaaacttttgttatgactgtgtttttgcacataatccatatttgctgttcaagttaatctagaaatttattcaattctgtatgaacacctggaagcaaaatcatagtgcaaaaatacatttaaggtgtggtcaaaaataagtctttaattggtaaataataagcattaattttttatagcctgtattcacaattctgcggtaccttattgtacctaagggattctaaaggtgttgtcactgtataaaacagaaagcactaggatacaaatgaagcttaattactaaaatgtaattcttgacactctttctataattagcgttcttcacccccacccccacccccaccccccttattttccttttgtctcctggtgattaggccaaagtctgggagtaaggagaggattaggtacttaggagcaaagaaagaagtagcttggaacttttgagatgatccctaacatactgtactacttgcttttacaatgtgttagcagaaaccagtgggttataatgtagaatgatgtgctttctgcccaagtggtaattcatcttggtttgctatgttaaaactgtaaatacaacagaacattaataaatatctcttgtgtagcaccttttaaaaaaaaaaaaaaaaaaaaaaaaaaaaaaaaaaaaaaaaaaaaaaaaaaaaaaaaaaaanaaaa

SEQ ID NO: 789 - DNA, 1963 bp, Homo sapiens; identical to SEQ ID NO: 27
  misc_feature (335)..(335): n equals a,t,g, or c
  misc_feature (1959)..(1959): n equals a,t,g, or c

SEQ ID NO: 790 - DNA, 1487 bp, Homo sapiens
  misc_feature (1470)..(1470): n equals a,t,g, or c
  misc_feature (1487)..(1487): n equals a,t,g, or c
gcgaccgcgcccctttcagctagctcgctcgctcgctctgcttccctgctgccggctgcgcatggckwtggcgttggcggcgctggcggcggtcgagccggcctgcgcagccggtaccagcagttgcagaatgaagaagagtctggagaacctgaacaggctgcaggtgatgctcctccaccttacagcagcatttctgcagagagcgcagttttccacctatttccctggatattttgatggtcagtactggctctggtgggtgttccttgttttaggctttctcctgtttctcagaggatttatcaattatgcaaaagttcggaagatgccagaaactttctcaaatctccccaggaccagagttctctttatttattaaagatgttttctggcaaaggccttcctgcatttatgaattctctctcaagaagcaagagaacacctgcaggaagtgaatcaagatgcagaacacagaggaataatcacctgctttaaaaaaataaagtactgttgaaaagatcatttctctctatttgttcctaggtgtaaaattttaatagttaatgcagaattctgtaatcattgaatcattagtggttaatgtttgaaaaagctcttgcaatcaagtctgtgatgtattaataatgccttatatattgtttgtagtcattttaagtagcatgagccatgtccctgtagtcggtagggggcagtcttgctttattcatcctccatctcaaaatgaacttggaattaaatattgtaagatatgtataatgctggccattttaaaggggttttctcaaaagttaaacttttgttatgactgtgtttttgcacataatccatatttgctgttcaagttaatctagaaatttattcaattctgtatgaacacctggaagcaaaatcatagtgcaaaaatacatttaaggtgtggtcaaaaataagtctttaattggtaaataataagcattaattttttatagcctgtattcacaattctgcggtaccttattgtacctaagggattctaaaggtgttgtcactgtataaaacagaaagcactaggatacaaatgaagcttaattactaaaatgtaattcttgacactctttctataattagcgttcttcacccccacccccacccccaccccccttattttccttttgtctcctggtgattaggccaaagtctgggagtaaggagaggattaggtacttaggagcaaagaaagaagtagcttggaacttttgagatgatccctaacatactgtactacttgcttttacaatgtgttagcagaaaccagtgggttataatgtagaatgatgtgctttctgcccaagtggtaattcatcttggtttgctatgttaaaactgtaaatacaacagaacattaataaatatctcttgtgtagcacctttaaaaaaaaaaaaaaaaaaaaaaaaaaaaaaaaaaancccgggggggggccccn

SEQ ID NO: 791 - DNA, 1653 bp, Homo sapiens
  misc_feature (67)..(67): n equals a,t,g, or c
  misc_feature (212)..(212): n equals a,t,g, or c
  misc_feature (1636)..(1636): n equals a,t,g, or c
  misc_feature (1653)..(1653): n equals a,t,g, or c
gcgaccgcgcccttcagctagctcgctcgctcgctctgcttccctgctgccggctgcgcatggcttnggcgttggcggcgctggcggcggctcgagccgcctgcgsagccggtaccagcagttgcagaatgaagaagagtctggagaacctgaacaggctgcaggtgatgctcctccaccttacagcagcatttctgcagagagcgcacatnattttgactacaaggatgagtctgggtttccaaagcccccatcttacaatgtagctacaacactgcccagttatgatgaagcggagaggaccaaggctgaagctactatccctttggttcctgggagagatgaggattttgtgggtcgggatgattttgatgatgctgaccagctgaggataggaaatgatgggattttcatgttaacttttttcatggcattcctctttaactggattgggtttttcctgtctttttgcctgaccacttcagctgcaggaaggtatggggccatttcaggatttggtctctctctaattaaatggatcctgattgtcaggttttccacctatttccctgcatttatgaattctctctcaagaagcaagagaacacctgcaggaagtgaatcaagatgcagaacacagaggaataatcacctgctttaaaaaaataaagtactgttgaaaagatcatttctctctatttgttcctaggtgtaaaattttaatagttaatgcagaattctgtaatcattgaatcattagtggttaatgtttgaaaaagctcttgcaatcaagtctgtgatgtattaataatgccttatatattgtttgtagtcattttaagtagcatgagccatgtccctgtagtcggtagggggcagtcttgctttattcatcctccatctcaaaatgaacttggaattaaatattgtaagatatgtataatgctggccattttaaaggggttttctcaaaagttaaacttttgttatgactgtgtttttgcacataatccatatttgctgttcaagttaatctagaaatttattcaattctgtatgaacacctggaagcaaaatcatagtgcaaaaatacatttaaggtgtggtcaaaaataagtctttaattggtaaataataagcattaattttttatagcctgtattcacaattctgcggtaccttattgtacctaagggattctaaaggtgttgtcactgtataaaacagaaagcactaggatacaaatgaagcttaattactaaaatgtaattcttgacactctttctataattagcgttcttcacccccacccccacccccaccccccttattttccttttgtctcctggtgattaggccaaagtctgggagtaaggagaggattaggtacttaggagcaaagaaagaagtagcttggaacttttgagatgatccctaacatactgtactacttgcttttacaatgtgttagcagaaaccagtgggttataatgtagaatgatgtgctttctgcccaagtggtaattcatcttggtttgctatgttaaaactgtaaatacaacagaacattaataaatatctcttgtgtagcaccttttawaaaaaaaaaaaaaaaaaaaaaaaaaaaaaaaaaaancccgggggggggccccn

SEQ ID NO: 792 - DNA, 1830 bp, Homo sapiens; identical to SEQ ID NO: 638
  misc_feature (67)..(67): n equals a,t,g, or c
  misc_feature (97)..(97): n equals a,t,g, or c
  misc_feature (211)..(211): n equals a,t,g, or c
  misc_feature (1813)..(1813): n equals a,t,g, or c
  misc_feature (1830)..(1830): n equals a,t,g, or c

SEQ ID NO: 793 - DNA, 708 bp, Homo sapiens
  misc_feature (14)..(14): n equals a,t,g, or c
tacggacacgaggncgaaaatgagaaaggtaacaatttcgaaaaagcatgcccttctgctgtgtttccagttgtttagatgtctgctctccatgtatatatggatcacattcgtgttagatggaagttgtggaatccactgttctctcaaaccggtctctttcccttgtacctatcatagtgtacatagctcaacttcctgagtttgattctagtgttcaaagataggtatttttcatataagatgtcctgtcaaagcaagtcattgaacttacctggtatttaactgaaaacaaacaaaaatcagcaatctcttccattgcttgtagaaatactgacttaggccaggcacagtggctcacgtctaatcccagcactttgagaggccaaggcaggagtatcatttgagcccaggagttcgagaccagcctggcaacatagtgagaccttgtctctgtaaaaaggaaggaaggaagggaaggagggaggggtggagccagaggaggggaggggacactctgttatacttatcgaaaggtgctatccaggtgtggtagtgcagccgatagtctcagctactcaggaggctgaggtgggaggatcacttgagctcaggagtttgaggctgcagtgagctatgatggtaccatgtactccagcctgggcaacagagacagaccagactcctaaaaaaaaaaaaaaaaaaaaa

SEQ ID NO: 794 - DNA, 2027 bp, Homo sapiens
  misc_feature (294)..(294): n equals a,t,g, or c
  misc_feature (1976)..(1976): n equals a,t,g, or c
  misc_feature (1981)..(1981): n equals a,t,g, or c
  misc_feature (1985)..(1985): n equals a,t,g, or c
  misc_feature (2021)..(2021): n equals a,t,g, or c
ggcacgagttgggagcagctctgcgtgcggggcctcagagaatgaggccggcgttcgccctgtgcctcctctggcaggcgctctggcccgggccgggcggcggcgaacaccccactgccgaccgtgctggctgctcggcctcgggggcctgctacagcctgcaccacgctaccatgaagcggcaggcggccgaggaggcctgcatcctgcgaggtggggcgctcagcaccgtgcgtgcgggcgccgagctgcgcgctgtgctcgcgctcctgcgggcaggcccagggcccgganggggctccaaagacctgctgttctgggtcgcactggagcgcaggcgttcccactgcamcctggagaacgagcctttgcggggtttctcctggctgtcctccgaccccggcggtctcgaaagcgacacgctgcagtgggtggaggagccccaacgctcctgcaccgcgcggagatgggtacttccaggccaccggtggggtcgagcccgcagctggaaggagatgcgatgccacctgygcgccaacgctacctgtgcaagtaccagtttgaggtcttgtgtcctgcgccgcgccccggggccgcctctaacttgagctatcgcgcgcccttccagctgcacagcgccgctctggacttcagtccacctgggaccgaggtgagtgcgctctgccggggacagctcccgatctcagttacttgcatcgcggacgaaatcggcgctcgytgggacaaactytcgggcgatgtgttgtgtccctgccccgggaggtacctccgtgctggcaaatgcgcagagctccctaactgcctagacgacttgggaggctttgcctgcgaatgtgctacgggcttcgagctggggaaggacggccgctcttgtgtgaccagtggggaaggacagccgacccttggggggaccggggtgcccaccaggcgcccgccggccactgcaaccagccccgtgccgcagagaacatggccaatcagggtcgacgagaagctgggagagacaccacttgtccctgaacaagacaattcagtaacatctattcctgagattcctcgatggggatcacagagcacgatgtctacccttcaaatgtcccttcaagccgagtcaaaggccactatcaccccatcagggagcgtgatttccaagtttaattctacgacttcctctgccactcctcaggctttcgactcctcctctgccgtggtcttcatatttgtgagcacagcagtagtagtgttggtgatcttgaccatgacagtactggggcttgtcaagctctgctttcacgaaagcccctcttcccagccaaggaaggagtctatgggcccgccgggctggagagtgatcctgaagcccgctgctttgggctccagttctgcacattgcacaaacaatggggtgaaagtcggggactgtgatctgcgggacagagcagagggtgccttgctggcggagtcccctcttggctctagtgatgcatagggaaacaggggacatgggcactcctgtgaacagtttttcacttttgatgaaacggggaaccaagaggaacttacttgtgtaactgacaatttctgcagaaatcccccttcctctaaattccctttactccactgaggagctaaatcagaactgcacactccttccctgatgatagaggaagtggaagtgcctttaggatggtgatactgggggaccgggtagtgctggggagagatattttcttatgtttattcggagaatttggagaagtgattgaacttttcaagacattggaaacaaatagaacacaatataatttacattaaaaaataatttctaccaaaatggaaaggaaatgttctatgttgttcaggctaggagtatattggttcgaaatcccagggaaaaaaataaaaataaaaaattaaaggattgttgataaaaaaaaaaaaaaagggcggccgcnctagngggnccaagctttacgtacgcgggcatgcgacgtcaagcncttcca

SEQ ID NO: 795 - DNA, 699 bp, Homo sapiens
aattcggcacgagttacaggcataagccaccatgcttggtcctcattatattttaacacacccctttcattatttctaaatgctggaaagttctttattacattgagctacagttcattttgccttaatagtcacaaacttaatcctaattaaatacatacctttcccctaagttttcttatcttcaggctacagaattattgagattactctcaaccattcctcatgttagaaactctttctcaatttatttccatcctctttgtccttctctggataatctcagatttgatactgtgttttcttaaatgtggtaatcccggaactctagatatggttcttcctatttggactaatcagtatatacattccagtagatccattttgtcctttatctagatacagtatttctagtagcttgaaasycattgccttttaaaagttgttttaggattaaaaatcacaaaccaaatatccactgtcctcaagagaatcacctaacacccataaggattcttgtagactcatggtaaaggggtagctattgttttatatcagatagcaggagtagctattcttttatatcagataaaacacattaaagcaacatgaataggcatttgttaaaagraggatattccaaatagtcaacacatattaaaggaattccccaaccatccactaaatgatccaggggaa

SEQ ID NO: 796 - DNA, 1649 bp, Homo sapiens; identical to SEQ ID NO: 372
  misc_feature (1249)..(1249): n equals a,t,g, or c

SEQ ID NO: 797 - DNA, 1570 bp, Homo sapiens
ggatctgtgtggcatggtatgtgtgtttatgtgtattgtgggtgtctgtgtggcatgctgtgcgtgtgtgtattgtggatgtttactgtcccgggcagtagaaaggacgtcggggaagcagccccagcatcagggacaggccaggagtgcagaatgcatggaagctggtcaggtcggagcctgggatgaaggaagcacagagatgcaagggtgccagggcccatggaaccaagagccgatgatcaaggccacagtgcacacagccctggaggcaaaggacatattcatttcacaaggattaaaaagcatgggccaaggctgggccccaggccaggactggggatacagagtggatcagtccccatccctgcccccaggtgcttacccacacccattcacctcacaggtttccccaccccagccccttggcgagctcctcctcattcctcaaaacgtcgctgaggtcacgctccttcccgaggcctctccccatcctctaaaacaccctctccctgctgcccacttgcagcacagtcagagagctccgtggcctgtttccactggactgagtcttctggggggtgctggtgcagagcagagccctgggctgggagtcccggcacctcgttccactccctcacccacagcctcgctgtttaacctcaggcaggccgtgtccctcctcagcctcactttccccttgtgtaaaatgagggaagggactacgccttacatcttcagcttaaacctctttgaccttctatctggctaatggaggtgctgaccaggggcaagaagggatttgaaaaacgctttgaaaaattcatagcaggaggcaaaggagaaagagtctttattttcgtagagcgggaggcaggaggagttatggacagaggctgtcgatgaaaaggacagcatctcagagcactttgtggcatttaatgtctaatgcctcctcccattaaagcagtggcatcaaatatttaccaaagcagcattaaaaattaacctttaccatggggatgtataaaggccctaagttccctgagaagtgaccgaacatcaggagggtaaagtgacaggaaggaaggctacaagcgggttgtgaataatggaagcccccaaaggtcccccaacacagctccctgttgaccccactcccaaagccagggcagcctccggccgtgtctctgcagaggctcccagcccttcggagactcccagagggcctgcaggataaggacaggccctcagctgggcatccacagccttccatggcctggccctgcctctctgggcagctgggatctgtaggatggaaaggaatgagtctgtcggagttggaagagaccaggggaggaagtggggagtggtccgggcactggaaatagcacgtgcagaggcactgaggcagagacagctgcacatcaatccatcagaagagcagccaggtggcatgagtgtgggggaggaaggaagcgcaggaggggacaggtgggagatgcaggtaggtctgactgtgcagggccatggtaagatgtgggcttctcggtccagggacaggggtgcc

SEQ ID NO: 798 - DNA, 692 bp, Homo sapiens
ggcacgaggcgaatatgtgtagctcagctgttttgaaaatgatctgtttgtagaaggccacaaagcaaatattattatcttaatcttattctgaattttcaccactaaaaccacattctattgaaggaatatataataaaagtgcattatcatatagtgtcacaatgagggattcaggtgcgaagggaagactcattcctgtgaaaacatagcccatccccagcagttggtagaaggatttgctggagttcctcctctttgtgtggcctataaaacattccatgaggcatgtggcaatagtcacaatgatagtggtcttatctcctccagtcttagcatcctcactcaagccacctcttttcatagacacatactttatgtttgggaagaggtgctctaggtgggacacccctgcctgctccaaataattcctactgacatccatggcagcttcattctatctgagctggagatttgggaatttaggtgggcacagaagaaagaaggggtttggggcagtgtcgtttggatgattttgacagattcttcctgggggtaaagagagataggtgggtctaatcatccagggaataaaatgcmaaggtgtgtgtatatggaaaatccaagggagaggaaattaaaattatcccagattgcttatttaatagtcaggaaactcaactttccatgaa

SEQ ID NO: 799 - DNA, 1654 bp, Homo sapiens
  misc_feature (872)..(872): n equals a,t,g, or c
  misc_feature (1516)..(1516): n equals a,t,g, or c
  misc_feature (1564)..(1564): n equals a,t,g, or c
caggtgacgtttacatagcgtgcagggatggctggccaccccaccctaatcttattatgcaaatgggctttccacctgactggcgcaatctgtgagccctacctaaatcaaacactgcctactcaagcctgcctataaaatccagagaactccaccagccgctctttccttttggaagcccctctttccttttggaagcccctctctctcactagagagagaacggttctcctttctctttcttttgcctattaacgtcctctcctaaattcctcatgtgtgtccgtgtcctaaatttttttggcgctagacgacgaagcccgggcacttaccccagacaacaccaccacttcaatagaatgtacaggccccgcaatcccaatcttccccaggatgtagaaacccagagcagagtgctttgggggtcccctggcggtggtaggatgtagggcatgcacagacaaatcccatccgccacacgcagctttccctttaccttgggagatgcgcttgccaggaatcctaggcttcttttgtgtcttgtttgtctgtattacagttgctccacttaatttgttgtgcatgtgttccatcttaccagactggtgcaagtgttggaaacttcagattggtaactggtgcacaccaagcctgcttcacagtagtgggtgccaaggagctgctaggcctatcctgtttcatccgagaggaaaacctcactaatccttttcctatttctaacttttttcttgcttcagtccagagaccaaaattaaaatgtaaaaggtaggattctacaagacaaatgctgktttttgtttctttgytatcatttttattattattgkcattattgktatcctataacttgncattttcaagacaacctttggagagaagggggaaaaaacacatgggctctgatcccatctcaaactggaaccacactttttgattctcagtgtagagctcattagtgctgcctgggttacttycatcagcaaaaacaactctggtctaggacttcctaaaataacagaggccagaaactcttttcctgagcttgccaaacttgtgcgtttccatgactttgaaaatacctgtgctttarcctggaacactcttcctactactcttgcctacttaaaaaattctaacttatccctcaagtctcagatgaagaagtacttgttctatgcagctcccacggattcactcagacagcaagtaccacagagtcagtatttttcaaaataatgcctgagagttccttagatcagtgagtcatgtccttccctgcacaccagctaccaccaaagccaagccaataaagcctcgtgccgaattcggcacgaggaaaaaaaccctcaaaaaatgactgaaaacttctttaaatgtgtgtttgaaagagacaaggaagctcttcgtaaaatttgktcagttaatctaactgaggcccatttaaaaatgtaccaatcagcttatatgttaaatatctaagaaactgcatttaggnttttctcaacctgaatctgcagactcaagctatycacatacaatttgnatgagcaccaagawtagcaagccatactgstctgattcatctgattttaatggaacccttgggggawtggactcaatgcagctgactggg

SEQ ID NO: 800 - DNA, 447 bp, Homo sapiens
  misc_feature (14)..(14): n equals a,t,g, or c
  misc_feature (18)..(18): n equals a,t,g, or c
  misc_feature (435)..(435): n equals a,t,g, or c
  misc_feature (445)..(445): n equals a,t,g, or c
ctcaccagtagctntacngctctgacycwtctgattwtaatggaacccttggggattgactcaatgcagctgaytggytttttcctatattaaattgtccctaatgtgactggctacatcataatattatagactatggactatttgtcatagatgtttctatgtttgcttctctgcaaatttaagaaagttaactattttcttaaagttttgatttctaatttctcgatttgggcatacgaccaccactagcaaatgtcatcagagtacaaaaaatggaaacagaggctatcattaataatacattacttcactattgacgggatgaccgtgggttttgaagcttatgagttcaaaagtcctctttaaagtatttttcaattctgctcccgaagtgggtgaagtgtgtggtggtggccaaccaaccaattaatnggttgggttncc

SEQ ID NO: 801 - DNA, 641 bp, Homo sapiens
  misc_feature (4)..(4): n equals a,t,g, or c
  misc_feature (11)..(11): n equals a,t,g, or c
aacnccctttnaggatttttcacctctgctcccgaagtgggtgagtgtgtgtgtgcacmcatatgtgtctgtgtgcatctgtacagaggtttcagcctggcttacatttagcacagtagcttcctttacaggagactttttgcgagcatcagtgtttcatttcacaactcaccatgtgtactaatgctaaagatacagattacagtgtaagaactggagtaattatagccttccaaatcctaaactctcaaacttccttatttcacagggcaccattagtttacttccccaaagctgatttcagcattttagcagatgttttgtgaatgttgtaaatgggtacaaaatggaggacatcctaatgttgagagtagtaaatatcattgtcatgagcctaaggcttctctatacacattagaagaaagtactctctaaagagaatggttagaagttaacagggaatacatcactattgtaataatcataaaaaagcaattgcacgccagtgttagacagtctctgggtaaccaggtgctaataattttactatattaatgaagacttcaagtcatactggtctactcatttggacagtatttgcttcagcactaggaaggctgatgtcttccttttaaactcga

SEQ ID NO: 802 - DNA, 1763 bp, Homo sapiens
ccacgcgtccgattcaagtgatcaagattttaaaatatgaaaagaaactggccaaaatgtgctttttaatgatattcaccttcctggtctgttggatgccttatatcgtgatctgcttcttggtggttaatggtcatggtcacctggtcactccaacaatatctattgtttcgtacctctttgctaaatcgaacactgtatacaatccagtgatttatgtcttcatgatcagaaagtttcgaagatcccttttgcagcttctgtgcctccgactgctgaggtgccagaggcctgctaaagacctaccagcagctggaagtgaaatgcagatcagacccattgtgatgtcacagaaagatggggacaggccaaagaaaagtgactttcaactcttcttccatcatttttatcatcaccagtgatgaatcactgtcagttgacgacagcgacaaaaccaatgggtccaaagttgatgtaatccaagttcgtcctttgtaggaatgaagaatggcaacgaaagatggggccttaaattggatgccacttttggactttcatcataagaagtgtctggaatacccgttctatgtaatatcaacagaaccttgtggtccagcaggaaatccgaattgcccatatgctcttgggcctcaggaagaggttgaacaaaaacaaattcttttaattcaacgggtgctttacataatgaaaaaaccacttgtggcacacgatgggcatctaacatcatcatcttctaatgtgttggagattttcatttcaaatatattttttaaattactctattttccaaaacacgtaatgcatttttctcgaaaataccttactgtaaaaataactgtcgcgtacacatgtgtgaagtagctagaacatactgaatttttttttgtactgttggactctattcagtgtcatgtcctatatctgatcaagttatcaaggagataattctagaatgaaaaagaaaatcctcttgttggaaacaaaagacgttttatatgtgcagtatgacaaagaggagtttcagagacaactttgaatccttgtcagcctggagaccagcaccagaggaatctacaaggcaaactcccatatatttgcttcccccaaattgctgcccctacagactcaaagctctttttctttgttttgttgtttctctaaaaatttactgttctttgtcgatgctatataagccagggagttctaagacgccagctctttgagatttgctcattcccctgtatttcccacatatatattacatatacccgctaataaatttatgtttgtttttctcttgtcaatctgtcttttgttataggggccccagccaaggaacctaaagtgggtagaaggaaaaattattttttctttccctacaaactgaacatggattattagaactcaaggttttcattgacaatatagaaaagaaacactgaatcattttattttattgcccaatttttatttcttatatgactctagtgtttcatcttcataattaatcatgtttgaaggatttctgagtgactcagcagcctgttaaagaaggatgaaccaaagaaaacatttcactaaatgtgcttttaaaaatcaagtgtattgctggttctgctgcagtatgtagtcgaagaataaattagtaaattgcttctgagggtctgaaattgaataaagtaatggctttgtatttctataaaaaaaaaaaaaaaaaaaaaaaaaaaaaaaaaaaaaaaaaa

SEQ ID NO: 803 - DNA, 1274 bp, Homo sapiens
gcccacgcgtccgctgttgctcaaaggaaataggagttggtgtgcttgtgaccaaggggttacacttmcagcttttaaaattctcctttacatgtgctcagtgttttgktttgtgttttggtttctgttttttattttaattcccacattgggcacaagaatcagaatatggatagctagtttaagaaacttttgtgggtgcactgtagcatagatgacagaatttgatgttccccccatctccaattcagttcagggcattccacagttaaacagaaatgggaacgtggggctcttataaatgaatgggcgctcacagttttggttttcagctcttcatgtctgtaagtgtgctttggggraggctatgtctgtatggtcgattctcagttatcacatttgcctctcctcccactaccttcatgamcattcagtgctgttcgcactgcagttagagagaagggacggacagttggtgacactcagccacattgctacttttatctgttctggtaagaagttagatagatggtagattgaagcaattgggtagaattagttgggggaatatttatgagttgctgtgtttgttgattagttccatctctttcccattttaactgagaattgattatatatagctctaagtatataggtatttaaacaaccccacaagcggctgtatcagtaacatttattaattccactatagtgagggaggatttccattctaaataccttattttgagggatttataaaacttagttgtaaaagagaaagcccacatagtgggaataaattgcttcagccatttttagtatttgagagcactagggaagatgtttagtagctgtgtggatgccttttttcacaccctgtctattgaatgctgcatccattcacgaagttaaatgttacatgcagttagtccttaatgtggactggatctgtacttttgttttggattaaaacatttaaagatttttgaagtgcagctactccccacgtgcatttgmtacacataaaagtcatactgtgtgtgcacaaagagtacatggattttccagcataytgctttaaaaaattatataaactgttaaaatattaacacctcaggctacctgctgtattctgtcccattgacccctggaattggatttactgcaagtgattgataattcaattatgtggcttttcccctttaatcttgccatttaaattacagtagaaagacaaaatcaagtaaaataaagtgttagataatagaaagagt

SEQ ID NO: 804 - DNA, 847 bp, Homo sapiens
  misc_feature (20)..(20): n equals a,t,g, or c
  misc_feature (24)..(24): n equals a,t,g, or c
  misc_feature (37)..(37): n equals a,t,g, or c
  misc_feature (49)..(49): n equals a,t,g, or c
  misc_feature (96)..(96): n equals a,t,g, or c
  misc_feature (116)..(116): n equals a,t,g, or c
  misc_feature (193)..(193): n equals a,t,g, or c
  misc_feature (199)..(199): n equals a,t,g, or c
gcttaacttccaagttgggntaanttgcccaaattcnaggaccccaatnttaattgcccaaagagggagccaataccttgaagaacccaagtgttnactgcttgcagttacccgtnttaaacccggagaaccctgtgcggaatcctgaacctgcgctgtctgggtggccacacagagcccgtggtgctgccgntcatcnacagctgccagtgcagctcctgccaggggacggggtttcgccatgttgcccaggctgttcttgaactcctgggctcgagtgatccacctgcctcagcctcccaatgcgctggggttacaggcaggaaccactgcacccagccccctgacctcatcttttaagcaaggctgacattgctatgcaggcttgttgggtggacttggtgagggcacgcgtgtgaagtggctggcaggtgcctagttctgttaagcacctgccatatgataacctgaggtcccactgtgtggcagatgaaggggaaacagaggtggaaggcacccgtgccacctgggtggagcacagtggaaggcctggtgttggctctgggcgtcctcctggcaccagcctgaccactctgcctctcttactaacccatctctccctcacgtgtcccctgggaggtgacttctcaaagcgctaacaggctccgctgggtgagtccacagctgtccctcttgtgatcatgggactcagcagcactgaccacgtccttccacgctctctcacctgcccccaactgggggcccatgacttggcattagcatgttccaaataaagtgatactggcaacaaaaaaaaaaaaaaaaaaaaaactcgagggggggcccg

SEQ ID NO: 805 - DNA, 652 bp, Homo sapiens
  misc_feature (392)..(392): n equals a,t,g, or c
aattcggcacaggggggccaccacacccggcctgtacatgctgttttgcatcttgctttatacgttggggagtgccagatgtcaccatctttcgttcttcctctggggctggtcaaatccccctgagaaaactcctctggcctcctggcggggggtgaaggccaggctgccagggccaggctgccagcttctgggagctgcaggggcagaggcagggagctgtcaggcattcagccagcaagacgcactcagtacccacttggggttcagaatccccctccctcatcttcagatgggccagatgtccccaaagccagcggcccctttctgtttcaccctgtctacagaataaacccccagtcactgggggtgggggaagagtaaggggagangggaaacgagatttggaggtctagctgctgctgaaacagccctcagttcgtctttattttgccttctgcaaaactggcctggtgttgccagctccttttgaggactttgctamcggttctcagcatccctcaattgctggcttaggattcatgggtttttaggggtggggtgggattagcatgtccagctgctttccagtttccaaagttctgtccctatcatattgcctctgatttaaaaaaaaaaaaaaaaaactcga

SEQ ID NO: 806 - DNA, 1124 bp, Homo sapiens
gattgcctacaaatgtcagaggtataatggtttggttttcatgctggcttctcacacagtccatcacagtgattcttggagccagagggaggtatggaagactgtgtgttctccaagggaggcactgtggtctggtggataagagtgggagtcccaatcctttctccgcagatgtgctagctgtgcactctgggcaagtttctcactctcctgagcctcagcgtctttatcaatatgacgagaataaatacagcacctgcctacctcatggggttgtttcagcagtcaatgagatcatgtatatgaagcatttagtatacctagcacctaataaaagctcaacaaccagtagtcttattactaacaaaatggagctagaaggatgcattagtttaaacaaaatcttgaggcagatactgggagtacctgtctttattcttcaacttgagtctcctcccagtttgtttggataaaaactcaaatgtaatatttttaatttgggtaaaagaacttctgagaaagggttgaacatctatccacttgcctttttatgcctagggaactagagatacttgttggcggcatcgcaaatgttgctgacttatgaagtactgcagtatctgaatacctttttgtaggataatctaaagtttccaaaaaatagtatagtgttgtagtgaagaacttggactcttaagccagattattttgttcagattcagaaatcccctccactccacccactggctgtatagccttgcccaaatcactgaatctctgtgtgtctgcgtcctggtgtgtgaaatgaggacaatagtagctattgggtagggttggcctggggtctaagtgatgactgcctgtaaggtgtttagaacagtatttggtaaacaactggcactcaatcagtgttgctgtgattatgatgatttattccaaggttgcttgctttccagtacatcatagactactacttgaccaaatttactagcaatggagtacctgaaagttttacatgtgcacatttgcatgaaaaccccacaaaatttccctttgaacagtgaaggggacggcacaaagataattcttggcactaagcttaaaaaaaaaaaaaaaaaactcga

SEQ ID NO: 807 - DNA, 660 bp, Homo sapiens
gcacgagaccaagcaaagcctacttagtttagatctccagaaattggctggtggaaaaaaatcaaacatgaagattgcagttttgttttgtttttttctgcttatcatttttcaaactgactttggaaaaaatgaagaaattcctaggaagcaaaggaggaagatctaccacagaaggttgaggaaaagttcaacctcacacaagcacagatcaaacagacagcttggaattccgcaaacaacagtttttacaccagtagcaagacttcctattgttaactttgattatagcatggaggaaaagtttgaatcctttcaagttttcctggagtagaatcaagttataatgtgttaccaggaaagaagggacactgtttggtaaagggcataaccatgtacaacaaagctgtgtggtcgcctgagccctgcactacctgcctctgctcagatggaagagttctttgtgatgaaaccatgtgccatccccagaggtgcccccaaacagttatacctgaaggggaatgctgcccggtctgtccgctactggtacagagctttagctaagcaaaatatcagtgtgtgattaatctttaacttccatttgtttttgttactaattttagattaaaattatgatacattaaaaaaaaaaaaaaaaaa

SEQ ID NO: 808 - DNA, 1424 bp, Homo sapiens
  misc_feature (1391)..(1391): n equals a,t,g, or c
  misc_feature (1406)..(1406): n equals a,t,g, or c
  misc_feature (1415)..(1415): n equals a,t,g, or c
gaattcggcacgagtggctatatatttcttcacttgcaattgcctcatggggttcttataaggctgaaatccaataacggatacaaaaatactttaaaaagtaggcatggatttctactgacagccatgagagagtttctagaactagacctggatggccccaaacaactagaaaattggacaaaagatataaaaaaaaaactgttttcaaccattggacagtagtcagcataggactcttatctttgagagaaggggcaaaaacaagatgatccctataagcttccttaatttcttttttttctttttttgagacgctgtctccaaaacaaaacaaaagaataggacaatctcgtatttcctctatctagactcaacaattcttaatatttgctttatccctgtctttctacacatgcatacacatacacacacacaggcatacataattgcatatttacagggtgtttttgctgatctatttgaaagtaagtttcagacattatgacacctactcctaattcctcatgttttttctaagaataaggatattatcttacctaacatatcttttatcaaacctacaaaaattaacaattttatatctaatattagttcatgtttaggttttgcctgttttcccccaaatgtcttttacagtacatgtttttaaaaccaggatctaaggagttcacagattatatttggttattatgtctctttagtgtcttttggcatccttgggttttctacttttatcccccatgacactgactattggaagagtccagaccaattttctatttgattgcttccytgtgtgtatcatttaatttgttcctctatctcatgtgtttcttgtaaactgaaagttaggtgtagagattgagtctaaatatttttggcaagtatatgtcgtaggtaacatttgtgctttatactgcatcatattgggagataaataatattatattgccatctctgttagtgcagccattagaaagacattgtgcctatgtctgtctctttgctgtgtttggtatctgttgagagccatatttttataaaaatcttaaagcattgtcctctgtgaagaaaatatattagaaaaattacacttgacagtataagaattgttgatttgaataaatacatgatttttagaagacatatgtatgaccagcaggaatagtagcctaataggcctttgtttgggacagaatacacttcagatcatccagaaatctaaaatcaggcctgtgtgcctttgactggtatcttccatgtggtgttgaagagtttgagaatttaaaagaaaatgaattaatactaagcaagacacacttttttctttgttccttaaaaaaaaaaaaaaaaaaractcgaggggncccttggtacccganctcaagggngcatagtcg

SEQ ID NO: 809 - DNA, 2409 bp, Homo sapiens
ccacgcgtccgcttcgacgacgacacctgcagaagtgcggacccgccatgccgcgccacctctcgggactgctcctgctgctctggccgctgctgctgctgctgccgccgacccccgccgcccccggccccctggcccgcccgggtttgcggaggctgggcacgcggggcccagggggcagtcccgggcgccgccctggctctgctgtccccacccgcgcgccctattccggggccggccagcccggcggggcccgaggcgcaggtgtttgcaggagcaggcccttggatttggtgttcatcatcgatagttcccgcagtgtgcggcccctggagttcaccaaagtgaagacctttgtctcccagataattgacactctggacattggggcggcagatacacgggtggcagtggtgaactatgctagcaccgtgaagattgagttccatctccagacccactcagataaacagtccttgaaacaggctgtggctcggatcacacccctgtctacaggcaccatgtccggcctggctatccagacagcaatggatgaggccttcacggtggaggcaggagctcgggggcccacttccaacatccctaaggtggccatcatcgtgacagatgggaggccccaggaccaggtgaatgaggtggcggctcgggcccgggcatctggtattgaactctacgccgtgggcgtggaccgggcagacatggagtccctcaagatgatggccagcgagcccctagacgagcacgttttctatgtggagacctacggggtcattgagaaactctcctctagattccaggaaaccttttgcgctctggacccgtgtgtgcttggcacacaccggtgccagcacgtgtgtgtcagtgatggggaaggcaagcaccactgtgagtgcagccaaggctactccttgaacgccgatcagaagacgtgttcagctatcgataagtgtgctctgaacactcacggttgtgaacacatctgtgtgaacgacagaactggctcttaccactgtgagtgctacgaaggttacaccctgaaccaagacaggaagacttgttcggctcaagaccaatgtgcctttggtacacatggctgccagcacatttgtgtaaatgacagagatgggtcccatcactgtgaatgctacgagggttatactctgaatgctgacaacaaaacgtgttcagttcgcagcgagtgtgctgggggctcgcacggctgccagcacctgtgtgtggacgacgggcccgcggcctatcactgcgattgtttccccggctacaccctgaccgaagaccggaggacgtgcgcagccattgaagaagcacgaagactcgtctctacagaagatgcttgtgggtgtgaagccaccctggccttccaggagagggccagctcatatctgcagagactgaatgccaaactcgatgatattttgggcaagttgcaagcagatgcgtatggacaaatacatcgttgaattactcagatttttcacctggatatacggagagcttggtctatttaatatttttgcatacttcaatgttcctgctaataatttgccattgcaaatgctttaatattactggataagtagtatgaggatcttctagagaatcagtaggacataaacgttcacatccttaagagcaaactttagtgtctctaagctatgactgtgaaatgattcatggggaatagaatgaaaagtttggtatctctttatttaccaattgagccatttaatttttaaatgtttatattagtaagataaccattcttacaatgggaactttttatctattttctcttgatagtatttatagtataaaccagttttattattgagagtgtaaattatacaagtatttacacataaaaaagttcatataattgaggtaaatataatttagaactgtttctttaatgctttgttttttgctcactttttgctggaatatcactgaagctgtgatcaggggattataacacatatcaagatcaagtgaacactacatgaaatattgtaagaaacacataactaaagactttagttttgaattaagtgttataacttcttaccaagttttggtaaaaaatcctacattatctttactgtttcactttaggattcaatcaagaaaattatatacttataaatattgatctaaaaagttaacaacaaacccaatgtcgccattttaaagtttaagcttaacttttcttcacttacatatttagtatatgtattttatttttccgcttgaaagcttatagctcttaggagaaaaccatcctttaaattgtgactactcattttttctgtttgtattgtctttagtataataaaaagttactatctttataaaaaaaaaaaaaaaaaa

SEQ ID NO: 810 - DNA, 876 bp, Homo sapiens
caggtaccggtccggaattcccgggtcgacccacgcgtccgcttcgacgacgacacctgcaraagtgcggacccgccatgccgcgccacctctcgggactgctcctgctgctctggccgctgctgctgctgctgccgccgacccccgccgcccccggccccctggcccgcccgggtttgcggaggctgggcacgcggggcccagggggywktcccgkkcgccgccctgkctctgctgtccccacccgcgcgccctattccggggccggccagcccggcggkgcccgaggcgcaggtgtttgcaggagcaggcccttggatttggtgttcatcatcgatagttcccgcagtgtgcggcccctggagttcaccaaagtgaagacctttgtctcccagataattgacactctggacattggggcggcagatacacgggtggcagtggtgaactatgctagcaccgtgaagattgarttccawctccagacccactcagataaacagtccttgaaacaggctgtggctcggatcacacccctgtctacaggcaccatgtccggcctggctatccagacagcaatggatgargccttcacggtggaggcaggagctcgggggcccacttycaacatccctaaggtggccatcatcgtgacagatgggaggccccaggaccaggtgaatgargtggcggctcgggcccgggcatctggtattgaactctacgccgtgggcgtggaccsggcaracatggagtcccttcaagatgaatggccagcgaagcccctagacgagcacgttttctatgtggagacctacggggtyattgagaaaccttcctytagattccaggaaacccttttgcgctcttggaacc

SEQ ID NO: 811 - DNA, 1586 bp, Homo sapiens
tttattatactaaagmcaatacaamcagaaaaaatgagtagtcacaatttaaaggatggttttctcctaagagctataagctttcaagcggaaaaataaaatacatatactaaatatgtaagtgaagaaaagttaagcttaaactttaaaatggcgacattgggtttgttgttaactttttagatcaatatttataagtatataattttcttgattgaatcctaaagtgaaacagtaaagataatgtaggattttttaccaaaacttggtaagaagttataacacttaattcaaaactaaagtctttagttatgtgtttcttacaatatttcatgtagtgttcacttgatcttgatatgtgttataatcccctgatcacagcttcagtgatattccagcaaaaagtgagcaaaaarcaaagcattaaagaaacagttctaaattatatttacctcaattatatgaacttttttatgtgtaaatacttgtataatttacactctcaataataaaactggtttatactataaatactatcaagagaaaatagataaaaagttcccattgtaagaatggttatcttactaatataaacatttaaaaattaaatggctcaattggtaaataaagagataccaaacttttcattctattccccatgaatcatttcacagtcatagcttagagacactaaagtttgctcttaaggatgtgaacgtttatgtcctactgattctctagaagatcctcatactacttatccagtaatattaaagcatttgcaatggcaaattattagcaggaacattgaagtatgcaaaaatattaaatagaccaagctctccgtatatccaggtgaaaaatctgagtaattcaacgatgtatttgtccatacgcatctgcttgcaacttgcccaaaatatcatcgagtttggcattcagtctctgcagatatgagctggccctctcctggaaggccagggtggcttcacacccacaagcatcttctgtagagacgagtcttcgtgcttcttcaatggctgcgcacgtcctccggtcttcggtcagggtgtagccggggaaacaatcgcagygataggccgcgggcccgtcgtccacacacaggtgctggcagccgtgcgagccmmcagcacactcgctgcgaactgaacacgttttgttgtcagcattcagagtrkaassctcgtagmatwmacagtgatgggacccatctctgtcatttacacaaatgtgctggcagmcatgtgtaccaaaggcacattggtcttgagccgaacaagtcttcctgtcttggttcagggtgtaaccttcgtagcactcacagtggtaagagccagttctgtcgttcacacagatgtgttcacaaccgtgagtgttcagagcacacttatcgatagctgaacacgtcttctgatcggcgttcaaggagtagccttggctgcactcacagtggtgcttgccttccccatcactgacacmcacgtgctggcaccggtgtgtgccaarcacacacgggwccagagcgcaaaaggtttcctggaatctagaggagagtttggcaattt

SEQ ID NO: 812 - DNA, 1011 bp, Homo sapiens
  misc_feature (2)..(2): n equals a,t,g, or c
cnccctttttttttttttttttttttttttttttttttttttttttttttttttttttttttgcagcttaaaagcattttattaagcatttttggatgttgcttcctaccacttaagaataaaaaatgcattttaataaaaacaaatctatactgaagtcattttcctttgtgagaggaaatatgaatgaaatacattcatacttaaaaacagagtattttactgccaaaactttaaatatctcaagagcataccacattttaaacacattatggtcatgtagctatttcaatattcctgggagtggtgggcaattagcctgtctatggcttaggatctgtttccatgcttgcttcctgagcttcttctacctctgagagtttttcatcattttccaatgtttgctgaagttcatggatggtactaagaagaacatgaaactgtttccgtctcaattccagcttatcttcaacactttctttaatgtgtgaaagatgctctaattcttttcccagagcctctagttcctttaatgtctcatgcctgtctggatggtgctgaatcacttttgccaaagcatcatattcttggcgattttttcgtattcgttttgcttgaagaatttgctttttgcactcagcaattttttcatgtgctccagctatgctacattctatttccttgtaaattttttcataattttccatttctctgagattcatatcatatactagtaaagttttgcccattgaaaattcacattgagacagcgtgctcagcatacgttggtactggctatatccctcttcctgggacccagagttgcaccatttaatgaaactcttcactagcagattaattctccgatcatctccagcaccatctccatcaatgaggagacgcttccgtataattcgtcgtcagtcacggctcccatggcgtgcgcggcggcggcggcgggcaagctgaggcggcggttggcggcggcggcggaggtcaaactcccacaat

SEQ ID NO: 813 - DNA, 427 bp, Homo sapiens
  misc_feature (230)..(230): n equals a,t,g, or c
  misc_feature (290)..(290): n equals a,t,g, or c
  misc_feature (338)..(338): n equals a,t,g, or c
  misc_feature (381)..(381): n equals a,t,g, or c
tcgacccacgcgtccgcggacgcgtgggcggacgcgtgggcgcggcctcccggcgctcggctccgaccccgccgccgccaccatgcagccccccagcctgctgctgctcgtcctcgggctgctcgctgcgcccgccgccgcgctcgtccgaatcccgctgcacaagttcacctctgtgcgccggaccatgtcggagttggggggccccgtggaggatctgatcgccagangccccatttcaaaatacgcccagggggtgcccagtgtggcggggggtcccgttccggagntgctcaaggaaactacatggaacgcgcaaatactacggggaaaattcnggcatccgggaacgcccccccgcaaattgcttccacccgtccntccttttgaaaaacggggttccttcccaaccttgttgggttccccc

SEQ ID NO: 814 - DNA, 1500 bp, Homo sapiens
  misc_feature (8)..(9): n equals a,t,g, or c
  misc_feature (417)..(417): n equals a,t,g, or c
  misc_feature (1431)..(1432): n equals a,t,g, or c
tggttttnntttttttttttgaggcccagacgactgtatttccacgttcacttcggctcctggtcactcaagaggggaaaagctcacagaaggtggcaccagcccccccctccccttcttccccaacccggcaccagcaaatgccctcctagatggggtcaagccccaggaggaccccaaaggcatcacaaggctgccttttgtccctgagtcccgacccttccaagcccttcctgcttgtccttgggcctcggcgggtcccttccacgatgggccacacgggaagacaggccagcagtgccccgctctggaccccagaccagaccccaggaggagaagcccagagaacagcctggcctggggtgggggctcagtccagaagtcctgcctgggcagccaggcccccgaagcacgggntgggggggggggggggaactacctgggccgggggagggggtcccgcgtgcaagacgatgggcggccgagccaggctggggcttcccagtcagtgacgtggctccagactcggggtcagcctagtggctgctgccccgcaccccgccctctactagacagacagacacaccaaggccggggaaaccacagaacaaaacggcagcccgacagcccggcgcctgcagagctgggctttgagtgtgagtctgagcgtgagtgtgtgcggcaggggtggccgggagggcggggcggccagcctcctcctgccggaccccgtcctccccagcgggcgggcagctagagcctggtggcctcggccaggcccacgcggttctggtcccggtcgaacacggtgtagtagcggccgatgaagacgtcccccaggatccagagcggcccgccgggcggggggatgtccatgcccatgaagccgctcaagcagatggacttcccgccctgcgacaccttgagcgtgtagtcctctgacgacagcttgtagggtttgccgcccagcgtcagggtgacctcgggcaaggtggacaccttctcacaggggatcatgtactcgccctgratcarcggcacggccccgatggccttctgcagctcgcgcacctcgtccacggggcccacgatgagcgaggtgcccgtgtccacgatggcctcgcagccccccttgcacagggtcaggctgctgcccacgtccacctgttccatgtggacctgccagtacgccttgcgggtcacgttgaggtaggacaggggacccttgtagtacttggagtctgtgccgcccagcatgagctcacccccaggctgcgcgccggggtccctgttcaggtagaaagagaagatgttcttctccaccagcttctgctgcatcaggttatcaaagwcgggaagcacattgttgaccgagatgcgggggtaggccatgcccaggatgccgtcgaacttggccgcgatgaaggtganncccggctgcttggtggcttccccgaacgtctgcctctccaccttgacgccagccaggctcgacagacc

SEQ ID NO: 815 - DNA, 1234 bp, Homo sapiens
  misc_feature (1058)..(1058): n equals a,t,g, or c
cgccggccgcgcccacgtgaycggtccgggtgcaaacacgcgggtcagctgatccggcccaactgcggcgtcatcccggctataagcgcacggcctcggcgaccctctccgacccggccgccgccgccatgcagccctccagccttctgccgctcgccctctgcctgctggctgcacccgcctccgcgctcgtcaggatcccgctgcacaagttcacgtccatccgccggaccatgtcggaggttgggggctctgtggaggacctgattgccaaaggccccgtctcaaagtactcccaggcggtgccagccgtgaccgaggggcccattcccgaggtgctcaagaactacatggacgcccagtactacggggagattggcatcgggacgcccccccagtgcttcacagtcgtcttcgacacgggctcctccaacctgtgggtcccctccatccactgcaaactgctggacatcgcttgctggatccaccacaagtacaacagcgacaagtccagcacctacgtgaagaatggtacctcgtttgacatccactatggctcgggcagcctctccgggtacctgagccaggacactgtgtcggtgccctgccagtcagcgtcgtcagcctctgccctgggcggtgtcaaagtggagaggcaggtctttggggaggccaccaagcagccaggcatcaccttcatcgcagccaagttcgatggcatcctgggcatggcctacccccgcatctccgtcaacaacgtgctgcccgtcttcgacaacctgatgcagcagaagctggtggaccagaacatcttctccttctacctgagcagggacccagatgcgcagcctgggggtgagctgatgctgggtggcacagactccaagtattacaagggttctctgtcctacctgaatgtcacccgcaaggcctactggcaggtccacctggaccaggtggaggtggccagcgggctgaccctgtgcaaggagggctgtgaggccattgtggacacaggcacttccctcatggtgggcccggtggatgaggtgcgcganctgcagaaggccatcggggccgtgccgctgattcagggcgagtacatgatcccctgtgagaaggtgtccaccctgcccgcgatcacactgaagctgggaggcaaaggctacaagctgtccccagaggactacacgctcaaggtgtcgcaggccgggaagaccytctgcctgagcgg

SEQ ID NO: 816 - DNA, 3095 bp, Homo sapiens
ccacgcgtccgtccttccgcagagaacgtggccagaagtgttgtattaggaagcaagtaagaaagaaaaggaaaaaaaaaagaaatcttgcatttgacacatgaaaaagtaactaaaagcttgcacggagatatattaagcccttgcactaaaaatgctggtactgtttaaattcctcccgttgacttcaagtgggcgctttttatccgtaacattgtatcaccgggtgcaccaccagacgtttttcgcaggagcgaagtcattctctccggcgtctacacttaacttgtatatttgttctagccaatttcagtcacttcagaaactttactgtggcgtaattccagttcttaggtacgcgagcatagagtgaaaaaatagctgtgattgttcttatgtaaaaatcaaagctccaatggaagttaatgaatacctttgtaataatggaatctatttgccctttatttcttaatcttctgttttaaactgctgctattaaaaacacacccatgttattaggtttacggaagttgagctgtcgttcaagttcttggcgtccggaaaggtgtccgtgccatgggcttgtgacccggtcctggatacaccagaaacatcaccttcttgccacctaaaagagaatcgcactcacaaacgctgtcacaaccgtctttatgacatcaatctcccttgttccggttctctttttacaaaaaagaatttacttcattaaacaatttccgtctctagtttaaacagaaggtggaaaaaaatagaccccggtctagactcattttctccagtccacattggaatgggtttaagaatatcctcttccaaacaaaacaagacgatttgtactttgtgtctaagatgtctaagatgaaacgtttaaaactctgattaccacaattttggattttttgttaaaatcaaatgtattttcaaacttactgtgttacaatattatagttaaaaagtacagggagagcagaagccctgatctaagaggtgagtcattgtcctcatgttgctgctaacttgaattgcagaagagaaaatctcagtgccttctgcctggctttttgatggagtttgcttaacacccttcatctttctgtttctctccatgtaactaaatgacgttttaaaaattcagtgctgaggtgtctgggtagcacagcggttgagcctccgatttttggtttcaactcaggtcacgatctcagggtcatgggatcgagccccacaacaggctccacgctcagccgggagtgtgcttaagtttctcgctctgcccctgcccttccccttcccctgctgcgtgcacctatgcactctctctctcaaataaacaaataaatctttaaaaataaataaataaaacacagtgcataccataaaacattaagtaatatgcgttagggaagcatttgagatcatgcatagcttatatatttcaaaaaggatttgttcacatcagtacaatagatagatataaaagaagcaattcttggagcgtctgggtaaagaaggtagtgctccggctcagcaggctttcccgtcaagccactgatctccacccggctctcccgtgttcctcttcaataactgagtgcagtctatgagcagatgctgccttctgccacataaagtatccttaacttttactttgctttgagtttaaaccagcattgaaatgtaaatcacgtcttcctcatgcatgaaattgtgagggaagtcagagaggttctctaagagtttatttagcaatgaggaaacaggacaaagaggaggtagtcccatagtggggagggtgggaggcggggtctgccgggcagcactgggtccagcgtctccctttccctagctttctcccaattttctttaggaaaaatgatgtcatagtgagatttcctataacagaatgtttctaaggttcactgtatggacccagaccccagacggttgtcttataagcgaacttagaacggatgctgggaactaagtacttgagtgttgacttgctcacctgcgtgggacagagggacaagccagcaagcccccatgaagtgacgggcagccccacctgggccctggagagaccgacgcaccctctcagctggggtgcagagaaaggattggtttgggggatagcagtggactgtcagaagaacttacgggatcctattgtaatgtaagctatgaatcaggcttgctgtcctgggactgaggttgtaacccgtgaacgacgcaccaacacaggcagctgatgcgtttgctttggcttccaatttgctaatataaaaatctagacttgtttcatgaaaacaggacatttaaacattctatgaatattctccaaaaatatttggggaaacctatgtacacatttctgttggactgacacctagaaatcaaattgttgtgacagaggatgtgcctatgttcagcttcagtaaatactgccggagagatctctgaatgataaacagttaacggaaaatcgcaccaaaccaggctgttggaggcaacaacccattgggctagtttctggtggcctgctgaaccacgcagccaacactgggcttcagactgcacgggactctctttgtccacctgtcctgtgcctggccccacaccaggatgctggcgattatcaaattcactttactggtgattacctttgagcatatttgctttcacaaatcagttctgtaactttgtgtgcattgggctaaattttacaaactaatcattggttaaaaggaagtggcctaaggtccccagtcttgctgatatcagggcagctgctcctttggggttcctcgtcttccatgggtgaagcatgggagtgaggggccccataggggggtcagcgatgccacacttgggggctgtccctgctcagctatgggcagacctactttttaggtttggtttgaggtcctcaccatcaccactgtccttattcaagtaaactaagtctttggttattttaaaattaatgcaatgaaattatgttttagatcattattaagattattaaaaataaagacaaataaaatcatatatgcatattaaaaaaaaaaaaaaaa

SEQ ID NO: 817 - DNA, 518 bp, Homo sapiens
  misc_feature (388)..(388): n equals a,t,g, or c
  misc_feature (414)..(414): n equals a,t,g, or c
  misc_feature (458)..(458): n equals a,t,g, or c
  misc_feature (501)..(501): n equals a,t,g, or c
tcgacccacgcgtccggcacgktcgccaggcaccgctgaccgaggcctgctgggattccagaattggagagggaggcaccatgaagactctcctgctgctggtggggctgctgctgacctgggagaatggacgggttctgggagaccagatggtctcagacactgagctccaggaaatgtccaccgaggggagtaagtacattaatcgggaaattaaaaatgctctcaagggggtgaagcagataaagacactaatagaacaaacaaacgaggagcgcaaatccctgctcaccaacttggaagaagccaagaagaagaaagaggatgccctgaatgacaccaaggattcagaaatgaagctgaaggcgtccccaggggttttcaatgncacccttgatggccctctgggaggantttaagcccttccttgaaaacagacctgtattgaagttctaagncccgagtcttccagaagccagccacaaggcttggtttggccanccaggtttgaaggagtt

SEQ ID NO: 818 - DNA, 518 bp, Homo sapiens
  misc_feature (388)..(388): n equals a,t,g, or c
  misc_feature (414)..(414): n equals a,t,g, or c
  misc_feature (458)..(458): n equals a,t,g, or c
  misc_feature (501)..(501): n equals a,t,g, or c
tcgacccacgcgtccggcacgktcgccaggcaccgctgaccgaggcctgctgggattccagaattggagagggaggcaccatgaagactctcctgctgctggtggggctgctgctgacctgggagaatggacgggttctgggagaccagatggtctcagacactgagctccaggaaatgtccaccgaggggagtaagtacattaatcgggaaattaaaaatgctctcaagggggtgaagcagataaagacactaatagaacaaacaaacgaggagcgcaaatccctgctcascaacytggaagaagccaagaagaagaaagaggatgccctgaatgacaccaaggattcagaaatgaagctgaaggcgtccccaggggttttcaatgncacccttgatggccctctgggaggantttaagcccttccttgaaaacagacctgtattgaagttctaagncccgagtcttccagaagccagccacaaggcttggtttggccanccaggtttgaaggagtt

SEQ ID NO: 819 - DNA, 1670 bp, Homo sapiens
ccacgcgtccggcacggtcgccaggcaccgctgaccgaggcctgctgggattccagaattggagagggaggcaccatgaagactctcctgctgctggtggggctgctgctgacctgggagaatggacgggttctgggagaccagatggtctcagacactgagctccaggaaatgtccaccgaggggagtaagtacattaatcgggaaattaaaaatgctctcaagggggtgaagcagataaagacactaatagaacaaacaaacgaggagcgcaaatccctgctcaccaacttggaagaagccaagaagaagaaagaggatgccctgaatgacaccaaggattcagaaatgaagctgaaggcgtcgcagggggtgtgcaatgacaccatgatggccctctgggaggagtgtaagccctgcctgaaacagacctgggggaagggtctacgcccgagtctgcagaagcagcacagggctggttggccaccaggttgaggagttcctgaaccagagttctcccttctacttctggattaatggcgaccgcatcgactccctgctggagaacgaccggcagcagacccacgccctggatgtcatgcaggacagtttcgaccgggcatccagcatcatggatgagctgttccaggacagattcttcacccgtgaggcccaggaccctttccacttctcacccttcagctcattccagcggaggccttttttcttcaatatcaagcaccgctttgcccggaacataatgcctttccctggctaccagcccttgaatttccacgacatgtttcagcccttcttcgacatgatacaccaggctcagcaggccatggatgttaacctgcacagactcccccactttccaatggaattcacagaagaagacaaccaggacggcgccgtgtgcaaggagatccgtcacaactccacagggtgcctgaagatgaaggaccagtgtgaaaagtgccgggagatcttgtctgtggactgttcgtccaacaaccccgctcaggtccagctgcgacaggaacttaataattccctccagattgcagagaagttcaccaagcttgtacgacgagctgctgcagtcctaccaggagaagatgttcaacacgtcctccctgctgaagcagctggacgagcagtttagctgggtgtcccagctggcgaatctcactcagactgaggacccgttctatctccaggtcacgacggtgagttcccagacttctgactccagtgctccctctggcgtcactaaggtggttgtgaagctctttgattccgaccccatcaccgtgatcctcccagaagacctctccaggaacaatcctaaatttatggagaccgtggcagagaaagcccttcaggaataccgccagaagagccgggaggagtgagatgggaacactgcctctccacatggcaggtgtctgagttctgtcgcccccgcgatgagcgataggcccctagagagagctctgcatgtcaccgagtgaccgggccttccttgaggccctcctgtcccctcaccccgcctgtcctccctctggactctgcattgtaacaccgtgttcactgatcatgggaagaactcctgtgtgccactaactcaataaaaccaccagtaatctgaaaaaaaaaaaaaaaaa

SEQ ID NO: 820 - DNA, 606 bp, Homo sapiens
  misc_feature (591)..(591): n equals a,t,g, or c
  misc_feature (593)..(593): n equals a,t,g, or c
  misc_feature (600)..(601): n equals a,t,g, or c
  misc_feature (605)..(605): n equals a,t,g, or c
ctttttttttttttttttcagattactggtggttttattgagttagtggcacacaggagttcttcccatgatcagtgaacacggtgttacaatgcagagtccagagggaggacaggcggggtgaggggacaggagggcctcaaggaaggcccggtcactcggtgacatgcagagctctctctaggggcctatcgctcatcgcgggggcgacagaactcagacacctgccatgtggagaggcagtgttcccatctcactcctcccggctcttctggcggtattcctgaagggctttctctgccacggtctccataaatttaggattgttcctggagaggtcttctgggaggatcacggtgatggggtcggaatcaaagagcttcacaaccaccttagtgacgccagagggagcactggagtcagaagtctgggaactcaccgtcgtgacctggagatagaacgggtcctcagtctgagtgagattcgccagctgggacacccagctaaactgctcgtccagctgcttcarcaggragracgwgttgaacatcttctcctggtaggactgcagcagctcgksgtgggtgcctnanacaacannctana

SEQ ID NO: 821 - DNA, 841 bp, Homo sapiens
  misc_feature (20)..(20): n equals a,t,g, or c
  misc_feature (29)..(29): n equals a,t,g, or c
  misc_feature (34)..(34): n equals a,t,g, or c
  misc_feature (57)..(57): n equals a,t,g, or c
  misc_feature (101)..(101): n equals a,t,g, or c
  misc_feature (703)..(703): n equals a,t,g, or c
  misc_feature (779)..(779): n equals a,t,g, or c
cttagtacgccaaaggaacnctgaatcanaagcntggacctcaccgtcgtgacctgnagatagaccgggtcctcagtctgagtgagattcgccagctgggnccacccagctaaactgcttcgtccagcttgcttcagcaggaagacgtgttgaacatcttctcctggtaggactgcagcagctcgtcgtacaagcttggtgaacttctctgcaatctggagggaattattaagttcctgtcgcagctggacctgagcggggttgttggacgaacagtccacagacaagatctcccggcacttttcacactggtccttcatcttcaggcaccctgtggagttgtgacggatctccttgcacacggcgccgtcctggttgtcttcttctgtgaattccattggaaagtgggggagtctgtgcaggttaacatccatggcctgctgagcctggtgtatcatgtcgaagaagggctgaaacatgtcgtggaaattcaagggctggtagccagggaaaggcattatgttccgggcaaagcggtgcttgatattgaagaaaaaaggcctccgctggaatgagctgaagggtgagaagtgsaaagggtcctgggcctcacgggtgaagaatctgtcctggaacagctcatccatgatgctggatgcccggtcgaaactgtcctgcatgacatccagggcgtgggtctgcnaccggtcgttctccagcagggagtcgatgcggtcgccattaatccagaagtagaagggagaactctggttcagganctcctcaacctggtggccaaccagccctgtgctgcttctgcagactcgggcgtagacccttc

SEQ ID NO: 822 - DNA, 868 bp, Homo sapiens
  misc_feature (1)..(1): n equals a,t,g, or c
  misc_feature (23)..(23): n equals a,t,g, or c
  misc_feature (31)..(31): n equals a,t,g, or c
  misc_feature (45)..(45): n equals a,t,g, or c
  misc_feature (829)..(829): n equals a,t,g, or c
  misc_feature (860)..(860): n equals a,t,g, or c
ntttcagcagttccgcatgcccntccgtggnaagcctgttcgtgntattgggcaagaacccccatgatgcccaaggccatccaagggcatctgaagaccaacccagctctggaaaacctgttacttcatatccgggggaatgtggctttgtgttcaccaaggaggcctcacttgagatcagggacatgctgctggccaataaggtgccagctgccgcccgtgctggtgccatagccccatgtgaggtcactgtgccagcccagaacactggtctggggcccgagaagacctccttcttccaggctttaggcatcaccactaaaatctccagaggaaccattgaaatcctgagtgatgtgcagctgattaagaccggagacaaagtgggagccagtgaagccacactgctgaacatgctgaacatctcccccttctcctttgggctgatcatccagcaggtgtttgacaatggcagcatctacaaccctgaagtgcttgacatcacagaggaaactctgcattctcgcttcctggagggtgtccgcaatgttgccagcgtatgtctgcagataggttacccaactgtggcatcagtgccccattctatcatcaatggatacaagcgggtcctggctttgtctgtggagactgattacacctttccacttgctgaaaaggtcaaggccttcttggctgatccatctgcatttgtggctgctgcccctgtggccgctgccaccactgctgcacctgctgctgctgcagccccagccaaagttgaagcaaaggaagagtcggaggaawcggatgagagkattktcamttcganaatcagcaaaagcaacaattccagccagttnattgtgaa

SEQ ID NO: 823 - DNA, 1395 bp, Homo sapiens
  misc_feature (1338)..(1338): n equals a,t,g, or c
  misc_feature (1382)..(1384): n equals a,t,g, or c
  misc_feature (1390)..(1390): n equals a,t,g, or c
tcgacccacgcgtccgggagccatggcgccgtccgggccgctgctgctggtgctgctcgtgccgctggccgccgcgcggccgggccctacttccgtcccggccggggctgccgcctgcccctgcggggggaccagctgtcggggctggggcgcaggacctacccccggccgcacgagtacctgtccccatctgacctgcccaagagctgggactggcgcaacgtgaacggggtcaactatgccagtgccaccaggaaccagcatatcccccagtactgtggctcctgctgggcccacggcagcaccagtgccatggcggaccggatcaacatcaagagaaagggggcgtggccctccamcctgctgtccgtgcaacamktcytcgaytggcgccaacgcgggytctgtgagggggcaackacctgccggtgtsgacgtacgcccatgagcamggcatcccggacgagacctgcaacaactaccaggctaaggaccaggaatgcaacaagttcaaccagtgtggaacatgcacggaattcaaggagtgccactacatccagaactacacgctctggaaagtgggtgactacggctccctctccggcagggagaagatgatggcggaaatctatgccaacggccccatcagctgcggtatcatggccacggagaagatggtgaactacacgggaggcatctacgcggagtaccaggatcaggcctacataaaccacgtcatttctgtggtcggctggggcgtcagcgacggcacggagtactgggttgtccggaattcgtggggggaaccgtggggggagcacggctggatgaggattgtgaccagcacctataaagacgggcagggcgccagttacaacctcgctgtcgaggacacctgtacgtttggggaccccatcgtttaagggacaggtctccccagaagagcagtgttatcgtgaaccataatcagggggtcctatcgctctgggcactgggttggttccaccatggtctgaagggactggggactggcatcaaacgtgtctgatggctgctcgcggccccgtgcgcccagaagggagaaggggcgcctgtcagcacacagcctgccgcggcgccggccgggagcgcgctcctggggaagagtctgcaatgggacggctgagagccccgggccggccactgccctgcccagtgtctgcctggccaccgtgtgatccgcaaggcccaaacgatgtgactgcaagcttctctgtccctgatttggtgtttcctgtctggcagctgtggtccatgatgtggtgcggaagcccaagcttctcaaagctcttacgttgnctgggattcggtgggggggagtcggggggtggaaggagaaagcnnnccttgnaagat

SEQ ID NO: 824 - DNA, 270 bp, Homo sapiens
  misc_feature (260)..(260): n equals a,t,g, or c
tgtcagcacacagcctgccgcggcgccgccgggagcgcgctcctggggaagagtctgcaatgggacggctgagagcctcgggccggccactgccctgccccagtgtctgcctggccaccgtgtgatccgcaaggcccaaacgatgtgactgccaagctcctctgtccctgatttggtgtttcctgtctgcagctgtggtccatgatgtggtgcggaagcccaggcttctcaaagctcttacgttgctgggattcggtggnggggartcgg

SEQ ID NO: 825 - DNA, 2324 bp, Homo sapiens
  misc_feature (15)..(15): n equals a,t,g, or c
  misc_feature (23)..(23): n equals a,t,g, or c
  misc_feature (36)..(36): n equals a,t,g, or c
  misc_feature (92)..(92): n equals a,t,g, or c
  misc_feature (95)..(95): n equals a,t,g, or c
  misc_feature (107)..(107): n equals a,t,g, or c
cgccaaacccgcctnttccccgngcgtttgccgtcntttaaatgccaggatcgatccagccatgataagatccattgatgagtttggccaanccncaacttagaatncagtgaaaaaaatgctttatttgtgaaatttgtgatgctattgctttatttgtaaccmttataagctgcaataaccaagttaccamcamcaattgcattcattttatgtttcaggttcaggggraggtgtggraggttttttaaagcaagtaaamcctctacaaatgtggtatgsctgattatgatcatgamcagactgtgaggactgaggggcctgaaatgagccttgggactgtgaatctaaaatacacaamcaattagaatcactagctcctgtgtataatattttcataaatcatactcagtaagcaaaactctcaagcagcaagcatatgcagytagtttaacmcattatacacttaaaaattttatatttaccttagagctttaaatctctgtaggtagtttgtccaattatgtcacaccacagaagtaaggttccttcacaaagatcccaagctagcttataatacgactcactatagggagagagctatgacgtcgcatgcacgcgtaagcttgggcccctcgagggatcctctagagcggccgccctttttttttttttttcatcttttatttatttattatttttttttactaaggcacatgacgtagaaatattgaggtacaaaatgcaaatttctgcataagatttttaagatattcattttggaaaatgaaggtgaacatcatctcccagaatattcagcttttagcttgttttttcttttggaccagttcaaccagcaacttgtacctagcgatacagtcttccttgctcttggacgggacacatctggctattttgtcccagcggtcagaggatccccttgggtactgctgcaacgccagttccagaagtttctgttgattttgagtccacggctcctctgcagaccgagctctctcttttctcaggctctcctcgtcgctggactcgttttgttctgctatgtcaaagtccttctgccgcttggctctggacttctcctctggctccggcttcgctgtagcctccagcagcctggctggcttccgcctccgaggccgggcatcagtggccccggtctcctgctcaccggagtctccctcctgctcctcctccgctgccaccccctctgcgtcctctcgctgggtgatcatgtcatcgggcaaggtggtggccgttttgatgggcctggaattctgaactgtcgatttgagttcggagagtctaaccattcctggggagcaggtcactgaatccttcagttgcttggctttggttgtcacatctgtcacagatcgacccaattcgtgggcaatcttttcccatcgacctggagtccctcctgggaacttaaccatacttcttgtcagttggctgaggtcctcttctgtccattcaggtgcctgttttttctgtgttcggttcctgttttccaaccaatcatccatttgttcctcaatttcttctatggaagttccatgatcataagactgaatatatgtagtttctaaaggtgtgtatacaggaaattcaggttttggttttttaactttcttctgtttttgaagtgtttcaagttcagttctagtcagtgcatcttccttttccttcaatcttgtttctttatatttagcataaaactgcccagcatcctggatgaggtgaggtaatgcttttagtgtaaggcaaaaccaaatccccagtttgcatggaagcaaatcatgccactgtggtttcatcagcaatctttcatttttttctgaagcaccgagttttgatacatccacactcttgctgccagtcttttttttcttttctctcttttttctacttagtagttcatccagttgtttttccaggtagattgaccaaaccacagcataatgacccactgtgagaataatgaacaagagtaatgccagctcagcattgctcatttttctcacccgcctgtagtagaatacaggctgtcgccaatctggaagtccattgatcagaatatcatcatacctctgccttcgttcatcatcctttaaaacttcataaatggccaccaattgtctaaactgagtttctgcattttcatctttattcttgtctggatgtaaagttagtgaaagcttacgatatgcttttctgatgtctgcagatgatgcatcctgctgcaccccgaggaactggtagaagttgagcggacgcgtgggtcgacccgggaattccggacc

SEQ ID NO: 826 - DNA, 2075 bp, Homo sapiens
ccacgcgtccgtggggccgagcgccgctgggtaggcggaagtagccgcagatggcggcggctatgcccttgctctgctcgtcctgttgctcctggggcccggcggctggtgccttgcagaacccccacgcgacagcctgcgggaggaacttgtcatcaccccgctgccttccggggacgtagccgccacattccagttccgcacgcgctgggattcggagcttcagcgggaaggagtgtcccattacaggctctttcccaaagccctggggcagctgatctccaagtattctctacgggagctgcacctgtcattcacacaaggcttttggaggacccgatactgggggccacccttcctgcaggccccatcagacactgaccactactttctgcgctatgctgtgctgccgcgggaggtggtctgcaccgaaaacctcaccccctggaagaagctcttgccctgtagttccaaggcaggcctctctgtgctgctgaaggcagatcgcttgttccacaccagctaccactcccaggcagtgcatatccgccctgtttgcagaaatgcacgctgtactagcatctcctgggagctgaggcagaccctgtcagttgtatttgatgccttcatcacggggcagggaaagaaagactggtccctcttccggatgttctcccgaaccctcacggagccctgccccctggcttcagagagccgagtctatgtggacatcaccacctacaaccaggacaacgagacattagaggtgcacccacccccgaccactacatatcaggacgtcatcctaggcactcggaagacctatgccatctatgacttgcttgacaccgccatgatcaacaactctcgaaacctcaacatccagctcaagtggaagagacccccagagaatgaggcccccccagtgcccttcctgcatgcccagcggtacgtgagtggctatgggctgcagaagggggagctgagcacactgctgtacaacacccacccataccgggccttcccggtgctgctgctggacaccgtaccctggtatctgcggctgtatgtgcacaccctcaccatcacctccaagggcaaggagaacaaaccaagttacatccactaccagcctgcccaggaccggctgcaaccccacctcctggagatgctgattcagctgccggccaactcagtcaccaaggtttccatccagtttgagcgggcgctgctgaagtggaccgagtacacaccagatcctaaccatggcttctatgtcagcccatctgtcctcagcgcccttgtgcccagcatggtagcagccaagccagtggactgggaagagagtcccctcttcaacagcctgttcccagtctctgatggctctaactactttgtgcggctctacacggagccgctgctggtgaacctgccgacaccggacttcagcatgccctacaacgtgatctgcctcacgtgcactgtggtggccgtgtgctacggctccttctacaatctcctcacccgaacctttccacatcgaggagccccgcacaggtggcctggccaagcggctggccaaccttatccggcgcgcccgagtgtcccccccactctgattcttgccctttccagcagctgcagctgccgtttctctctggggaggggagcccaagggctgtttctgccacttgctctcctcagagttggcttttgaaccaaagtgccctggaccaggtcagggcctacagctgtgttgtccagtacaggagccacgagccaaatgtggcatttgaatttgaattaacttagaaattcatttcctcacctgtagtggccacctctatattgaggtgctcaataagcaaaagtggtcggtggctgctgtattggacagcacagaaaaagatttccatcaccacagaaaggtcggctggcagcactggccaaggtgatggggtgtgctacacagtgtatgtcactgtgtagtggatggagtttactgtttgtggaataaaaacggctgtttccgtggttaaaaaaaaaaaaaaaaaaaaaaaaaaaaaaaaaaaaaa

SEQ ID NO: 827 - DNA, 1697 bp, Homo sapiens
  misc_feature (1627)..(1627): n equals a,t,g, or c
aagactccttttggcttttggagacggcagcmcgaggggttagcatcgctgagtgaggacggaagatcacccatctccatccgccagatggcctatgtttctggtctctccttcggtatcatcagtggtgtcttctctgttatcaatattttggctgatgcacttgggccaggtgtggttgggatccatggagactcaccctattacttcctgacttcagcctttctgacagcagccattatcctgctccataccttttggggagttgtgttctttgatgcctgtgagaggagacggtactgggctttgggcctggtggttgggagtcacctactgacatcgggactgacattcctgaacccctggtatgaggccagcctgctgcccatctatgcagtcactgtttccatggggctctgggccttcatcacagctggagggtccctccgaagtattcagcgcagcytcttgtgtaaggactgactacctggactgatcgcctgacagatcccacctgcctgtccactgcccatgactgagcccagccccagcccgggtccattgcccacattctctgtctccttctcgtcggtctaccccactacctccagggttttgctttgtccttttgtgaccgttagtctctaagctttaccaggagcagcctgggttcagccagtcagtgactggtgggtttgaatctgcacttatccccaccacctggggacccccttgttgtgtccaggactccccctgtgtcagtgctctgctctcaccctgcccaagactcacctcccttcccctctgcaggccgacggcaggaggacagtcgggtgatggtgtattctgccctgcgcatcccacccgaggactgagggaacctaggggggaccctgggcctggggtgccctcctgatgtcctcgccctgtatttctccatctccagttctggacagtgcaggttgccaagaaaagggacctagtttagccattgccctggagatgaaattaatggaggctcaaggatagatgagctctgagtttctcagtactccctcaagactggacatcttggtctttttctcaggcctgagggggaaccatttttggtgtgataaataccctaaactgcctttttttcttttttgaggtggggggagggaggaggtatattggaactcttctaacctccttgggctatattttctctcctcgagttgctcctcatggctgggctcatttcggtccctttctccttggtcccagaccttgggggaaaggaaggaagtgcatgtttgggaactggcattactggaactaatggttttaacctccttaaccaccagcatccctcctctccccaaggtgaagtggagggtgctgtggtgagctggccactccagagctgcagtgccactggaggagtcagactaccatgacatcgtagggaaggaggggagatttttttgtagtttttaattggggtgtgggaggggcggggaggttttctataaactgtatcattttctgctgagggtggagtgtcccatccttttaatcaaggtgattgtgattttgactaataaaaaagaatttgtaaaaaaaaaaaaaaaaaaaaaaaaaaaanaagggcggccgctctagaggatccctcgaggggcccaagcttacgcgtgcatgcgacgtcatagctctac

SEQ ID NO: 828 - DNA, 2645 bp, Homo sapiens
  misc_feature (1324)..(1324): n equals a,t,g, or c
  misc_feature (2645)..(2645): n equals a,t,g, or c
tcgacccacgcgtccggtaatcttcaaatatgcgcatggcgagtattatggtctgggtgatgatcatcatggtgattctggtgctgggctacggaatatttcactgctacatggagtactcccgactgcgtggtgaggccggctctgatgtctctttggtggacctcggctttcagacggatttccgggtgtacctgcacttacggcagacctggttggcctttatgatcattctgagtatccttgaagtcattatcatcttgctgctcatctttctccggaagagaattctcatcgcgattgcactcatcaaagaagccagcagggctgtgggatacgtcatgtgctccttgctctacccactggtcaccttcttcttgctgtgcctctgcatcgcctactgggccagcactgctgtcttcctgtccacttccaacgaagcggtctataagatctttgatgacagcccctgcccatttactgcgaaaacctgcaacccagagaccttcccctcctccaatgagtcccgccaatgccccaatgcccgttgccagttcgccttctacggtggtgagtcgggctaccaccgggccctgctgggcctgcagatcttcaatgccttcatgttcttctggttggccaacttcgtgctggcgctgggccaggtcacgctggccggggcctttgcctcctactactgggccctgcgcaagccggacgacctgccggccttcccgctcttctctgcctttggccgggcgctcaggtaccacacaggctccctggcctttggcgcgctcatcctggccattgtgcagatcatccgtgtgatactcgagtacctggatcagcggctgaaagctgcagagaacaagtttgccaagtgcctcatgacctgtctcaaatgctgcttctggtgcctggagaagttcatcaaattccttaataggaatgcctacatcatgattgccatctacggcaccaatttctgcacctcggccaggaatgccttcttcctgctcatgagaaacatcatcagagtggctgtcctggataaagttactgacttcctcttcctgttgggcaaacttctgatcgttggtagtgtggggatcctggctttcttcttcttcacccaccgtatcaggatcgtgcaggatacagcaccacccctcaattattactgggttcctatactgacggtgatcgttggctcctacttgattgcacacggtttcttcagcgtctatggcatgtgtgtggacacgctgttcctctgcttcttggaggacctggagaggaatgacggctcggccgagaggcnttacttcatgtcttccaccctcaagaaactcttgaacaagaccaacaagaaggcagcggagtcctgaaggccccgtgctccccacctctcaaggagtctcatgccgcagggtgctcagtagctgggtctgttcccccagccccttgggctcacctgaagtcctatcactgccgctctgcccctccccatgagccagatcccaccagtttctggacgtggagagtctggggcatctccttcttatgccaaggggcgcttggagttttcatggctgcccctccagactgcgagaaacaagtaaaaacccattggggcctcttgatgtctgggatggcacgtggcccgacctccacaagctccctcatgcttcctgtcccccgcttacacgacaacgggccagaccacgggaaggacggtgtttgtgtctgagggagctgctggccacagtgaacacccacgtttattcctgcctgctccggccaggactgaaccccttctccacacctgaacagttggctcaagggccaccagaagcatttctttattattattattttttaacctggacatgcattaaagggtctattagctttctttccgtctgtctcaacagctgagatggggccgccaaggagtgccttccttttgctccctcctagctgggagtgacgggtgggagtgtgtgtgcccaggtgggggtgtctcctggctgggaaggagggaaagggagggagagttttgcgggggttggcagtggagagcaggctggagaggagatggctaatagctgtttaatggaaacctgctgggctggagggagttaggctgaatttcccgacttcctctgccagttattgacacagctctctttgtaagagaggaaagaaactaaacccacccaagggatgatttcagggggagaggtggagggcagatgtcctgggcaaaccgggcccctctgcccacacacctcacttgatccttttgccaaacttgtcaaactcaggggaactggcttcccagttgcccctttgccatattccaagtccccctcagacttcatgtctctgctcatcagcactgtcccaggatcctggagagggagaacccctggccccaggggaaagaggggggggtctcccgtttcctgtgcctgcaccagccctgcccccattgcgtctgcacacccctgcgtgtaactgcattccaaccactaataaagtgcctattgtacaggtmaaaaaaaaaaaaaaaaaaaaaaaaaaaaaaaaaaaaaaaaaaaaaaaaaaaaaaaaaaaaaaaaaaaaaaaaaggggggggn

SEQ ID NO: 829 - DNA, 1098 bp, Homo sapiens
  misc_feature (74)..(74): n equals a,t,g, or c
  misc_feature (346)..(346): n equals a,t,g, or c
  misc_feature (1085)..(1085): n equals a,t,g, or c
  misc_feature (1093)..(1093): n equals a,t,g, or c
  misc_feature (1095)..(1095): n equals a,t,g, or c
ggcggcccgggagggtgccccgccgccctgccccaccagtgccattggaagggccagcctgagcctccgggacnagggtcggggcctgcgcgatgcaagacgggagaaaaggaggggcgtacgcgggcaagatggaggcgactacggctggtgtgggccggctagaggaagaggcgttgcggcgaaaggaacggctgaaggccctacgggagaaaaccgggcgcaaggwsagaagtgkggagtgagggtcgcagttgaggcgtccagcgttcggggtccgggtcgcgcttgaggagagcaaagggctaataaggaaagacagctgccgagggcgcgcatgccgggncgctaacgcatgcgcgagaagacgggcgccctcccacgatgtctggggctgcttggcgtgggactcctctggcgctggtgcggtcgtcgcgcacgcgcgggggtgggcaargcagtggtcagcgacccgcagtccatctgactcctgcttcccgggtgttgctcgtgtaggtatctagggctgcctgtaggttcagatgcttgttgggttaggcgtgatttgttccgttcctctatggcctagctggtctttaacccccgccttcgattctgagtcagacagactccccagtccggcagcactccttggacagggcagcaagtgatagcagtgggtatacagccggagtcgtttcgtgcaaaaatcaaaaagaggccgggcacggtggctcacgcctgtaatcccagtgctttgggaggccgaggcaggcggatcacttgaggttagtagttcgagaccaggctgggtaacatggtgaaaccccgcctctactaaaaatacaaaaattagccgggcgtggtggtgcgcgcctgtaatcccagcttctcgggaggctatggcaggagaaccgcttgagcctgggaggtcagaggttgtagtgagtccgagatctcgccactgtactccagcctgggcaacagagcgagatccgtctcaaaaaaaaaaaaaaagggcggccgctctagaggattccctcgaggggctcaagttyacgcgtggcatgcgwmgtgcagctgtntgccctgngntgg

SEQ ID NO: 830 - DNA, 1063 bp, Homo sapiens
  misc_feature (23)..(23): n equals a,t,g, or c
  misc_feature (27)..(27): n equals a,t,g, or c
  misc_feature (30)..(30): n equals a,t,g, or c
  misc_feature (1032)..(1032): n equals a,t,g, or c
  misc_feature (1055)..(1056): n equals a,t,g, or c
  misc_feature (1062)..(1062): n equals a,t,g, or c
gttggggggttatgccctttcgntccnttnaaatcgagtcactgatsatgtaatgatatattttttcattattatagtagaatatttttatggcaagatatttgtggtcttgatcatacctattaaaataatgccaaacaccaaatatgaattttatgatgtacactttgtgcttggcattaaaagaaaaaaacacacatcctggaagtctgtaagttgttttttgttactgtaggtcttcaaagttaagagtgtaagtgaaaaatctggaggagaggataatttccactgtgtggaatgtgaatagttaaatgaaaagttatggttatttaatgtaattattacttcaaatcctttggtcactgtgatttcaagcatgttttctttttctcctttatatgactttctctgagttgggcaaagaagaagctgacacaccgtatgttgttagagtcttttatctggtcaggggaaacaaaatcttgacccagctgaacatgtcttcctgagtcagtgcctgaatctttattttttaaattgaatgttccttaaaggttaacatttctaaagcaatattaagaaagactttaaatgttattttggaagacttacgatgcatgtatacaaacgaatagcagataatgatgactagttcacacataaagtccttttaaggagaaaatctaaaatgaaaagtggataaacagaacatttataagtgatcagttaatgcctaagagtgaaagtagttctattgacattcctcaagatatttaatatcaactgcattatgtattatgtctgcttaaatcatttaaaaacggcaaagaattatatagactatgaggtaccttgctgtgtaggaggatgaaaggggagttgatagtctcataaaactaatttggcttcaagtttcatgaatctgtaactagaatttaattttcaccccaataatgttctatatagcctttgctaaagagcaactaataaattaaacctattctttcaaaaaaaaaaaaaagggggggcccnttttaaaggatccaagtttaccnnccccgng

SEQ ID NO: 831 - DNA, 1178 bp, Homo sapiens
  misc_feature (3)..(3): n equals a,t,g, or c
  misc_feature (41)..(41): n equals a,t,g, or c
tcnccccaataatgttctatatagcctttgctaaagagcanctaataaattaaacctattctttctgtgtgtgtgagcgtgcgtttgtgtttggtagtgttcctagggcagaggtggagcagggatgcacttatcatgggaagggaggtagaaaagagaattggatagcctgtgatctttggtggaatttattccttttgcctaggcctttcagaccctgcttgatttccgtaggacacttcaggttgtggcaagggagagctggtctgcaatcggaagtaccagcctcttccctagagcacaactagaaagaagaactatagagtgttataagggaggccctgagatggaaggaccatcacacagaaatgataataacttcatttcagggtgttccaggggaaaagcaggagaaagatttggggctcagtagaaggaaaagcttcctagtgataagagtgattggcaataccatgaggtacctttaaaagatagtgaactcctgtccttggaaatattaaaccacaggctagatatcatttaatagggatgtgaagtagagtaagtcactgcccttggtgtgcaattgtgaacttgtcaatttctgaggtccctttctacttagatatataatacaagatttctattaggtatgggtgctctgatgataatgaaaatcccagcagytatgtatgggatggttacaccagacactgtgctaaggattttctttgaattgtttctcactcaatcttcacggtagctcagtgaggtaggtaccattatcactgstagaaagcagtgaacttatatggtcttactgtggcactgggtccttaaacattatgcaaaactgtgagcaacttttatcggtttgttcttttaagaacataacacagcactctaaaaatagatctaactagattgttcacatctagcgattaaggccaccctgagattatagctgcatcatcaggracccaagatctgaagcattcagtcaaagcctcttggccacctctctttttgtcatggccttcttggacttggagggggagaatggaagcaagtaccaaggagaaagtgttctcagaaaagccacacccattagaaaaatacaaggccagtcgacgcggccgcgaattcccgggtcgacgagctcactagtcggcggccgc

SEQ ID NO: 832 - DNA, 2522 bp, Homo sapiens
gccgctcgacaccagcaccccgcccagagcagtgccgctgcccaaatcctcgcaggcagctcatcaacgcaattgcaactccggctggagccccggacctgcaagcctgggtgtccgtgggtccgtctgcccagccatctgctggtggcacctctccctcctgccgcctccctcggtgaaccccaccttgcagaagtgcagctcgcccggagcagcccaggagctcagcatgcgtcccccaggcttcaggaacttcttgctgctggcgtcctcccttctctttgctgggttgtcagctgttcctcaaagcttctcgccatctctgaggagctggccgggcgccgcctgcaggctgtcccgggccgagtcggagcgacgctgccgcgcacctgggcagcccccgggggccgcgctgtgccacggccggggccgctgcgactgcggcgtctgcatctgccacgtgactgagccgggcatgttcttcgggcccctgtgtgagtgccatgagtgggtgtgcgagacctacgacgggagcacctgtgcaggccatggtaagtgtgactgtggcaagtgcaagtgtgaccagggatggtatggggatgcttgccagtacccaactaactgtgacttgacaaagaagaaaagtaaccaaatgtgcaagaattcacaagacatcatctgctctaatgcaggtacatgtcactgtggcaggtgtaagtgtgataattcagatggaagtggacttgtgtatggtaaattttgtgagtgtgacgatagagaatgcatagacgatgaaacagaagaaatatgtggaggccatgggaagtgttactgtggaaactgctactgcaaggctggttggcatggagataaatgtgaattccagtgcgatatcaccccctgggaaagcaagcgaagatgcacgtctccagatggcaaaatctgcagtagcagagggacttgtgtatgtggtgaatgtacctgtcacgatgttgatccgactggggactggggagatattcatggggacacctgtgaatgtgatgagagggactgtagagctgtctatgaccgatattctgatgacttctgttcaggtcatggacagtgtaattgcggaagatgtgactgcaaagcaggctggtatgggaagaagtgtgagcacccacagtcctgcacgctgtcagctgaggagagcatcaggaagtgccagggaagctcggatctgccttgctctgggaggggtaaatgtgaatgtggcaaatgcacctgctatcctccaggagatcgccgggtgtatggcaagacttgtgagtgtgatgatcgccgctgtgaagacctcgatggtgtggtctgtggaggccacggcacatgttcctgtggtcgctgtgtttgtgagagaggatggtttggaaagctctgccaacatccgcggaagtgtaacatgacggaagaacaaagcaagaatctgtgtgaatcagcagatggcatattgtgctcggggaagggttcttgtcattgtgggaagtgcatttgttctgctgaagagtggtatatttctggggagttctgtgactgtgatgacagagactgcgacaaacatgatggtctcatttgtaccagggaatggaatatgtagctgtggaaactgtgaatgctgggatggatggaatggaaatgcatgtgaaatctggcttggctcagaatatccttaacaattacatgagagaggtctggattcttattttttctgggccattagaacatataaatgcgaaggaaaccatgtatattcaccactaggacaggttaaaaagaccattgtatgtttttctatttctgaattacgaatgaaatccgagtacctattagaaatgagttatgcaaatttagatgcaaataacattagaaaaaaaagattcttccataattaacataagtggttcctaacgagagcaatttttccacccaaaagtcatttggcaacatctacagacaattttgattgtcacactgggtcgggtaggaaggtatgctgcagacatttggtgggtagaggccagggatgctgctgagcatcccgcagtgtacaggacagcccccaaacaaggaattatccagccccaaatgccaatagggctcagactgagaaacattgagttatatggctattagaaatccacattcttacacaagaaagaccatattagaatctaaggaaaacatgcatattcacattaattaatcgatcagatttttccagaattccgtatcagtcaccattttaatatggggacaatgaagacaagcacacaggaggtagaatatcagagtggggctggatcaagggcaaaaactggtcattaagtcatctgacattaaatcatttagccactaagttatttgtctactctcactttaaactcaccaaagaagattctcttaaagaaattatgaaaaatgtacaatttaacattttaaataaatagtgacagaagttgtttataaaaaaaaaaaaaaaa

SEQ ID NO: 833 - DNA, 1637 bp, Homo sapiens
  misc_feature (726)..(728): n equals a,t,g, or c
  misc_feature (899)..(899): n equals a,t,g, or c
  misc_feature (901)..(901): n equals a,t,g, or c
aaatgtgccacgtcttctaagaagggggagtcctgaacttgtctgaagcccttgtccgtaagccttgaactacgttcttaaatctatgaagtcgagggacctttcgctgcttttgtagggacttctttccttgcttcagcaacatgaggcttttcttgtggaacgcggtcttgactctgttcgtcacttctttgattggggctttgatccctgaaccagaagtgaaaattgaagttctccagaagccattcatctgccatcgcaagaccaaaggargggatttgatgttggtccactatgaaggctacttagaaaaggacggctccttatttcactccactcacaaacataacaatggtcagcccatttggtttaccctgggcatcctggaggctctcaaaggttgggaccagggcttgaaaggaatgtgtgtaggagagaagagaaagctcatcattcctcctgctctgggctatggaaaagaaggaaaaggtaaaattcccccagaaagtacactgatatttaatattgatctcctggagattcgaaatggaccaagatcccatgaatcattccaagaaatggatcttaatgatgactggaaactctctaaagatgaggttaaagcatatttaaagaaggagtttgaaaaacatggtgcggtggtgaatgaaagtcatcatgatgctttggtggaggatatttttgataaagaagatgaagacnnntatgggtttatatctgccagagaatttacatataaacacgatgagttatagagatacatctacccttttaatatagcactcatctttcaagagagggcagtcatctttaaagaacattttatttttatacaatgttctttcttgctttgtttaattatttttatatatttntnctgactcctatttaaagaaccccttaggtttctaagtacccatttctttctgataagttattgggaagaaaaagctaattggtctttgaatagaagacttctggacaatttttcactttcacagatatgaagctttgttttactttctcacttataaatttaaaatgttgcaactgggaatataccacgacatgagaccaggttatagcacaaattagcaccctatatttctgcttccctctattttctccaagttagaggtcaacatttgaaaagccttttgcaatagcccaaggcttgctattttcatgttataatgaaatagtttatgtgtaactggctctgagtctctgcttgaggaccagaggaaaatggttgttggacctgacttgttaatggctactgctttactaaggagatgtgcaatgctgaagttagaaacaaggttaatagccaggcatggtggctcatgcctgtaatcccagcactttgggaggctgaggcgggcggatcacctgaggttgggagttcgagaccagcctgaccaacacggagaaaccctatctctactaaaaatacaaaagtagccgggcgtggtgatgcgtgcctgtaatcccagctacccaggaaggctgaggcggcagaatcacttgaacccggaggcggaggttgcggtaagccgagatcacctccagcctggacactctgtctcgaaaaaaaaaaaaaaaaaactcga

SEQ ID NO: 834 - DNA, 1258 bp, Homo sapiens
aaccctcactaaagggaacaaaagctggagctccaccgcggtggcggccgctggctgaccggcctaaaactaaaatgacatttattccctagctacaaacatcagcgttattatgttaattataccttgccctctatcattataaatggttgccatggtgtttctaaaaataagtgttttaccattaatgtgtagagggcaaacaaagcataaagtactaagggatcatgcttatcctagggtctcacagaagagaggacatatttaattaatcttgtgaattacagaacaggttgtggtccagacaccaagaatcataggggtttttttttaaaaaacctaatagaagtagggtgacctctctctttggtctaagagttctaaaggaaggtaggcatctgtttaattagttggttcaccctggctttacctctggttaatgcttgtgttaataggaaggaaaaatcactttatcttttcttccaagcccctccctgcctgacttacccagactgggattaccagataccaggtgatttatgtggagatgatttttcacctttaaactctaagccaagtgtaagaaactcttgatagctatgtctattttatatcagtcactgagacttttttttaagtttttatttattattaagacaactttgccaaaaaagtcccctaagcacaactatttacatttctttatagcctcttctgatctctaacacatatgcagttttaactgttattttcatagtaactgatcttttgtctaaggatttttacctgaaagcacaatgtattgagtctcttgaaaatcatctttcagatctttttacagaatgaacttatgcactgctactgtagtattctcaaggaatatatgtaaacacaaatgtatgcctgaggttggtttttgcagaaaacagtctctgcttctaaaaacttctatgtctagtcttccataggaaatcctcactgtttaaccatgtgaggagcctaagtcattaaacggatcatgtctgtacattgtgtaatgaatgaaaagcacataaatgtaatctactttgaactttgtaaaaatgatgtgtggaggctattcttgtttctccatctcaagtcctgtgtgtgcacgtgtgtgcaagtgcacatgtgtgtgtgtaataacacattgtaaagaacagaaattactttaaaaaataaacagaaatggagacctgaaaaaaaaaaaaaaaaaaaaaaaaaaaaaaaaaaaaaa

SEQ ID NO: 835 - DNA, 2527 bp, Homo sapiens; identical to SEQ ID NO: 447

SEQ ID NO: 836 - DNA, 1971 bp, Homo sapiens
tgtaagaaggctcatgccattgaccctcttaattctctcctgtttggcggagctgacaatggcggaggctgaaggcaatgcaagctgcacagtcagtctagggggtgccaatatggcagagacccacaaagccatgatcctgcaactcaatcccagtgagaactgcacctggacaatagaaagaccagaaaacaaaagcatcagaattatcttttcctatgtccagcttgatccagatggaagctgtgaaagtgaaaacattaaagtctttgacggaacctccagcaatgggcctctgctagggcaagtctgcagtaaaaacgactatgttcctgtatttgaatcatcatccagtacattgacgtttcaaatagttactgactcagcaagaattcaaagaactgtctttgtcttctactacttcttctctcctaacatctctattccaaactgtggcggttacctggataccttggaaggatccttcaccagccccaattacccaaagccgcatcctgagctggcttattgtgtgtggcacatacaagtggagaaagattacaagataaaactaaacttcaaagagattttcctagaaatagacaaacagtgcaaatttgattttcttgccatctatgatggcccctccaccaactctggcctgattggacaagtctgtggccgtgtgactcccaccttcgaatcgtcatcaaactctctgactgtcgtgttgtctacagattatgccaattcttaccggggattttctgcttcctacacctcaatttatgcagaaaacatcaacactacatctttaacttgctcttctgacaggatgagagttattataagcaaatcctacctagaggcttttaactctaatgggaataacttgcaactaaaagacccaacttggcagaccaaaattatcaaatgttgtggaattttctgtccctcttaatggatgtggtacaatcagaaaggtagaagatcagtcaattacttacaccaatataatcaccttttctgcatcctcaacttctgaagtgatcacccgtcagaaacaactccagattattgtgaagtgtgaaatgggacataattctacagtggagataatatacataacagaagatgatgtaatacaaagtcaaaatgcactgggcaaatataacaccagcatggctctttttgaatccaattcatttgaaaagactatacttgaatcaccatattatgtggatttgaaccaaactctttttgttcaagttagtctgcacacctcagatccaaatttggtggtgtttcttgatacctgtagagcctctcccacctctgactttgcatctccaacctacgacctaatcaagagtggatgtagtcgagatgaaacttgtaaggtgtatcccttatttggacactatgggagattccagtttaatgcctttaaattcttgagaagtatgagctctgtgtatctgcagtgtaaagttttgatatgtgatagcagtgaccaccagtctcgctgcaatcaaggttgtgtctccagaagcaaacgagacatttcttcatataaatggaaaacagattccatcataggacccattcgtctgaaaagggatcgaagtgcaagtggcaattcaggatttcagcatgaaacacatgcggaagaaactccaaaccagcctttcaacagtgtgcatctgttttccttcatggttctagctctgaatgtggtgactgtagcgacaatcacagtgaggcattttgtaaatcaacgggcagactacaaataccagaagctgcagaactattaactaacaggtccaaccctaagtgagacatgtttctccaggatgccaaaggaaatgctacctcgtggctacacatattatgaataaatgaggaagggcctgaaagtgacacacaggcctgcaaaaaaaaaaaaaaaaaaaaaaaaaaaaaaaaaaa

SEQ ID NO: 837 - DNA, 2081 bp, Homo sapiens
ttattcggaattaaccctcactaaaggcaacaaagctgggagctccaccgcggtggcggccgctctagaactagtggatcccccgggctgcagggaattcggcacgagcttgtaagaaggctcatgccattgaccctcttaattctctcctgtttggcggactggacaatggcggaggctgaaggcaatgcaagctgcacagtcagtctagggggtgccaatatggcagagacccacaaagccatgatcctgcaactcaatcccagtgagaactgcacctggacaatagaaagaccagaaaacaaaagcatcagaattatcttttcctatgtcccagcttgatccagatggaagctgtgaaagtgaaaacattaaagtctttgacggaacctccagcaatgggcctctgctagggcaagtctgcagtaaaaacgactatgttcctgtatttgaatcatcatccagtacattgacgtttcaaatagttactgactcagcaagaattcaaagaactgtctttgtcttctactacttcttctctcctaacatctctattccaaactgtggcggttacctggataccttggaaggatccttcaccagccccaattacccaaagccgcatcctgagctggcttattgtgtgtggcacatacaagtggagaaagattacaagataaaactaaacttcaaagagattttcctagaaatagacaaacagtgcaaatttgattttcttgccatctatgatggcccctccaccaactctggcctgattggacaagtctgtggccgtgtgactcccaccttcgaatcgtcatcaaactctctgactgtcgtgttgtctacagattatgccaattcttaccggggattttctgcttcctacacctcaatttatgcagaaaacatcaacactacatctttaacttgctcttctgacaggatgagagttattataagcaaatcctacctagaggcttttaactctaatgggaataacttgcaactaaaagacccaacttggcagaccaaaattatcaaatggtgggggaattttctggtcctcttaatggatgtggtacattcagaaaggtagaaagttcagtcaattccttccaccaatataatccctttttctgcatcctcaacttctaaagtgatcacccgtcagaaacaactccagattattgtgaagtgtaatggacataattctacagtggagataatatacataacagaagatgatgtaatacaaagtcaaaatgcactgggcaaatataacaccagcatggctctttttgaatccaattcatttgaaaagactatacttgaatcaccatattatgtggatttgaaccaaactctttttgttcaagttagtctgcacacctcagatccaaatttggtggtgtttcttgatacctgtagagcctctcccacctctgactttgcatctccaacctacgacctaatcaagagtggatgtagtcgagatgaaacttgtaaggtgtatcccttatttggacactatgggagattccagtttaatgcctttaaattcttgagaagtatgagctctgtgtatctgcagtgtaaagttttgatatgtgatagcagtgaccaccagtctcgctgcaatcaaggttgtgtctccagaagcaaacgagacatttcttcatataaatggaaaacagattccatcataggacccattcgtctgaaaagggatcgaagtgcaagtggcaattcaggatttcagcatgaaacacatgcggaagaaactccaaaccagcctttcaacagtgtgcatctgttttccttcatggttctagctctgaatgtggtgactgtagcgacaatcacagtgaggcattttgtaaatcaacgggcagactacaaataccagaagctgcagaactattaactaacaggtccaaccctaagtgagacatgtttctccaggatgccaaaggaaatgctacctcgtggctacacatattatgaataaatgaggaagggcctgaaagtgacacacaggcctgcaaaaaaaaaaaaaaaaaaaaaaaaaaaaaaaaaaa

SEQ ID NO: 838 - DNA, 2361 bp, Homo sapiens
  misc_feature (1891)..(1891): n equals a,t,g, or c
  misc_feature (2356)..(2356): n equals a,t,g, or c
ggcacgagctcgagtttttttttttttttttttctatttttgccagactcttgatactcttaaaacttgtttgtggtcagcacaacaaggaacaaaacaaagctttgaaaaaactttaacatgaaaaaacgcactgacatttttttttatttaatatagcctggactttacctgcgtatgcacatgctcagaattgtctactaggctgactatgtatcacctcttcagcttggatccaattgtggatttatttacaaacatcaaatgccttcaagccaatcctttttgctgtatgttttgcagcctactgtagtagatacgcaacagatawtgtgggaaaaaaagagataagaggaggaagctaataagagactgtcaagattgtataccttcttggtttcttttaagaatttgttgcctttctactattacagcaaagcagcattttgttactgactgcctaaaatcacttaatctcaggtgaacgcatcacttgccaaactgttggaatgctatttgtgttttgttgcactgtttttttcgtttgtttgtttgtttatttggttggctttttggagagggaaatttggaaacgggacatacacaaaagttacacacccacattccctttttatcatgacatacaagaagaaactagcagagctaagaatggagtgaagaaaggcagtatggcaggcaccagcaaagagttgagggctgttgctcttaaaaattattttttttattattattttgaaagtatggaagttttccattcactggggaaaggagggaaaagtgcatttatttttatacagagttacttaattacctccaaaacacatatgttggaaatcgcttttgctggtgcaaagtatattaatgagcaggaatacatacattgaggttatgaatagagagctcaatttgtacctttgctgtcttgctcaagcttggtatggcatgaaaactcgactttattccaaaagtaacttcaaaatttaaaatactagaacgtttgctgcgataaatcttttggatttttgtgtttttctaatgagaatactgtttttcattacctaaagaacaatttgctaaacatgagaaatcactcactttgattatgtatagattacataggaagaacaatcacatcagtaagttatagtttatattaaaggtaattttctgttggctcataacaaatataccagcattcatgatagcatttcagcattttccaaggtaccaagtgtacttattttgttgttgttgttgttgttgtattttagaaggaattcagctctgatgtttttaaagaaaaccagcatctctgatgttgcaacatacgtgtaaaatgggtgttacatctatcctgccatttaaccccacagttaataaagtggctgaaaataatagtagctctggcttggtgcttgacctggttaaatactgtcttaaagctcatacaaaacaaataggcttttccataagtggcctttaagaaaacatggaagacaattcatgtttgacaaatgctgacagggtgaagaaagcccagtgtaaaaatgaatcgcgttttaagtgattcggttaaagagtttgggctcccgtagcaaactaatactagataataaggaaatgggggtgaaatatttttttattgttgaatcattttgtgaatgtccccctcaaaaaaagctaatggaatatttggcataaagggcatttggtggttttatttttgtttgagggggwttgtcagaaaatcccttttctctcttacgyctaactgactagggaacaattgttgatatgcatagcattgggaatacttgtcattatatactcttacaaataacacatgaagcaagaatgaccaatattctgnataattgggcactgggatcacaaaatgtgataaaactttaaatgtataaaactttatcaaataaagttttattttcccctttaaaatgtatttctttagaggcattacttttttaaaaatattggtcaattcctgacataagatgtgaggttcacagttgtattccagtattcaagatagattcctgatttttcaattaggaaaagtaaaatccaaaatgttagcaaaacaaagtgcaatattaaatgtttgctttatagattatattctatggctgtttgtaatttctctttttttccttttttatttggtgctgaatatgtccttgtaggctctgttttaagaaaacaatatgtgggaaatgatttaatttttcctattgctcttccttgtggaaaataaagtgttttgtttttttctgttttgtaaaaaaaaaaaaaaaaaaaaaaaaaaaaaaaaaagaangagaa

SEQ ID NO: 839 - DNA, 510 bp, Homo sapiens
gcacagactctcctggccccctgtccttttggaaagaagacagggatgaaatataatcaagcaattaaccacccccatcatcaccaagaacaacagtatcaacaagaagaacagggacaacaaaacccacggatgaaacattcctttctcagctcagatcttatctggtgcgttctctctctgctctgtcttggtgtgtggtttagagaaacatggacaacgctgtttggaagaacagggcttcccaggaatcaacaatgcccaagaaggaagggattgtagaaatagcttaaccctttcatttaccaacgtggaaattgaagcccagggaagggaagggaccggtcgtggaagggagagccatcagcagaaagagaccctgagatcttcgcctgggattcccaggaagtccagcccgagctgattcacagaataaatgcatgcaaaccttgctatcaataaattacacatgcacttacgtaaaacmcaaaaaaaaaaaaaaaaaaaaaa

SEQ ID NO: 840 - DNA, 1739 bp, Homo sapiens
ggcacgagagatcctcaggatatctttagccaaaggaaaagctccgcattcccacctggggggaaagctggattgccatgggcacgaatagtggtgcagagtccctggccatcctgaatatccagaatggtgtttctgaagttcttctgcatgagtttcttctgccacctgtgtcaaggctacttcgatggccccctctacccagagatgtccaatgggactctgcaccactacttcgtgcccgatggggactatgaggagaacgatgaccccgagaagtgccagctgctcttcagggtgagtgaccacaggcgctgctcccagggggaggggagccaggttggcagcctgctgagcctcaccctgcgggaggagttcaccgtgctgggccaccaggtggaaggatgctgggcgcgtgctggagggcatcagcaaaagcatctcctacgacctagacggggaagagagctatggcaagtacctgcggcgggagtcccaccagatcgggggatgcctactccaactcggacaaatccctcactgagctggagagcaagttcaagcagggccaggaacaggacagccggcaggagagcaggctcaacgaggactttctgggaatgctggtccacaccaggtccctgctgaaggagacactggacatctctgtggggctcagggacaaatacgagctgctggccctcaccattaggaccatgggacccgactagtcggctgaaaaatgattatcttaaagtataggtggaaggatacaaatgcttagaaagagggaatcaaatcagccccgttttggaaggtgggggacagaaaatggggctacatttcccccatacctactatttttttatatcccgatttgcactttgagaatacatctaaggtcatctttcaaaagagaaaaattggacacttgagtgactttgtttttagttttgtttttgaacattatttatgtgattgttatggaattgtcacctggaaagaacaattttaagcaatgtcatttctagatgggtttctaattctgcagagacacccgtttcagccacatctaaaagagcacagtttatgtggtgcggaattaaacttccccatcctgcagattatgtggaaatacccaaagataatagtgcatagctcctttcagcctctagccttcactcctgggctccaaaagctatcccagttgcctgtttttcaaatgaggttcaaggtgctgctttgcatgcctgccaacccatggaagttgtttcttacttcttttctctcttatttattaaccatggtctgagagttgtttttgttctatgtaacagtattgccacaaaactataggcaaatcgtgtttgcagggagatttctgatgcctctgtgggtgtgtgtaagttaaagtggccacatttaagaaggccaagctttgtagtggttgcacagtcacactgatatgctgatttgctctttctcattgtatgtctatgctttgtcatcagtgctatagtaaattacaaagaaataggtagattgtatgaacatacccacaaatgcctatgatttaggttaccaatgtattctttctcatttggggttttgcttctgtctgtctgtttattggaaacttgtacttcaagtagggggaatcctaattctaataactccttagctaagttttattattcaggcaataaacatgttttcatgtaaaaaaaaaaaaaaaaaaa

SEQ ID NO: 841 - DNA, 438 bp, Homo sapiens
  misc_feature (61)..(61): n equals a,t,g, or c
  misc_feature (351)..(351): n equals a,t,g, or c
  misc_feature (436)..(436): n equals a,t,g, or c
ggtcactcctaatgtaggatgggacgattgccccaagctctgtcgtgagtggttgattganggttttcttaagggaacaatgctgggaaagatgataggcgcccgccactgacccctcccgcctccctgcccctccagtaaactcccacacaaaatagcagtatgaggtgtggggaaataatcttggcctccgtcctgggtttacttttgactctgccacctacaagctgtcacctgaacaagtcctttccgttcctgtgtcttccctggtcacaagctctaagcctgaacccacactctgggaatgaagcagggtagcggcctctgcttcagcaactctgaggggtctancttgggtggggagttggcctcatccagaaggctgctggaaggccaagacaaggctctggtggggaagtgttctgagaagggattnct

SEQ ID NO: 842 - DNA, 538 bp, Homo sapiens
  misc_feature (462)..(462): n equals a,t,g, or c
  misc_feature (498)..(498): n equals a,t,g, or c
  misc_feature (520)..(520): n equals a,t,g, or c
gcttgtaggtactcattgaggtttattgtgtaagatgaatgaatgttgcaaattcctaaacatgtgattcagatgcccaatcttactctgttactttatgaaaattttttaaagctatatgatgttatatcaaaatatgttgttatactttaggataatcggtgtgttagccctgaatttcagcataagtcccatttttttccatgggagtctaggaaagctatatgtttattcagcagcaaaatacagtttggaacttaaataaactattgatcaattctggtcttatgctagaaggaataaagcatcaagaaaaagaaaagattgctgtcaagaccaggaaaattgacaatagagtattagaatgcagaaatgaggggaagtggaaargccascaagtaggagagaaaaagtgcagggacagtagaaagtgaatgtaggagcttctgacccagcactcangaacgcaattcatccctaaaaagctgttgcgtctangttgccagtaaccaattaaaanccgtttgaagtagagtga

SEQ ID NO: 843 - DNA, 1346 bp, Homo sapiens
  misc_feature (5)..(5): n equals a,t,g, or c
  misc_feature (17)..(17): n equals a,t,g, or c
  misc_feature (21)..(21): n equals a,t,g, or c
  misc_feature (36)..(36): n equals a,t,g, or c
  misc_feature (107)..(107): n equals a,t,g, or c
  misc_feature (150)..(150): n equals a,t,g, or c
  misc_feature (323)..(323): n equals a,t,g, or c
  misc_feature (1307)..(1307): n equals a,t,g, or c
  misc_feature (1337)..(1337): n equals a,t,g, or c
  misc_feature (1341)..(1341): n equals a,t,g, or c
  misc_feature (1343)..(1343): n equals a,t,g, or c
tcccntcaaggccgggnggcntgttcttggcctttncaacttttgcctttccactatttagaatgcaggtgtgtctgtcctgcaacccagcttctggctctggaaanccagctgcatcacccatgtgcctggaccttctccagaccatgnaggcccaggcgagtgactcactgccattcagtctccatctttgggcagatccaccatgagacataacttcccagaaatccagttacaaggaggaataagtattgaagacttaagaaatgcattttgcagcaggtcctcgctgtactggggcagcggtccattcatagagcccngctagaatagaggtcacaagctcagaagcttctctaaggcaggcaggaaatttaagtcgatactatgatctgcattgtgggctggaatgaacggaaggtgcctagtctaaacagctgcttgttgctcagctgttgttgccgtattgggaattcaagcctaatgatgtttggtattcccattttcaaaagaagtcaggaaatgcagatttctatgtaaatttttaaaacttctgaactgtgtatgagccatacaaaatacatttgcaggccagtcgacatcctctgatccagaatatcaatttgtgagacaagttgttggtgaggcagcattmcatagtagttaaaagcatacattttagagccagactgcccatgtccaaaccctggtcccatcactcactmccttycatttcacttctctttgcttcactttcctcatcagtaaaataaaaataatatcagtacctacctcatagggtttcatgagcattaaataaattaaaacccataaagtactttcaatgctatcaggcatttagttacatggtaaataagtgtttaaaacatttaaaacaaaagttcaaagataataarcaaggaaacagaaaacctgacaggccagctttggaaccttcttgatggcagatctatcaacatttctccctttggctgggatgaaaaggcatttgggaataaaagatcccataaaaataaatgagaagaagtgaaacaccttcattatggcaattttggtgtcagagcctaaaagacagagggatcaaaatattgcagtactaaaatctgatggtttcatgtagaaatgagatttaagcttattaaaatgtatttctttctggtgttaataacccttcacaagacctgggcaattttgaaagaaggaaagaaaatggttctccctgtggacaaraagaaacaaatgactattaaattttctaatttggagtgaactagggkgrttccccnagtttatgtgggaaggtttcagtgagggtngtangngaa

SEQ ID NO: 844 - DNA, 912 bp, Homo sapiens
  misc_feature (36)..(36): n equals a,t,g, or c
  misc_feature (93)..(93): n equals a,t,g, or c
  misc_feature (158)..(158): n equals a,t,g, or c
  misc_feature (592)..(592): n equals a,t,g, or c
aaaatggttctccctgtggcaagaagaaccaaatgnctattaaattttctaatttggagtgaactaagttgatccctaggtttttgtgggagnccggggtgggggagtccagtggaaagcaattgctggagagtagtccttgttctttgctgacagancaggagcagagtgtggaatgaaaactcaatagcctcctctattctcaagagacaattgacttccatctgtttaaacctccccaggggaccctgctccccccatttccatttactctcctttccaccaacctagggtgacattaagaaaaccaaacccatttgaaacacaagctcttacacatcaaaagtcaggggagaagtctggttgacctgtaagccactgcatgaggcacaaagatgcaaaaaggaactttcaggaacaactgctgctccgaggactctatgtcagatataacatccgctttggcccaaaagtaggcttgagccccagaagaggaggaatgtcmagtatgtttaaaatgtgaaacctttagttatacttgctctttactcagaaaggagagagtattcccttatgccaacgaggtctctgngagttgtttgcactattggtagcaggtgctgcctggggtagctcttatggtctgtgcttgaagtgtgcaccagctgctgccctggacatgactgttggtccctgcatacaagcagccacctttaaacagatcaaatgactcttatgatgacagctgtctcactrtactttcaaactggttttaatttggttacttgcaacctaagacagcaracagcattttagggatgaattgcgttcctgaagtgcatgggtcagaaagctcmtacattcactttytactgtccctgcactttttctatcctacttgctgcccttcca

SEQ ID NO: 845 - DNA, 995 bp, Homo sapiens
  misc_feature (12)..(12): n equals a,t,g, or c
  misc_feature (925)..(925): n equals a,t,g, or c
  misc_feature (953)..(953): n equals a,t,g, or c
agggtcaagggnagagacccaggtcctgacagcactccctgaccatgcccccatttctccccagggttccacctgagtgctacagtggtgccacctcagatggtccctcctaaaggggcctacaacgtggctgtgatgtttgaccgctgccgggtcacttcctgcagctgtacctgtggggctggggccaaatggtgcacccacgtcgtggcactctgtctcttccgcatccacaacgcttctgcagtctgcctgcgagccccagtctcagagtccctgtcccggctacagagggaccagctgcaaaagtttgctcagtacctcatcagtgagctccctcagcaggtgggtgaggtcggcaccccctcctgcaattagctccgggccaggccgcataacagccttcctgttaggcccaggcctccatgggttcacctaggccgtgttctgcctgcctccgtctctttctccctcagatcctccccacagctcagcgtctcctggackaactcctgtyttcccagtcaacagccatcaatacagtgtgtggagctccggaccccacagcagggccctcagcatcggaccagagtacttggtatctggatgaatcgacactcactgacaacatcaaaaagacactgcacaagttctgtggcccctyccctgtggtcttcagtgatgtgaactccatgtatctgtcttccacggagccgccagccgctgctgaatgggcatgtctgctgcgccctctgaggggccgtgagccagagggcgtctggaacctgctaagcattgtgcgggagatgttcaagcggagggacagcaatgctgcccccttgttggaaatcctcactgaccagtgcctcacctatgaacagataacaggttggtggkatagcgtacgtacctcagcctcacacancagtgccagtgggcacacggggccgttncaacgggcaatcagaagtggcaacccatgcctgtgccacatt

SEQ ID NO: 846 - DNA, 751 bp, Homo sapiens
  misc_feature (146)..(146): n equals a,t,g, or c
tccctcggggtccaaagtgagatgagtaccatgcggtgccggccagaggaacttcggaaggggacactctgtgactatcggcttgtgttgcctctcatgctggccagtttcatctttgacgttctctgtgctccaggtatgatgcntgaccctacagtaagtggggaactggggtaggggtagctttctctaagaaagaccaagagccccaagtttctgaatcacctttaggacccatcaggcagcttcatgggtaggtctgtgatgatgaggattttgggttcccctgtattttttcccatgcatgatacttctgtctgcctgacttaccccaacttttatacagtggtttctcccacaggttcccggcccccaagtcgcaactggaacagcgagacacctggggatgaggagcttggatttgaagcagcagttgctgccttgggcatgaagacaacagtgagcgaggcagaacatcccctcttatgtgaaggcacacgtcgggagaagggtgacctggcattagcactaatgatcacttacaaggacgaccaggccaagcttaagaagaaaattagccgggcatggtggcgcgcgcctgtagtcccagctactcgggaggctgaggtgggagaattgcttgagcccaggagtttgaggctacagtgagctataatcataccactgcactccagcctgggcaacagagcgagaccctgtctcttaaaaaaaaaaaaaaaagaaaactcga

SEQ ID NO: 847 - DNA, 1823 bp, Homo sapiens
ggcacgaggtcttgtgccaggcactgggatatggtgccgaattggatacaagggagatgggacgtcctcctgtgtgtcttgactgtcggtgtgttgccgagcattggtagcagagggggctggtttggcacccaggtaccctgcctcatccccggggccttggccagtctacacagaggaactgccctccagctgagttacccattttccatggcagggaggacagcagaaaggccgtgttccatgactaatcatagcttccatctattgagcatttactgggagctgggcactgtgctaagtgtgaaacgtgtgttgactcatttactacaacaacctggcaaggcagttcttccgttagcccctgctcaaagctaggggacctggagcacaggcggtcaagtgcttggctcaaggcacacagctcaaagtgcagatcctctgcccctcctggcatcccagtctgggggggtcaggggtgggatctctgcagtcagtgcctgggggctggatgacaagctgcagcctccccgcaaccccacgatttccatagcgcagtggagccagaaagaaacagaccattttacagaccagagaaacaaggttgctgctctctcagaccctggagccagtgacagggaaggcggagaagggacgagagcctccgtttattcggagcctgtgtataccctccttttcacaaactgtagcagcctccagaggcaggggggatctttatgatgaccaaatggggaggcttagggattggaaatcacttgcccgggagcgtgtggttggtaccactgggatttgagccttgttccgtccagctccagagcttggtgcctttcttgctcaccacgtgccggccccagctcgttgccttggcagtggaggtggtggtgtgccgaggccttcctgcaccctgggttctctggcgctgagaaataagtgcatgggcaaagtggctttgtttccaggtcagtgactgtgaccccatgtgtacacatctgtgcatctgaccgtggcattgtaacccaggggcattttctaagtgatgtgctgggggtgtgggcagggagtggggcttatggagccgacgagacaccatcagaccatagagaggctgcccaggcttgggagccatatggacctggatttgaccttgaacaggtcatttcacctgagtgtgtatagtgggaatgataacatccggctcacagaactgtggtgagaattagagatggtgggtgtcgaatgattagcacctaatcagcattttacaataaatgcaaattcttcccttctcgtagaagagtggagtctgatgagagagacagggaagtgaaaattcacagcccctggatgccagtgctgaaggagtgggttcaggactgggaacatcagaatgggcatagtgacttattctggggaagtcatgaaaagctccctggaggaggtgatgaaggggtacccaagcctggaagaggctggcagtggtactccagaaacttcatggtggcctgcaatttgtgatgcagatttttcctcactgtgagatgctggttgagacaatttcctccttggagtggcctggttttttaggggtagggggagtgcccacgtgggtgtagtttctagacagaagcagtgggaggagggcactgccaagcatgctgcttgggattatgggtgtccacagagctgcagtttctccaaaggtgttttttgtttgtttttgagacagggtcacactctgtcacccaggatggagtgcagtggcccgatcctagctcactgcaaccttgaactactaggctcga

SEQ ID NO: 848 - DNA, 1964 bp, Homo sapiens
  misc_feature (49)..(49): n equals a,t,g, or c
ttcctttagttcgggtgtagtggggatgtacgatacattcccagaacantagccatatcgcaagtgattacctcataaggacaaactgagtcacgcggtgcgccgtctagaactagtggatcccccgkctgyaggaattcggcacgagtcttgtgccaggcactgggatatggtgccgaattggatacaagggagatgggacgtcctcctgtgtgtcttgactgtcggtgtgttgccgagcattggtagcagagggggctggtttggcacccaggtaccctgcctcatccccggggccttggccagtctacacagaggaactgccctccagctgagttacccattttccatggcagggaggacagcagaaaggccgtgttccatgactaatcatagcttccatctattgagcatttactgggagctgggcactgtgctaagtgtgaaacgtgtgttgactcatttactacaacaacctggcaaggcaggttcttccgttagcccctgctcaaagctaggggacctggagcacaggcggtcaagtgcttggctcaaggcacacagctcagaagtgcagatcctctgcccctcctggcatcccagtctgggggggtcaggggtgggatctctgcagtcagtgcctgggggctggatgacaagctgcagcctccccgcaaccccacgatttccatagcgcagtggagccagaaagaaacagaccattttacagaccagagaaacaaggttgctgctctctcagaccctggagccagtgacagggaaggcggakaagggacgagagyctccgtttattcggagcctgtgtataccctccttttcacaaactgtagcagcctccagaggcaggggggatctttatgatgaccaaatggggaggcttagggattggaaatcacttgcccgggagcgtgtggttggtaccactgggatttgagccttgttccgtccagctccagagcttggtgcctttcttgctcaccacgtgccggccccagctcgttgccttggcagtggaggtggtggtgtgccgaggccttcctgcaccctgggttctctggcgctgagaaataagtgcatgggcaaagtggctttgtttccaggtcagtgactgtgaccccatgtgtacacatctgtgcatctgaccgtggcattgtaacccaggggcattttctaagtgatgtgctgggggtgtgggcagggagtggggcttatggagccgacgagacaccatcagaccatagagaggctgcccaggcttgggagccatatggacctggatttgaccttgaacaggtcatttcacctgagtgtgtatagtgggaatgataacatccggctcacagaactgtggtgagaattagagatggtgggtgtcgaatgattagcacctaatcagcattttacaataatgcaaattcttcccttctcgtagaagagtggagtctgatgagagagacagggaagtgaaaattcacagcccctggatgccagtgctgaaggagtgggttcaggactgggaacatcagaatgggcatagtgacttattctggggaagtcatgaaaagctccctggaggaggtgatgaaggggtacccaagcctggaagaggctggcagtggtactccagaaacttcatggtggcctgcaatttgtgatgcagatttttcctcactgtgagatgctggttgagacaatttcctccttggagtggcctggttttttaggggtagggggagtgcccacgtgggtgtagtttctagacagaagcagtgggaggagggcactgccaagcatgctgcttgggattatgggtgtccacagagctgcagtttctccaaaggtgttttttgtttgtttttgagacagggtcacactctgtcacccaggatggagtgcagtggcccgatcctagctcactgcaaccttgaactactaggctcgag

SEQ ID NO: 849 - DNA, 769 bp, Homo sapiens
  misc_feature (483)..(483): n equals a,t,g, or c
  misc_feature (667)..(667): n equals a,t,g, or c
  misc_feature (697)..(697): n equals a,t,g, or c
  misc_feature (708)..(708): n equals a,t,g, or c
  misc_feature (723)..(723): n equals a,t,g, or c
caccgcggtggcggccgctctagaactagtggatcccccgkctgyaggaattcggcacgaggtcttgtgccaggcactgggatatggtgccgaattggatacaagggagatgggacgtcctcctgtgtgtcttgactgtcggtgtgttgccgagcattggtagcagagggggctggtttggcacccaggtaccctgcctcatccccggggccttggccagtctacacagaggaactgccctccagctgagttacccattttccatggcagggaggacagcagaaaggccgtgttccatgactaatcatagcttccatctattgagcatttactgggarctgggcactgtgctaagtgkgaaacgtgtgttgactcatttactacaacaacctggcaaggcaggttcttccgttagcccctgctcaaagctaggggacctggagcacaggcggtcaagtgcttggctcaaggcacacagctcanaagtgcagatcctctgcccctcctggcatcccagtctgggggggtcaggggtgggatctctgcagtcagtgcctgggggctggatgacaaagctgcarccttcccgcamccccacgatttccatagcgcaatggagccagaaagaaacagaccattttacagaccagagaaacaagggtgctgntctcttaaaccctggagccagtgacagggnaaagccggaanaaaggaccaagaagnctccggttaattcggagcctggggaaacccttccttttacaaactg

SEQ ID NO: 850 - DNA, 818 bp, Homo sapiens
  misc_feature (68)..(69): n equals a,t,g, or c
  misc_feature (82)..(82): n equals a,t,g, or c
ctgtgcatctgacccgtggcattttaaccccaggggccatttttctaagtgatgtgctggggttgtgnncagggagtgggcnttatggacccgacgagacaccatcagacccatagagaggctgcccaggcttgggagccatatggacctggatttgaccttgaacaggtcatttcacctgagtgtgtatagtgggaatgataacatccggctcacagaactgtggtgagaattagagatggtgggtgtcgaatgattagcacctaatcagcattttacaataatgcaaattcttcccttctcgtagaagagtggagtctgatgagagagacagggaagtgaaaattcacagcccctggatgccagtgctgaaggagtgggttcaggactgggaacatcagaatgggcatagtgacttattctggggaagtcatgaaaagctccctggaggaggtgatgaaggggtacccaagcctggaagaggctggcagtggtactccagaaacttcatggtggcctgcaatttgtgatgcagatttttcctcactgtgagatgctggttgagacaatttcctccttggagtggcctggttttttaggggtagggggagtgcccacgtgggtgtagtttctagacagaagcagtgggaggagggcactgccaagcatgctgcttgggattatgggtgtccacagagctgcagtttctccaaaggtgttttttgtttgtttttgagacagggtcacactctgtcacccaggatggagtgcagtggcccgatcctagctcactgcaaccttgaactactaggctcgag

SEQ ID NO: 851 - DNA, 2052 bp, Homo sapiens
  misc_feature (2045)..(2045): n equals a,t,g, or c
tttgcttttcaaatgctcccaaggtctcagatgaagcggtgaaaaaagattcagagttggataagcacttggaatcacgggttgaagagattatggagaagtctggcgaggaaggaatgcctgatcttgcccatgtcatgcgcatcttgtctgcagaaaatatcccaaatttgcctcctgggggaggtcttgctggcaascgtaatgttattgaagctgtttatagtagactgaatccacatagagaaagtgatgggggtgctggagatctagaagacccatggtagccttaaaaaccttctaaaatgcttttrattctgaaaattgggggaaaaaacttttaatcacaattttcttcaatacaaggggaaaatattcttgcggattcccaacgttttgtgatatgagcagaaaatcattagcatttcccatcatttgttcatatttgtgttttctgacagttgccacttgtagcattgcctgtactacagtattttttgccaacctcaggcatactcgttacatctgtattgaactttcggccctagaaaccagtggagttatttcaccacaaatcaacaatgtgcctgaggtgcatgggaaatatagttagctatactctgaaaatacattatgttttttttctttaaacaaaacacacaacatgtaagcatgtaagagtaaagaattgtatgatatgttccttttttcagttcaccaagttggaagccttttgcagctctgtggcttggaatttcatttgagcaatttctataggatatgtatttattattgattgttatttaawttttttcccaattttacctgtattaccaaactgggttctccaataatgtccaaattgtaatgttgccttgcttcaagataaagtgtatttgggaataatattataaacccttacaaattttatgcatgtatctactgcatccttcaactctcactagaaaatcttttgaaaccaaatggattaatttatggctatttataatttgctttgacatctcactgttggaaattttttaaagatgagatttgcctttataatgtaaattgtgatttttgttttacatgtgggtttctatagttttaattttttcagcttttaagatacgagttttgtgtaatttggtatttttaatcatttatgttattttaaaagctcagaatatcacattgaaattactataaatacatttaaaattatctattttagatctaaggaaatactacagagatattttcatgggttcagtaacttttcattttataacattgggcacggtacagagtgattgtcacataaggtacttgaagatttattagtttaattctatttttacagtaaccttgaattcttctgagttttgcatgtattaaattcaattaatgctgaacatgaagagtaaagtatttatctgaaagaagtttctgggttaggagaagtaatgaatgtatccatttgtacatggtttacatgttgtggatgctttgtaaacattttcctgtatgtttaaattgtgtttcagcaggatgtaattgcccttgtgtgtagttaaaatgagtcatcatctggtcctttgtgaaatggaattcatggtattttctgtaacgttttcctgaagctgtttctggagagccacacatttaaatacagacagctttcctgatcatttgatttattgtgcacctgatttttggtctaaaaggaattattgccacaatatattttatttattctttagattttagccttgtaagttaaagtgctttacatgatgatgtgaaaagctgtttgtccctttactgggtttggggggttgttaaaagatagggaatgaagaatgcaaaatggtttatcgttcaaactgtccactctgatccaaccctgtactgatagtacttcccagtatgatattgtgatgtttcatacaatgcagtgaacataaccaacttgttacctaaataaagaattgataaaaacagtgtgacatattaaaaaaaaggggggcccggtacccaattcnccctata

SEQ ID NO: 852 - DNA, 891 bp, Homo sapiens
gaattcggcacgagccttgagctagcatttcattatgaccgtgattttyccccgcaccactttccagccttgtggtccacaattccactgggccttaagtatgtactgaactttcctgcctccctcattttgctctgcttgtgcaattttttccaccctccatctctgtcaaacgtaagccttcctgacctctaagacctacctttgtcatgtacctttaccctcaggcaaggagcaatctcttctcttcctcttctaccttgctgtagcttctccccaaggatttatcacattctgccttgaatcatagggaacagcatgtgtagtggaatgaacacaggcctctgaatccaagatacgagtttaaatcccagctttggaggtggttacttaaagtctcagtgccttcattcttctycctatataaagtagatattacaatatctaacttacagagtcattgggagctatacatgcagcgattgggtaaagcacctggcacatggcaagcgattagcaaatgctggttacttctacttctttctcttcccttttcccagtctatcataatttccttgararcaggcaccatgtcttatttacccttgtatttcccacagtacttcccatagtgarttacccttagtaaatacycagtaagttgaattgaatttaaattamctgtaagtcttaaaatgtgggattaaattaagaatatattgtcctggaaatacccaagtgtctattgatggatgaatggataaacaaaatgtggtatacacataatggaatattattcagccttaaaaaggaatgaaattctgacatgtgctacaatatgatgaacctggaagacattatatgtgaaataagccagacagaaaaggacaa

SEQ ID NO: 853 - DNA, 501 bp, Homo sapiens
aaagtacaggttgacatccaaaatctgaaatgagaaatgctccaaaaactgaaactttttcaatgccgacacgatgctcaaagaaaatgctaattggagcatttcagattttggatttttggatttgggatgctcaactggcataatgtgaatattccaaactctgaaaaaatctgaagtctaaaacacttctggtctcaaggattttggataaaggatactcaatgtgcaacatgtagaatggtggttgcaaggtgggaggagagaatggagagttactgtttaatgatacaatgtttccgtttgggaagatggaaagttttggagatgtgtgatggttatggttgcgcaacaatgggaaggtacttagtactgcttaactgtgcacacttaaaaatggtaaaaatgataaattttgtgtatgtcttaaaacaataaaagaagttttttaaaaaaaaaaaaaaaaaaaaaactcgagggggggcccgtacccaatcgcct

SEQ ID NO: 854 - DNA, 1340 bp, Homo sapiens
ggcacgagaaagaaaggcgagagaaaaatcaaggcaccaaatttagattggaggtctcagaggagcagtgttttccctccttcgtaacagttgaacaacttccagatgtagctagctgcaccccctgtaaagatgcaggctctttacaatgaagacacatcttctgatgttccttctctcctgtatggccagatgcacaggaatagtgcccaaaagacctcagcctgctttccctttaaggggaaggagaagaaaaaactcctttttatttttactttctttcagcattgaatttttgttgtgtgtatggtgacttctgtttttgggaaacgggaagaagccagcagcatgctgaattgtcctgacaggctccgctgggctcttgccgaggttagcagtgctttttttgtatttaaaccatctcccgggcagtgtaaaaagtttgcaggtgcggacattctgtctgactggtctcggcagtgctctataaccctgttgtgtttcttgataaaacacagccccaccctttaataaagcaaagattgctatgaaaccagagagtctattcattactgtggagtaactagagcagtctgtagtgactagacatacggcaattaggaagtcatggagttgggatttttgtcttaattttggctgctcaaagtgccccctgtaggatattcttttttcgggaattgtttccaaacttgcctgtctttatctatggtgaaactcaagccgctttttaaggcaagcctgcaaacccaagtatcaacatgggctcctgaaggcacagggagcagattcacagttctgaccagtgttagggtccccacgagggccacccatttgaactcaaggttggcagactctggccccagcacttgccgtggtttcaggatggccagcggtgacacagggctatggaaccctgggtcttcatctcttcccatatcctttgtttcaccttctttttgccatattttattgtgcttcagatagaaattttatttataagataaaaagtagctctgaggctgggcacggtggctcatgcctgtggtcccagcactttgggaggccgaggtgggtggttcacgagctcagcagatcaagaccatcctggccaatatggtgaaaccctgtctctgctaaaaatacaaaaattggctgggcgtggtggcgggtgcctgtagtcccagctactcgggaggctgaggcgggagaatcgattggacccaggaggcggaggttgcagtgagcctagatggcaccactgcgctccagcctgggtgacagagggagactgcctcaaaaaaaaaaaaaaaaaaaaaaaa

SEQ ID NO: 855 - DNA, 813 bp, Homo sapiens
  misc_feature (338)..(338): n equals a,t,g, or c
  misc_feature (384)..(384): n equals a,t,g, or c
  misc_feature (389)..(389): n equals a,t,g, or c
  misc_feature (799)..(799): n equals a,t,g, or c
ctgcaggaattcggcacgagaaagaaaggcgagagaaaaatcaaggcaccaaatttagattggaggtctcagaggagcagtgttttccctccttcgtaacagttgaacaacttccagatgtagctagctgcaccccctgtaaagatgcaggctctttacaatgaagacacatcttctgatgttccttctctcctgtatggccagatgcacaggaatagtgcccaaaagacctcagcctgctttccctttaagggggaaggagaagaaaaaactcctttttatttttactttctttcagcattgaatttttgttgtgtgtatggtgacttctgtttttngggaaacggaagaagccagcagcatgctgaattgtcctgacaggcntccgntggctcttgccgaggttagcagtgctttttttgwatttaaaccatctcccgggcagtgtaaaaagtttgcaggtgcggacattctgtctgactggtctcggcagtgctctataaccctgttgtgtttcttgataaaacacagccccaccctttaataaagcaaagattgctatgaaaccagagagtctattcattactgtggagtaactagagcagtctgtagtgactagacatacggcaattaggaagtcatggagttgggatttttgtcttaattttggctgctcaaagtgccccctgtaggatattcttttttcgggaattgtttccaaacttgcctgtctttatctatggtgaaactcaagccgctttttaaggcaagcctgcaaacccaagtatcaacatggggncctgaagggacagg

SEQ ID NO: 856 - DNA, 1237 bp, Homo sapiens
agcaaacccaggaaggtgtggcgtccccgcttcgcgccaagatggtgctggtgctgcgccatcctttgtgtgcccgggaaagggcgttccgggagccgggtcgggggctcctgactcgcactgggcagcatgacggtgcgccggctgtcactgctgtgccgggacctctgggcgctgtggctgctgctgaaggccggcgcagtgcgtggggcgcgggcgggtcctcgcctccccggaaggtgttgtggggcgacatgcggggacgccgggcgggggtggacgttctgggcccagccctgtcctcagaagctgctggggcagaagcccggggctgggggatgccggggatgggtgttggggtgggtgcctccgagaccagaggagccctgttccttggcagggaaggtgtgcacgggccttgcccgatggatggtttagggccatggccctggggtccctggtgagcagtggggccgcctctgcccttggcctgtgagggactgtctgtgctggtcccagaaggctgggatcacctttccactggctcctttgttcgaggtttttcatagacaggctatgtggacaaatgagggcagcgcccacgtctggctggtggaggggctgcggctcctccttggaggggacgcctggccactgctgtccccacaatggggccacccgtggtgcaaggcgtgacaagctgccctctctaggtaagcaggacttgggaggcccctggccaagcctgtggacccggctgggcggcctctgtggtctcaggtttgggtgtgtttggtctggtcagggctcaggggctgctggtccacactggccccatcctgacaattggagctttggggcaaggtccctggagaaggggtcacgtcgggaggaaacagcctgggttttgttgatgcttttctaagaatggagtactcgttttcaagagatttgtcctaattatattttccagcgggtacttatgccaagtattgatgaataattcataaaataagcatctttgtgaattttagtgaatcagaccttaactatcaacggcaatgaatgaacatctaaagtttccaattttaaagtaaagaactggctgggtacagcagttcacgcctgtaatcccagcactttgggaggccaaggctagaggatcgcttgagcccaggagtttgagatcagcctgggcaacataccaagacctcatctgttaaaaaaaaaaaaaaaa

SEQ ID NO: 857 - DNA, 1681 bp, Homo sapiens
cgatggccccgcggccgctctagaaagtcccgttttttttttttttttttttttttttttttttagagtacgttctgcattttatttytgcaggcaacactttgctcaccagcaagaacacagcccraggaagggacccaataacctttcaaaacscaaactgctkcctgcggtgagggcccagggtcctccacggagaggacaggcatcttcctttcccaccaggaaggagtcagcccggagcctctgctatgtgcaaggcggtgtgcaagcaccggctgcggctctttgctgtctcttctttctctttggggctgggctgggtgtgcgttctggtgctgatgctttggcctgtgaggctgagcttggcayctcgacccgttcaattacagcaacgaagaagccactgctragygtggtctcaggggargcccggaggcagtgctcggcacccgggaacgtgctcaggcctcggtggggccaggcaggcagggcgggagctagcctgaaggcgcccgggttctgctgcagcgcatctcgcaccacgtcttcattctcctcctggcagagggagcacgtggagtagacgagccgctgcagggaagggaaagtgagcgcgtggcacagggctcgctgctggaaccctgccagggcatgcagacgcaccgggctaggtgtscctgccccgggmtcctccagctgtctgctcggcatacccgagccactgcaggaaggatccagcaggayrtagtggacctcaygrtagcgyggatcyragggggagaccgccaggaagtcctcctcagccagytcacagcargagacgccagcccrggccagcagcgtggccatggatgccagccgcttggcatccaggtcaaaggcaaagatcttcccttggttcttcagaagagcagccaagtgactggtcttattgcctggggcggcacaggcatcgatgacatgggagcctggcggggggtccagcagcatggctgggagacagctggccctgtcctgcagaatgaggtgtccggcccggtacagtgggtgttcatgcagatctgtctgggcgggaaacaccagcagctccggcatcaaggggtccaggagaaaatgcttccccttgagggctcgtaagtcatcgaggctggaagcccgaccctgataggagaaaccttgtctcttgaaataatcaactacatcatcggagcaggtcttgagagtgttcacacgcacaaatcgaggcagctgggaggctggaccaggcctggatcccacttccaacaggtcctcattccggctcacaccccgatgaaccttgagccgagccaactcagccttgagcctcgcctggtgccggcccaacagagccttccatcggcccccaccccctcgaaagccctttcccaacaacaactcatacactagcaccttggccaggtgcggccgcagcttcttctccgcacggaggaggccggcgctggcgatcacagcatccagcacggcggagtagcgctgcgtttcgcacaccagcgcgtacagctgcttcacgttctggaagttgctggagtacaccaaccccttgatagagcctggcggctctccacgccggccaacacgcctgcagctgcagcatacagccccatgttccgtcgcgctttacggctttgtggcaaaa

SEQ ID NO: 858 - DNA, 1934 bp, Homo sapiens
ccacgcgtccggggcgttcctggtcgtgagaggggagccccaggggagctggggcagcatgactggggtgataaatggccggaaatttggcgtggccacactcaacaccagcgtgatgcaggaggcacactccggggtcagcagcatccacagcagcatccgccatgtcccagcaaacgtggggcctctgatgcgggtgctcgtggtcaccatcgcccccatctactgggccctggccagagagagtggggaagccctgaatggccactctctgactgggggcaagttccggcaggagtcacacgtggagtttgctacaggggagctgctcacgatgacccagtggcccggggtctggatcccgatggcctcctgctcctcgacgtggtggtcaatggcgttgtccccggacagcctggctgacgcagatcttcaagtgcaggactttgaggagcactacgtgcaaacagggcctggccagctgttcgtgggctccacacagcgcttcttccagggcggcctcccctcgttcctacgctgcaaccacagcatccagtacaacgcggcccggggcccccagccccagctggtgcagcacctgcgggcctcagctatcagctcggcctttgatccagaggccgaggccctgcgcttccagctcgctacagccctgcaggcggaggagaacgaggtcggctgccccgagggctttgagctggactcccagggagcgttttgtgtggatgtggacgagtgtgcgtgggatgctcacctctgccgagagggacagcgctgtgtgaacctgctcgggtcctaccgctgcctccccgactgtgggcctggcttccgggtggctgatggggccggctgtgaagatgtggacgaatgcctggaggggttggacgactgtcactacaaccagctctgcgagaacaccccaggcggtcaccgctgcagctgccccaggggttaccggatgcagggccccagcctgccctgcctagatgtcaatgagtgcctgcagctgcccaaggcctgcgcctaccagtgccacaacctccagggcagctaccgctgcctgtgccccccaggccagaccctccttcgcgacggcaaggcctgcacctcactggagcggaatggacaaaatgtgaccaccgtcagccaccgaggccctctattgccctggctgcggccctgggcctcgatccccggtacctcctaccacgcctgggtctctctccgtccgggtcccatggccctgagcagtgtgggccgggcctggtgccctcctggtttcatcaggcagaacggagtctgcacagaccttgacgagtgccgcgtgaggaacctgtgtcagcacgcctgccgcaacactgagggcagctaccagtgcctgtgccccgccggctaccgtctgctccccagcgggaagaactgccaggacatcaacgagtgcgaggaggagagcatcgagtgtggacccggccagatgtgcttcaacacccgtggcagctaccagtgtgtggacacaccctgtcctgccacctaccggcagggccccagccctgggacgtgcttccggcgctgctcgcaggactgcggcacgggcggcccttctacgctgcagtaccggctgctgccgctgcccctgggcgtgcgcgcccaccacgacgtggcccgcctcaccgccttctccgaggtcggcgtccccgccaaccgcaccgagctcagcatgctggagcccgacccccgcagccccttcgcgctgcgtccgctgcgcgcgggccttggcgcggtctacacccgtcgcgcgctcacccgcgccggcctctaccggctcaccgtgcgtgctgcggcaccgcgccaccaaagcgtcttcgtcttgctcatcgccgtgtccccctacccctactaaacgggagagggcattg

SEQ ID NO: 859 - DNA, 1958 bp, Homo sapiens
ccacgcgtccggggcgttcctggtcgtgagaggggagccccaggggagctggggcagcatgactggggtgataaatggccggaaatttggcgtggccacactcaacaccagcgtgatgcaggaggcacactccggggtcagcagcatccacagcagcatccgccatgtcccagcaaacgtggggcctctgatgcgggtgctcgtggtcaccatcgcccccatctactgggccctggccagagagagtggggaagccctgaatggccactctctgactgggggcaagttccggcagagtcacacgtggagtttgctacagggagctgctcacgatgacccagtggcccggggtctggatcccgatggcctcctgctcctcgacgtggtggtcaatggcgttgtccccggacgagcctggctgacgcagatcttcaagtgcaggactttgaagaagcactacgtgcaaacaagggcctggccagctgttcgtgggctccacacagcgcttcttccagggcggcctcccctcgttcctacgctgcaaccacagcatccagtacaacgcggcccggggcccccagccccagctggtgcagcacctgcgggcctcagctatcagctcggcctttgatccagaggccgaggccctgcgcttccagctcgctacagccctgcaggcggaggagaacgaggtcggctgccccgagggctttgagctggactcccagggagcgttttgtgtggatgtggacgagtgtgcgtgggatgctcacctctgccgagagggacagcgctgtgtgaacctgctcgggtcctaccgctgcctccccgactgtgggcctggcttccgggtggctgatggggccggctgtgaaaatgtggacgaatgcctggaaggggttggacgactgtcactacaaccagctctgcgagaacaccccaggcggtcaccgctgcagctgccccaggggttaccggatgcagggccccagcctgccctgcctagatgtcaatgagtgcctgcagctgcccaaggcctgcgcctaccagtgccacaacctccagggcagctaccgctgcctgtgccccccaggccagaccctccttcgcgacggcaaggcctgcacctcactggagcggaatggacaaaatgtgaccaccgtcagccaccgaggccctctattgccctggctgcggccctgggcctcgatccccggtacctcctaccacgcctgggtctctctccgtccgggtcccatggccctgagcagtgtgggccgggcctggtgccctcctggtttcatcaggcagaacggagtctgcacagaccttgacgagtgccgcgtgaggaacctgtgtcagcacgcctgccgcaacactgagggcagctaccagtgcctgtgccccgccggctaccgtctgctccccagcgggaagaactgccaggacatcaacgagtgcgaggaggagagcatcgagtgtggacccggccagatgtgcttcaacacccgtggcagctaccagtgtgtggacacaccctgtcctgccacctaccggcagggccccagccctgggacgtgcttccggcgctgctcgcaggactgcggcacgggcggcccttctacgctgcagtaccggctgctgccgctgcccctgggcgtgcgcgcccaccacgacgtggcccgcctcaccgccttctccgaggtcggcgtccccgccaaccgcaccgagctcagcatgctggagcccgacccccgcagccccttcgcgctgcgtccgctgcgcgcgggccttggcgcggtctacacccgtcgcgcgctcacccgcgccggcctctaccggctcaccgtgcgtgctgcggcaccgcgccaccaaagcgtcttcgtcttgctcatcgccgtgtccccctacccctactaaacgggagagggcattggcggccgctctagaggatccct

SEQ ID NO: 860 - DNA, 1070 bp, Homo sapiens
gaattcggcacgaggtgatacttctgaagactgcagggagaatccgttttccagcttttttcatccaccagaggccacctgtattccctatcccacaaccctagccccttcctctatctttgaagtggactatttcatcccctgtttctatcatgacagtgccttctctcatattgaccctcttgccttataagattccttgtgattacactgggtccacctgcataatcaaggctaatctctccatctggagatcttaatataatcacatctacaaagtccctttggccattgaagtaacatatttatatgtattcattattaggatgtgggacacttttgtcagggacagggatttttcagcctacctttttcttcaccttttgccaccactctcagcctgtggtctcaatgccagcctttacactgctacccccattgtctgggtagktcataccagycctcaagactagcctcaggcattgcctcttctgggaatacatcctcttacaggccaggatatgactcatgggtgcattcctaatagcacttcamttatttctactgtcaccacactgatctgtaattacttgatttgtctgactcttctgggggcttgtaagcattctggcacagagaactatgacttactggggcttacatctcttgctaaacacagtacctaaaatttagtaggcattccctcataaacatgaatgaatgaatcaaagaatgaataaacatttaggaaatgatgttgtgttggtcaacttctttcctcatcactgttaaagataaaagaatgccaagccaggttgttcagacagaagcaagcaccacatccctgagagagcagcacatctgggcagccatgtgtgagaagtcggttgcattccccatacacagttgtctttgcagctgtactcttaaccactgtaaccacagaagtggggaaacaatagggtggggtgaagtgaaaagaaaattttccaaaacttcatttatctaataaatacagatatttaaaaaaaaaaaaaaaaaactcgagggggggcccgtacccaatcgcc

SEQ ID NO: 861 - DNA, 646 bp, Homo sapiens
  misc_feature (19)..(19): n equals a,t,g, or c
  misc_feature (544)..(544): n equals a,t,g, or c
cagatgccagggacttggncttcccccggttgaaccacaggttccaagaaacctgcagggtccagcctcccccccatccccagtyttccccaccctggcccggccctccaggtgcagaaacatgcaggcccctctccaggactgtgggaggagtgtgtccctcagactggcctgtgtcctggctcctcttaccacctcttccagaggttgtcacctgcagctgccccaggataaaggcaaggccagaraggactcctgaactcctgtgtgcctggggtggcaggggcaaacatagccaactggtggcctgagcggggccatggtgargacacccttggtggcttgtcccacatcaagctgggargtgacacttaggatgcatttttcaatattttagtgtttgaataacgggctawcttgagaaaaaaataatttgaatcacacatcacaccaaaaataaattctaggtggattttaacactttccaaaaattattattagtttagagacagggtctcactccgtcgcctaggctggagtgcangggtatgatcatggttcactgcaaccttaaactccctggcctcatatgatccccccgggctccagcccctccaaagttactgggaaactaccaaacatgccc

SEQ ID NO: 862 - DNA, 1590 bp, Homo sapiens
tttttttttttttgtttaaatgatacaacttaattttattaggacagacgctggcggccaccagaagtttgagcctctttggtagcaggaggctggaagaaaggacagaagtagctctggctgtgatggggatcttactgggcctgctactcctggggcacctaacagtggacacttatggccgtcccatcctggaagtgccagagagtgtaacaggaccttggaaaggggatgtgaatcttccctgcacctatgaccccctgcaaggctacacccaagtcttggtgaagtggctggtacaacgtggctcagaccctgtcaccatctttctacgtgactcttctggagaccatatccagcaggcaaagtaccagggccgcctgcatgtgagccacaaggttccaggagatgtatccctccaattgagcaccctggagatggatgaccggagccactacacgtgtgaagtcacctggcagactcctgatggcaaccaagtcgtgagagataagattactgagctccgtgtccagaaacactcctcaaagctactcaagaccaagactgaggcacctacaaccatgacataccccttgaaagcaacatctacagtgaagcagtcctgggactggaccactgacatggatggctaccttggagagaccagtgctgggccaggaaagagcctgcctgtctttgccatcatcctcatcatctccttgtgctgtatggtggtttttaccatggcctatatcatgctctgtcggaagacatcccaacaagagcatgtctacgaagcagccagggcacatgccagagaggccaacgactctggagaaaccatgagggtggccatcttcgcaagtggctgctccagtgatgagccaacttcccagaatctgggcaacaactactctgatgagccctgcataggacaggagtaccagatcatcgcccagatcaatggcaactacgcccgcctgctggacacagttcctctggattatgagtttctggccactgagggcaaaagtgtctgttaaaaatgccccattaggccaggatctgctgacataattgcctagtcagtccttgccttctgcatggccttcttccctgctacctctcttcctggatagcccaaagtgtccgcctaccaacactggagccgctgggagtcactggctttgccctggaatttgccagatgcatctcaagtaagccagctgctggatttggctctgggcccttctagtatctctgccgggggcttctggtactcctctctaaataccagagggaagatgcccatagcactaggacttggtcatcatgcctacagacactattcaactttggcatcttgccaccagaagacccgagggaggctcagctctgccagctcagaggaccagctatatccaggatcatttctctttcttcagggccagacagcttttaattgaaattgttatttcacaggccagggttcagttctgctcctccactataagtctaatgttctgactctctcctggtgctcaataaatatctaatcataacagcaaaaaaaaaaaaaaaaaactcgag

SEQ ID NO: 863 - DNA, 1540 bp, Homo sapiens
ggcacgagggaactagtatattcaccgtctatgaggccgcctcacaggaaggctgggtgttcctcatgtacagagcaattgacagctttccccgttggcgttcctacttctatttcatcactctcattttcttcctcgcctggcttgtgaagaacgtgtttattgctgttatcattgaaacatttgcagaaatcagagtacagtttcaacaaatgtggggatcgagaagcagcactacctcaacagccaccacccagatgtttcatgaagatgctgctggaggttggcagctggtagctgtgggatgtcaacaagccccagggacgcgccccagcctgcctccaggtgcagtacaatgacatttttaaaaatcgcccagcaaaggtctttgaattttatttcatccaagaaaatccacagctctttaagctctagatttgtccaaatttaaaatcctgaagttagagatggtatttcactccttcctctattcccaggacctagctttttttttttaacatacacaatagggatttgataagtttctgatggctgcaggcatgtaagagcatttcagtggtattgaatcaatgaagaattttgttgacatgtgaaatcttataaaaatattctttaccgaaggactgagttatgtggcagtgggcaaattcattgtttcatacctcccctagtaactgggaaaaatatgttaatacatagtctctctgtttttctgcatttggaagctttcagaggaacataatgtagaggtgtttctttagcaaagtgcactgatagcaaacataaggattgcaggtggggcctgagagtcctcatgagatagattctcacagtgattagaagatggagtctcacgtccctgcctgtgaactttctggaaaaaccatcttctccaagctgccattgacaacaatatggataacaataataacaataaggcccaataaactcctttatctcttcttcagggggccatactgacatcttctcttccttggtttcccctccttgccccctaaatatccagtaactcattcaaaataatgtcaccttaccaagagcagcacccctaactttccataatattttcactttcattttccctccaagcagcccactcgtaggaccgtagaattgattcttccacctggagaattttattttctttagcctttttggttttcagtgacaaatcctcttctcgcaaggggtggtttccatagttgtttatatcctgccctcataatttggagaagtgttcacatctgccgtgggatgagactgtatctcttttctttcttttgggtctttctccagatagggacttcttatgcaactcaaggatgggtacatgaaaaataaaattgtactctgagccattactggtgggctatgtttatatggccattttaccatagagttatttacttctttttgtttctatttgtattgaggtgtgattaacaaataaaattgtaaatacttaaggtaaaaaaaaaaaaaaaaaaaaaaaaaaaaa

SEQ ID NO: 864 - DNA, 2467 bp, Homo sapiens
ggcacgaggagaaggtcactaccatcatggagatggcttccaagatgaaagacacagggttcatcgtgtttgctgtgcttctgctggtgtcatgcctcatcctcatctttgtcattgccccacgttacgggcaaaggaatatcctcatctacatcatcatctgctctgtgatcggggccttctctgtggctgctgtcaaggggctgggcatcaccatcaagaacttcttccaggggctgccagttgtccggcacccgctcccctacatcctgtccctcatcctggcactgtccctcagcactcaggtcaacttcctcaacagagcactggacattttcaacacttccctggtgttccccatctactacgtgttcttcaccacggtggtcgttacctcgtccatcatcctcttcaaggagtggtacagcatgtctgctgtggacattgcaggcaccctctcgggctttgtcaccatcatcttgggcgtgttcatgctgcatgctttcaaagacctggacatcagctgcgccagcttgccccacatgcacaaaaacccacccccttctcccgccccggaacccactgtcattagactggaagacaagaacgtccttgtggacaatatagaacttgccagcacctcatcaccagaagagaaacccaaagtatttataatccattcctgaagcttggaatatgtgagtgagaggatgagtccgatggtacagcctgccctcccaatttcaaaaccacctggttattttccagtgcaactgttaccaatgggctctcttttcttgagaagttcatttatacctcatcactgtttccaggagaaaaatctttacccaaatagcaatggtggcagaacttcctggaaacagattcagtgaccaaatacccaagtttacatcagtgcctgcaggttccctggaccttccttctcattcattctttcggtgccatctctatgccgttgggaagaagatggagtctgacccactgaatgtagcacagtccaaggacttctctaagatattggtcattggaagttccttcacaccaattctcctcctgagacggaatctccgttgttgttgttgttgttgttttctagcccaaggatgacatagagctggctcccagaggcccacagagcaattggccatgcctccctatccagagctgacagggacacaaccagtgtaaaatatcctgttgcctttgtcacttcctctttggaggcagaagcaagacctcagctgaccttcttactgtgaaagccacttgatgtctcaggaaaaatttcaaccagctcattccccgagcactccagcctggcagtcagcacctcggcatccacccagtccatcccaccatcaccccttccccctctacttacatcctaaggagtcggtcactgagacataaaggcagtaatcgcagaactggaaacaaaacaataacagagccacagccaaactctggtggccaaacccagtgttgcattttgtcttactctgaaagaagaacagcaaattcactgcttcaaagtggcctggctgccaagctagaatttggcagaacgcacttttctattcctcaaggagtcaaccaacctatgatctggggaggtgggaagaggatgaggagcaaagttgggatttggcagaaggcagtcccaggctctctggatactaggggctaacttttgtgttgactctggtgctcatctgggaacttaggagaaacgagctcaggggtaatttctgggttgcagccttaaaggcttggacagctgtgaatctcaatggccaactggaggtgcagacttggcatggggtgcattctagctgttgaccagattgctaccgagtcccctcctccactgatgagctgcccacactgggaagcagcatgccctgactgttccaacaccacatgctatggggagtacctttggtcccctcacatttggccagaggcatacaaaaaaccagagcagctggagagggagataattactattccttcccttcccatctcctttctagccacaagagtgtgggggttggagaagaaccattagaaagggaaattagtgggctggtgtatctggaaagagggaagacttgatcctcagccccgaggttggtgcagggcctcccctgtgtgactctacctgcactctgtgtttatatcctgtgccctaagtgggccaagcccaggtaaattcctgctggccttggaactccaaggtttggctgaccagcagactggctccctgactcttcagcctcaaatccccagtttttgatgaatgtggatttctgtctgtaattaaaagcaatgcaacaagttggctcttgagaatggcagtaaactgagggccctaagagtgtggtctgacagggtcaagaataaagattacagattatatttacttgaaaaaaaaaaaaaaaaaaaa

SEQ ID NO: 865 - DNA, 2541 bp, Homo sapiens
  misc_feature (388)..(388): n equals a,t,g, or c
tggggaaacggtccctctagaactagtggatcccccgggctgcaggaattcggcacgaggagaaggtcactaccatcatggagatggcttccaagatgaaagacacagggttcatcgtgtttgctgtgcttctgctggtgtcatgcctcatcctcatctttgtcattgccccacgttacgggcaaaggaatatcctcatctacatcatcatctgctctgtgatcggggccttctctgtggctgctgtcaaggggctgggcatcaccatcaagaacttcttccaggggctgccagttgtccggcacccgctcccctacatcctgtccctcatcctggcactgtccctcagcactcaggtcaacttcctcaacagagcactggacatttncaacacttccctggtgttccccatctactacgtgttcttcaccacggtggtcgttacctcgtccatcatcctcttcaaggagtggtacagcatgtctgctgtggacattgcaggcaccctctcgggctttgtcaccatcatcttgggcgtgttcatgctgcatgctttcaaagacctggacatcagctgcgccagcttgccccacatgcacaaaaacccacccccttctcccgccccggaacccactgtcattagactggaagacaagaacgtccttgwggacaatatagaacttgccagcacctcatcaccagaagagaaacccaaagtatttataatccattcctgaagcttggaatatgtgagtgagaggatgagtccgatggtacagcctgccctcccaatttcaaaaccacctggttattttccagtgcaactgttaccaatgggctctcttttcttgagaagttcatttatacctcatcactgtttccaggagaaaaatctttacccaaatagcaatggtggcagaacttcctggaaacagattcagtgaccaaatacccaagtttacatcagtgcctgcaggttccctggaccttccttctcattcattctttcggtgccatctctatgccgttgggaagaagatggagtctgacccactgaatgtagcacagtccaaggacttctctaagatattggtcattggaagttccttcacaccaattctcctcctgagacggaatctccgttgttgttgttgttgttgttttctagcccaaggatgacatagagctggctcccagaggcccacagagcaattggccatgcctccctatccagagctgacagggacacaaccagtgtaaaatatcctgttgcctttgtcacttcctctttggaggcagaagcaagacctcagctgaccttcttactgtgaaagccacttgatgtctcagggaaaaatttcaaccagctcattccccgagcactccagcctggcagtcagcacctcggcatccacccagtccatcccaccatcaccccttccccctctacttacatcctaaggagtcggtcactgagacataaaggcagtaatcgcagaactggaaacaaaacaataacagagccacagccaaactctggtggccaaacccagtgttgcattttgtcttactctgaaagaagaacagcaaattcactgcttcaaagtggcctggctgccaagctagaatttggcagaacgcacttttctattcctcaaggagtcaaccaacctatgatctggggaggtgggaagaggatgaggagcaaagttgggatttggcagaaggcagtcccaggctctctggatactaggggctaacttttgtgttgactctggtgctcatctgggaacttaggagaaacgagctcaggggtaatttctgggttgcagccttaaaggcttggacagctgtgaatctcaatggccaactggaggtgcagacttggcatggggtgcattctagctgttgaccagattgctaccgagtcccytcctccactgatgagctgcccacactgggaagcagcatgccctgactgttccaacaccacctgctatggggagtacctttggtcccctcacatttggccagaggatacaaaaaaccagagcagctggagagggagataattactattccttcccttcccatctcctttctagccacaagagtgtgggggttggagaagaaccattagaaagggaaattagtgggctggtgtatctggaaagagggaagacttgatcctcagccccgaggttggtgcagggcctcccctgtgtgactctacctgcactctgtgtttatatcctgtgccctaagtgggccaagcccaggtaaattcctgctggccttggaactccaaggtttggctgaccagcagactggctccctgactcttcagcctcaaatccccagtttttgatgaatgtggatttctgtctgtaattaaaagcaatgcaacaagttggctcttgagaatggcagtaaactgagggccctaagagtgtggtctgcagggtcaagaataaagattacagattatatttacttgaaaaaaaaaaaaaaaaaaatttcctgcggccgcaagggaattca

SEQ ID NO: 866 - DNA, 819 bp, Homo sapiens
gaattcggcacgaggagaatcatgggcctctggctgggcatgctggcctgtgtcttcctggcaactgctgcctttgttgcttatactgcccggctggactggaagcttgctgcagaggaggctaagaaacattcaggccggcagcagcagcagagagcagagagcactgcaaccagacctgggcctgagaaagcagtcctatcttcagtggctacaggcagttcccctggcattaccttgacaacgtattcaaggtctgagtgccacgtggacttcttcaggactccagaggaggcccacgccctttcagctcctaccagcagactatcagtgaaacagctggtcatccgccgtggggctgctctgggggcggcgtcagcacactgatggtggggctcacggtcaggatcctagccaccaggcactagcaaagaagcttggaaatagaaagccaggagtggctgtccccagtatgcaaacacaccacggtctgccctgcaaaaacaccaatggggtctagtgcaggtggacactttgaaccactcctcaaaaaaagaactttggctgatyccttgtggtgacactcagaggggtctgaacagacttgacaattctgttctggtcaagctggagttttcttctgtgacttggactgctctacagaagacatcagccaactgcacgagtcagagtccagggattgtcactattattaataatgtaaatggcttcaaatgggacactgcagataammycacaaaaaccactgttatattaaagattacacatttcctggaaaaaaaaaaaaaaaaaactcga

SEQ ID NO: 867 - DNA, 1448 bp, Homo sapiens
  misc_feature (1422)..(1422): n equals a,t,g, or c
  misc_feature (1434)..(1434): n equals a,t,g, or c
gaattcggcacgagcaactgccctgatcaccccccgtcccagcccttgagtgaacgtccttctgagcggcttcctggggtcctccccacgtcccaaaggccggcaagatggtgtcctggatgatctgtcgcctggtggtgctggtgtttgggatgctgtgtccagcttatgcttcctataaggctgtgaagaccaagaacattcgtgaatatgtgcggtggatgatgtactggattgtttttgcactcttcatggcagcagagatcgttacagacatttttatctcctggttccctttctactatgagatcaagatggccttcgtgctgtggctgctctcaccctacaccaagggcgccagctgctttaccgcaagtttgtccacccgtccctgtcccgccatgagaaggagatcgacgcgtacatcgtgcaggccaaggagcgcagctacgagaccgtgctcagcttcgggaagcggggcctcaacattgccgcctccgctgctgtgcaggctgccaccaakagtcagggggcgctggccggcaggctgcggagcttctccatgcaggacctgcgctccatctctgacgcacctgcccctgcctaccatgaccccctctacctggaggaccaggtgtcccaccggaggccacccattgggtaccgggccgggggcctgcaggacagcgacaccgaggatgagtgttggtcagatactgaggcagtcccccgggcgccagcccggccccgagagaarcccctaatccgcagccagagcctgcgtgtggtcaagargaagccaccggtgcgggarggcacctcgcgctccctgaaggttcggacgargaaaaagactgtgccctcagacgtggacagctagggtctgctgcatctgcccccttcttacctcgtgccctgcakggctccagggctatttggagggaccttgggctgcacatctggcctgcctgcaccagctgcctgggcyccaccctcctgactcctgctgatggttaagggccgggagcagatgctgccaaggccacatgcagggatgcacccacaatgtaccaaagcaggctgggcccagggttctatttattgccttgctctgccctctcccttccccggttgtgggacaagagccctccctgaacccctgcaaccctccctgaacccctgcaaatgaaaccaaacgtccacctgggtgtgttcattccttcctgtccttcaaagtacttgatagcctttcataaggcctggcacatgtgtcctggttgtgtgtgtgtgtgttggtgagtgaggtcaggtttgcgagtgttttgataaataaatacataaaggggcaaaaaaaaaaaaaaaaaaaaaaaaacaaaaaaaaaaaaaaaaaaaaaaaaaaaaaaaaaaaaaaaaaaaaaaaanaaaaaaaaaaanaaaaaaaaaaaggg

SEQ ID NO: 868 - DNA, 1450 bp, Homo sapiens
gggcacgagtcaagattgtgaggtccaagagaacagatcagggtcttaagaagattatctttcatagtgcctatttgatggtaatgatcataaatacagtataatagaaggaaaaatatctggtggcttatatgcattggtagtttctcatggtaataagcatttttttttctcttccttttagcacaagtgcatacaccttgatagcaccaaatataaaccggagaaatgagatacaaagaattgcggacaggagctggccaacctggagaagtggaaggagcagaacagagctaaaccggttcacctggtgcccagacggctaggtggaagccagtcagaaactgaagtcagacagaaacaacaactccagctgatgcaatctaaatacaagcaaaagctaaaaagagaagaatctgtaagaatcaagaaggaagctgaagaagctgaactccaaaaaatgaaggcaattcagagagagaagagcaataaactggaggagaaaaaaagacttcaagaaaaccttagaagagaagcatttagagagcatcagcaatacaaaaccgctgagttcttgagcaaactgaacacagaatcgccagacagaagtgcctgtcaaagtgctgtttgtggcccacaatcctcaacatgggccagaagctgggcttacagagattctctaaaggcagaagaaaacagaaaattgcaaaagatgaaggatgaacaacatcaaaagagtgaattactggaactgaaacggcagcagcaagagcaagaaagagccaaaatccaccagactgaacacaggagggtaaataatgcttttctggaccgactccaaggcaaaagtcaaccaggtggcctcgagcaatctggaggctgttggaatatgaatagcggtaacagctggggtatatgagaaaatattgactcctatctggccttcatcaactgacctcgaaaagcctcatgagatgctttttcttaatgtgattttgttcagcctcactgtttttaccttaatttcaactgcccacacacttgaccgtgcagtcaggagtgactggcttctccttgtcctcatttatgcatgtttggaggagctgattcctgaactcatatttaaactctactgccagggaaatgctacattatttttctaattggaagtataattagagtgatgttggtagggtagaaaaagagggagtcacttgatgctttcaggttaatcagagctatgggtgctacaggcttgtctttctaagtgacatattcttatctaattctcagatcaggttttgaaagctttgggggtctttttagattttaatccctactttctttatggtacaaatatgtacaaaagaaaaaggtcttatattcttttacacaaatttataaataaattttgaactccttctgtataaaaaaaaaaaaaaaaaaaaaa

SEQ ID NO: 869 - DNA, 1868 bp, Homo sapiens
  misc_feature (1133)..(1133): n equals a,t,g, or c
  misc_feature (1136)..(1136): n equals a,t,g, or c
ggcacgagcataaattgataacattaaaagcaagcaaaactctaataataaaaggataaattgaattatggtacattctctggtgaatattgcatatcaaggaaaatgtgaaaaatgtaaatacagccgtgtaaatgaagaggaaaatgtaaagctaaacgggaaatagcgtatctatattttaggtaacatttaaatgatgataatagctaatatttttatgaaccccttactatgtgcagggtacttgttctgttttgcctacacattaattcatttaatcctcctaacaacctctgaggtatgtagtattactgccccatttttcacagctgtgctgcagtcgagtgcctgtccaagtacacactggcctgagtaggcccaggaggctgggtgatgtggctccgcagcctccactcctgtccactgtgcacactgcctctgttatattaattcatcaaatattgagggtccctttgatgccacgcactatccaccactggcaccctgacacttagaccctaacagatatggctgttgctcgtgaggatctttatttattaggaggtgatagaaagtaaaatcagataatgcatgccacgtggatcattaaaacagactgagttgcaaagagtgactccgtggttctgtgcttgkttggtcagaaaggtgtttctgagatgaagctgagcagagctgtccaaagaacaggaaagaaccagctaggctgtgattgggggatagtggtttcaggcagaaagaacagctactgggtttcctagggtgtttggagcacagccggtgaggggcacatagctgggccagggcatgtagagcttgttcagcctctggaaggcattgggattttatgctaagtatkttggaaagcctttggagggagaatggattgtgtgtggctctggctggcagcagccagttaggctttcacagtagacaaggggagatgattgtggcttgggtgacagtgtattataattacsgagaaaggkttggatatgattcagagatagggctgacagagcttgctgttggattagatgtaggaaattagcaaaggaaaggaatgggagarcagagawtgggattcaactggagccatagtagccatgtgntgnttatcagacatccaaggggaggtgccaaattgctagttggctacagggatctggcattctgtgagaggccaaggcttgggtatataggttatgtgtggataactgcatctyccwtgcttassaggccagataaaacagtgcaagaaaatattaacaataaggattatggacawtttgagtttccttctactttcctttgtgaaaatgtgttgctttaaaaatcaaaccaatgattcctttttccaagtctgataatatttgaagaatttttagagaaactaagttacaaagttatagtacttatataatcagaattggcatggtgtagagatgtcaaagtgggtgttttgctttttaatactttgtatcagggttatattttaacaaagagataagaatattagagacaggagtggtggctcacacgtgtaatcccagcactttgggatgccgaggtgggtggatcaccagaggtcaagagttcgataccagcctggccaacatggtgaaaccctgtctctactataaataccaaaattagccaggtgtggtggcgcacacctgtaatcccagctgttcagcggactgaggcacggaaatcgcttgaacctgggagctggaggttgcagtgagccaagattgtgccactgccgtccagtctgggcaacagagtgagactctgtctcaaaataataataataatagagtctagtcttcatttttgcccccccc

SEQ ID NO: 870 - DNA, 1507 bp, Homo sapiens
  misc_feature (1047)..(1047): n equals a,t,g, or c
  misc_feature (1301)..(1301): n equals a,t,g, or c
  misc_feature (1507)..(1507): n equals a,t,g, or c
ggaacgcagagcggagcgtggagagcggagcgaagctggataacaggggaccgatgatgtggcgaccatcagttctgctgcttctgttgctactgaggcacggggcccaggggaagccatccccagacgcaggccctcatggccaggggagggtgcaccaggcggcccccctgagcgacgctccccatgatgacgcccacgggaacttccagtacgaccatgaggctttcctgggacgggaagtggccaaggaattcgaccaactcaccccagaggaaagccaggcccgtctggggcggatcgtggaccgcatggaccgcgcgggggacggcgacggctgggtgtcgctggccgagcttcgcgcgtggatcgcgcacacgcagcagcggcacatacgggactcggtgagcgcggcctgggacacgtacgacacggaccgcgacgggcgtgtgggttgggaggagctgcgcaacgccacctatggccactacgcgcccggtgaagaatttcatgacgtggaggatgcagagacctacaaaaagatgctggctcgggacgagcggcgtttccgggtggccgaccaggatggggactcgatggccactcgagaggagctgacagccttcctgcaccccgaggagttccctcacatgcgggacatcgtgattgctgaaaccctggaggacctggacagaaacaaagatggctatgtccaggtggaggagtacatcgcggatctgtactcagccgagcctggggaggaggagccggcgtgggtgcagacggagaggcagcagttccgggacttccgggatctgaacaaggatgggcacctggatgggagtgaggtgggccactgggtgctgccccctgcccaggaccagcccctggtggaagccaaccacctgctgcacgaragcgacacggacaaggaygggcggctgagcaaagcgsaaatcctgggtaattggaacatgtttgtgggcagtcaggccaccaactatggygaggacctgacccggcaccacgatgagctgtgagcmccgngcacctgccacagcctcagaggcccgcacaatgaccggaggaggggccgctgtggtctggccccctccctgtccaggccccgcaggaggcagatgcagtcccaggcatcctcctkcccctgggctctcagggaccccctgggtcggcttctgtccctgtcacacccccaaccccagggaggggctgtcatagtcccagaggataagcaatacctatttctgactgagtctcccagcccagacccagggaccctnggccccaagctcagctctaagaaccgccccaacccctccagctccaaatctgagcctccaccacatagactgaaactcccctggccccagccctctcctgcctggcctggcctgggacacctcctctctgccaggaggcaataaaagccagcgccgggaaaaaaaaaaaaaaaaaaaaaaaaaaaaaaaaaaaaaaaaaaaaaaan

SEQ ID NO: 871 - DNA, 586 bp, Homo sapiens
agagcggacgaagctggataacaggggaccgatgatgtggcgaccatcagttctgctgcttctgttgctactgaggcacggggcccaggggaagccatccccagacgcaggccctcatggccaggggagggtgcaccaggcggcccccctgagcgacgctccccatgatgacgcccacgggaacttccagtacgaccatgaggctttcctgggacgggaagtggccaaggaattcgaccaactcaccccagaggaaagccaggcccgtctggggcggatcgtggaccgcatggaccgcgcgggggacggcgacggctgggtgtcgctggccgagcttcgcgcgtggatcgcgcacacgcagcagcggcacatacgggactcggtgagcgcggcctgggacacgtacgacacggaccgcgacgggcgtgtgggttgggaggagctgcgcaacgycacctatggccactasgsgcccgktgaagaatttcatgacgtggaggatgcagagacytacaaaaagatgctggytcgggacgagcggcgtttccgggtggccgaccaggatggggactcgatggccactcga

SEQ ID NO: 872 - DNA, 1250 bp, Homo sapiens
gcccacgcgtccgcccacgcgtccggcggtgcggagtatggggcgctgatggccatggagggctactggcgcttcctggcgcygctggggtcggcactgctcgtcggcttcctgtcggtgatsttcgccctcgtctgggtcctccactaccgagaggggcttggctgggatgggagcgcactagagtttaactggcacccagtgctsatggtcaccggcttcgtcttcatccagggcatcgcatcatcgtctacagactgccgtggacctggaaatgcagcaagctcctgatgaaatccatccatgcagggttaaatgcagttgctgccattcttgcaattatctctgtggtggccgtgtttgagaaccacaatgttaacaatatagccaatatgtacagtctgcacagctgggttggactgatagctgtcatatgctatttgttacagcttctttcaggtttttcagtctttctgcttccatgggctccgctttctctccgagcatttctcatgcccatacatgtttattctggaattgtcatctttggaacagtgattgcaacagcacttatgggattgacagagaaactgattttttccctgagagatcctgcatacagtacattcccgccagaaggtgttttcgtaaatacgcttggccttctgatcctggtgttcggggccctcattttttggatagtcaccagaccgcaatggaaacgtcctaaggagccaaattctaccattcttcatccaaatggaggcactgaacagggagcaagaggttccatgccagcctactctggcaacaacatggacaaatcagattcagagttaaacartgaagtagcagcaaggaaaagaaacttagctctggatgaggctgggcagagatctaccatgtaaaatgttgtagagatagagccatataacgtcacgtttcaaaactagctctacagttttgcttctcctattagccatatgataattgggctatgtagtatcaatatttactttaatcacaaaggatggtttcttgaaataatttgtattgattgaggcctatgaactgacctgaattggaaaggatgtgattaatataaataatagcagatataaattgtggttatgttacctttatcttgttgaggaccacaacattagcacggtgccttgtgcakaatagatactcaatatgtgaatatgtgtctactagtagttaattggataaactggcagcatccctga

SEQ ID NO: 873 - DNA, 1792 bp, Homo sapiens
ggcacgaggttgtttgagtttggtttggagcaaaactgaggtagtcctaacatttctgggactgaatccaggcaagagaaagaagaaaaagaagaagaaaaagaggaggaaaaagtggattacacaatgacatggagaatgggaccccgtttcactatgctgttggccatgtggctagtgtgtggatcagaaccccacccccatgccactattagaggcagccacggaggacggaaagtgcctttggtttctccggacagcagtaggccagctcggtttctgaggcacactgggaggtctcgcggaattgagagatccactctggaggaaccaaaccttcagcctctccagagaaggaggagtgtgcccgtgttgagactagctcgcccaacagagccgccagcccgctcggacatcaatggggccgccgtgagacctgagcaaagaccagcagccaggggctctccgcgtgagatgatcagagatgaggggtcctcagctcggtcaagaatgttgcgtttcccttcggggtccagctctcccaacatccttgccagctttgcagggaagaacagagtatgggtcatctcagcccctcatgcctcggaaggctactaccgcctcatgatgagcctgctgaaggacgatgtgtactgtgagctggcggagaggcacatccaacagattgtgctcttccaccaggcaggagaggaaggaggcaaggtgagaaggatcaccagcgagggccagatcctggagcagcccctggaccctagcctcatccctaagctgatgagcttcctgaagctggagaagggcaagtttggcatggtgctgctgaagaagacgctgcaggtggaggagcgctatccatatcccgttaggctggaagccatgtacgaggtcatcgaccaaggccccatccgtaggatcgagaagatcaggcagaagggctttgtccagaaatgtaaggcctctggtgtagagggccaggtggtggcggaggggaatgacggtggagggggagcaggaaggccaagcctgggcagcgagaagaagaaagaggacccaaggagagcacaagtcccaccaaccagagagagtcgggtgaaggtcctgagaaaactggccgccactgcaccagcttttccccaacctccctcaacccccagagccaccacccttcctcctgccccagccacaacagtgactcggtccacgtcccgggcggtaacagttgctgcaagacctatgaccaccactgcctttcccaccacgcagaggccctggaccccctcaccctcccacaggccccctacaaccactgaggtgatcactgccaggagaccctcagtttcagagaatctttaccctccatcccggaaggatcagcacagggagaggccacagacaaccaggaggcccagcaaggccaccagcttggagagcttcacaaatgcccctcccaccaccatctcagaacccagcacaagggctgctggcccaggccgtttccgggacaaccgcatggacaggcgggaacatggccaccgagacccaaatgtggtgccaggtcctcccaagccagcaaaggagaaacctcccaaaaagaaggcccaggacaaaattcttagtaatgagtatgaggaagtatgacctcagccggcctactgcctctcagctggaggacgagctgcaggtggggaatgttccccttaaaaaagcaaaggagtctaaaaagcatgaaaagcttgagaaaccagagaaggagaagaaaaaaaaaaaaaaaaaa

SEQ ID NO: 874 - DNA, 1673 bp, Homo sapiens
ggcacgagagaatgggaccccgtttcactatgctgttggccatgtggctagtgtgtggatcagaaccccacccccatgccactattagaggcagccacggaggacggaaagtgcctttggtttctccggacagcagtaggccagctcggtttctgaggcacactgggaggtctcgcggaattgagagatccactctggaggaaccaaaccttcagcctctccagagaaggaggagtgtgcccgtgttgagactagctcgcccaacagagccgccagcccgctcggacatcaatggggccgccgtgagacctgagcaaagaccagcagccaggggctctccgcgtgagatgatcagagatgaggggtcctcagctcggtcaagaatgttgcgtttcccttcggggtccagctctcccaacatccttgccagctttgcagggaagaacagagtatgggtcatctcagcccctcatgcctcggaaggctactaccgcctcatgatgagcctgctgaaggacgatgtgtactgtgagctggcggagaggcacatccaacagattgtgctcttccaccaggcaggagaggaaggaggcaaggtgagaaggatcaccagcgagggccagatcctggagcagcccctggaccctagcctcatccctaagctgatgagcttcctgaagctggagaagggcaagtttggcatggtgctgctgaagaagacgctgcaggtggaggagcgctatccatatcccgttaggctggaagccatgtacgaggtcatcgaccaaggccccatccgtaggatcgagaagatcaggcagaagggctttgtccagaaatgtaaggcctctggtgtagagggccaggtggtggcggaggggaatgacggtggagggggagcaggaaggccaagccagggcagcgagaagaagaaagaggacccaaggagagcacaagtcccaccaaccagagagagtcgggtgaaggtgctgagaaaactggccgccactgcaccagcttttccccaacctccctcaacccccagagccaccacgcttactcctgccccagccacaacagtgactcggtccacgtcccgggcgggaaacagatgctgcaagacctatgaccaccactggctttcccaccacgcagaggccctggaccccctcacccttcccacaggccccctacaaccactgagggtgatcactgccaggagaccctcagtttccagagaatctttaccctccattcccggaaggatcagcacagggagaggccacagacaaccaggaggcccagcaaggcccaccagcttggagagcttcacaaatgcccctcccaccaccatctcagaacccagcacaagggctgctggcccaggccgtttccgggacaaccgcatggacaggcgggaacatggccaccgagacccaaatgtggtgccaggtcctcccaagccagcaaaggagaaacctcccaaaaagaaggcccaggacaaaattcttagtaatgagtatgaggagaagtatgacctcagccggcctactgcctctcagctggaggacgagctgcaggtggggaatgttccccttaaaaaagcaaaggagtctaaaaagcatgaaaagcttgagaaaccagagaaggagaagaaaaaaaaaaaaaaaaaa

SEQ ID NO: 875 - DNA, 988 bp, Homo sapiens
gtagcagcgtggcttccctggctcctctctgcatccttcccgaccttcccagcaatatgcatcttgcacgtctggtcggctcctgctccctccttctgctactgggggccctgtctggatgggcggccagcgatgaccccattgagaaggtcattgaagggatcaaccgagggctgagcaatgcagagagagaggtgggcaaggccctggatggcatcaacagtggaatcacgcatgccggaagggaagtggagaaggttttcaacggacttagcaacatggggagccacaccggcaaggagttggacaaaggcgtccaggggctcaaccacggcatggacaaggttgcccatgagatcaaccatggtattggacaagcaggaaaggaagcagagaagcttggccatggggtcaacaacgctgctggacaggccgggaaggaagcagacaaagcggtccaagggttccacactggggtccaccaggctgggaaggaagcagagaaacttggccaaggggtcaaccatgctgctgaccaggctggaaaggaaktggagaagcttggcccaagtgcccaccatgctgctggccaggccgggaaggagctgcagaatgctcataatggggtcaaccaagccagcaaggaggccaaccagctgctgaatggcaaccatcaaagcggatcttccagccatcaaggaggggccacaaccacgccgttagcctctggggcctcggtcaacacgcctttcatcaaccttcccgccctgtggaggagcgtcgccaacatcatgccctaaactggcatccggccttgctgggagaataatgtcgccgttgtcacatcagctgacatgacctggaggggttgggggtgggggacaggtttctgaaatccctgaagggggttgtactgggatttgtgaataaacttgatacactaaaaaaaaaaaaaaaaaaaaaaaaaaaaaaaaaaagaggagggggg

SEQ ID NO: 876 - DNA, 1501 bp, Homo sapiens
ggcacgagcctatttctgcttactgtgttaccagagagcctgggggtctggatcctatctggccccgtcagggtggattgccaaatgagcagttctcttgccccagtccctttcctgtgctataaataagccccatgtttattttcttatgttattgaaatgagcacttgtgatttgggcctcttttgaggagtccagagagcgtccatccggtgcctggtgagggccctgcatggctggctgctgtctgaagctatttggagtcctctccctgtgttttctatgtggcttaatttcaatagaaagggttatatgcaaccctgtatctgctgattttcaggtttcaactttctgccagcgtcactgcctgcttagaagtaaagttatgtttcccataaggggataacagccacaattgaggtaattaacgaaaattgtacattggtggcagcacctcctataggatttccaatagtctttctctagtagatcattgggggctcaccttgatctcctctcttctgtctaccctgcaccaaaataccttgtcctgttttctggatatagttccaataatttttttcctaacagcctttttgtcaccagttggtttgatatcttacaacttggccaaatgagggttccattaactccatcttgtctaatgcatggagaattcaaggattttttttttcctcttttcatagcaccttccagttgccagttgtaccctggcccttctttggaagtcataatgatgaatatccattaataagagattgatgctctttcaactctcatgtcatctataccatctcagtggagaggatgactttggatgaggttggaatacaaaggaaacatttggaagtccactgcagtgtattatatgctgtgtggaagtctgggggttaggaaatacctggagggagaacttcctaagaaatgatttttggttcttttaggccttaacagcacaataaaagtatcccatgagaccattatgagcaggacacgacattgtttcacaccttgggctgtgactatttacttctcggtacagattactctggttaaatcactcagtaaagaaatcttttcatgctcacaatctgaacctgaaggctattactgaagagaattgcatctgacaacaaaatttaatttacttccagagaaaggaccagaagaaagtaaattttcatttatgtttttaagtctattgtcttaaaaagattcttttcccttaaaaaataaaaaaacctgatgtgatgggttccttcagtcaacaaatacttattgagcagttattgtgtgccagatactgttcttggtgtgaggatatggcactgaacaaaacaatgtacctactttcgtcaagcttacattctagtgaggaagataaccaaaacaagtgactgaatataatttcaaatgtcaataaatgctgtgaagaaaataaagtcagagtattatatgtaaaaaaaaaaaaaaaaaaaaa

SEQ ID NO: 877 - DNA, 1083 bp, Homo sapiens
  misc_feature (528)..(528): n equals a,t,g, or c
  misc_feature (815)..(815): n equals a,t,g, or c
  misc_feature (876)..(876): n equals a,t,g, or c
  misc_feature (879)..(879): n equals a,t,g, or c
aaaactccccttactattgggaacaaaagctggagctccaccgcggtggcggccgctctagaactagtggatcccccgggctgcaggaattcggcacgagttgctaagttgattaaaggttggtcttccactctgccactggccacagcacaaagtgaaaacagatgtcacaagcaccttgtagatctgtcccttttttcttctgatgttcaccctccttttgagctctttctttctccaacattgcttacaaaataatctttatgcatctgagagggagcaaatattcagtaactttctgcagctgtcctcactaaagaggagaatctgttgaatgccactggaaatgtaaggatctcttgtgacagtaacatctcaaggggaaactagtggttaaattgttaattctttgagtctgaaacttttttcatttgcagtgcagataagtgcctgatcttgcagtatcacgtttctgacttctttgttctggcttcattttttttttcccaaaatgccattttcattkgntcttagagttcagaacatgtcaaagagcttctttaagcagtaggtggttttacagagcccacagagaaggaaaactaaatatcatcccggatgcagtccactacgatcgtggaggagtcagattactctccgggctttgctgwgtctgcttgtgaaacaggaaagggagactgaggcaatgagtcacctacttgggcccaaagcaccacctacgtwgaatatggagaaaatgtgaagcaaaagtttctttttatacataatcaccatttgkacataatcaccatttnctccatggttcttatccaattcagtgcatcttaaaggatggtttgtggaatcatgacatancanaaaaatccaggtactatcagtcttgcctgtttctacctaactctttcatttaaactctcactagaatctataggaactgttagcatcaattttaataagttgtcaactaagtgattagtggtatttattggttatttttgacaaaataatggaatcatcaaattttgaagttgaaaagtaaagtaaaaatttgtgccaaacccc

SEQ ID NO: 878 - DNA, 1904 bp, Homo sapiens
  misc_feature (46)..(46): n equals a,t,g, or c
  misc_feature (63)..(63): n equals a,t,g, or c
  misc_feature (88)..(88): n equals a,t,g, or c
  misc_feature (102)..(102): n equals a,t,g, or c
  misc_feature (1895)..(1896): n equals a,t,g, or c
  misc_feature (1900)..(1900): n equals a,t,g, or c
  misc_feature (1902)..(1903): n equals a,t,g, or c
ggttgtgttcgccaggtgcgtcacttgcaaggcctaggccgtcttngcttctccttccttctngcacgttgcggcttcccgtcaagtntaatcggggctccnttagggtccgatttaggctttcggcacttcgccccaaaaacttgattagggtgatggttcacgtagtgggccatcgccctgatagcggtttttcgccctttgacgttgaagtccacgttctttaatagtggactcttgttccaaactggaccaacactcaaccctatctcggtctattcttttgatttataagggattttgccgatttcggcctattggttaaaaaatgagctgatttaacaaaaatttaacgcgaattttaacaaaatattaacgcttacaatttgccattcgccattcaggctgcgcaactgttgggaagggcgatcggtgcgggcctcttcgctattacgccagctggcgaaagggggatgtgctgcaaggcgattaagttgggtaacgccagggttttcccagtcacgacgttgtaaaacgacggccagtgaattgtaatacgactcactatagggcgaattgkktaccgggccccccctcgagtttttttttttttttttttgcaaatcatgaccaatacttttaatcctaaagctaagtgtgagaagggctgaaaaactgttaagattttttataacctttctaactgggttggccacatggagcagaaaatcatggactttagagtctgacaaacctgggttcaaaattcagttttattactttctagcttgtgtatctgtgcaagtcactttaattttctgagacttgttttcttcatttatacaactgtcaataaaatatgtttttaaaggtgtattttgaggtctctagaacaatgccaggcttggtaggcatttaataagtactggctaagaatattaamcaggattgtgtttaaatactcccattcatattacctacattgtgaaacactgtcaaaatggtatataccagaataaaatgtgaattgtattttttgaccattctttcttaaatacataaggagagctgctatctctagcccattttgtgggaaagagtcagtgcaatggagggtggttcactatgatccctaagaattgaccccactgacagcaccctctttgacttttccctgctaacttcagcaggtagcaagaggggagcatgggctatggtgtcagattaattgaggctccatcaaccacccagatggaattttaggagctatggtaattcctatctgctgggtagggttcctgaaatacaaccatggtgtttcatytyctagttgttgctgtcgtctttctgagttgctctgtgatccaccatattccttctctaatcttgctttgatttatgaatgtacatgatgatggtgatggtaatatcctaatttaaatgataaatactcgaactaacttggcccagagaaccctaccaaaaaaaggaatcaatgagtcagatccttagaaaacagttcctagagtcattctagctaatcttttcatcagttgagagttttgcaaaggggtttctgcctcattgaccaagaaagtgtagcggcttaccaatgccaacctcttaaagcataagtagaggaaatcaatggtaacctgctaacctcagttctacgcaatgcattggcagtttgggacagcattaatgtttataatatgaccttgtctacatttggggtttggcacaaatttttactttacttctcaacttcaaaatttgatgattccattattttgtcaaaaataaccaataaataccactaatcacttagttgacaacttattaaaattgatgctaacagttcctataggtaaagtagaggagaatttagtaanngtangnnt

SEQ ID NO: 879 - DNA, 1937 bp, Homo sapiens
  misc_feature (1)..(1): n equals a,t,g, or c
  misc_feature (11)..(11): n equals a,t,g, or c
  misc_feature (23)..(23): n equals a,t,g, or c
  misc_feature (1626)..(1626): n equals a,t,g, or c
  misc_feature (1884)..(1884): n equals a,t,g, or c
  misc_feature (1908)..(1908): n equals a,t,g, or c
  misc_feature (1916)..(1916): n equals a,t,g, or c
nacggaacccnctaaattgaatnaaagctgcagctccaccgcggtggcggccgctctagaactagtggatcccccgggctgcaggaattcggcacgagcagcatcagcagtgtgatggtacaccaagaaggggctgttgatataaatttttttaaaatattggtatagttaaatacttatattttaaaatattggtgtgttttttggtgctataaattactaacttgtgtgttcctaaaatcaagttgaaactaggataattgtctagttcttgctttgataagaacgcagtagttctgatgcttgtgtccatgtgtatgggtctgttattcttgcaagtgggtaagcaatgcatagcttttttttatactgagagcactagaaggccaaagcatctcaaaaccatgggttctgggtatgcataatttttggaaaggcacgataagcaaatctcacagtctggctggtcagcagctgcagggataaggagactaattgccaaggccatgcaaatgcaaagaggaaggtgaggaggattcccagatgtgatcatagcttgcaaagatggtcatctcatggggccagaattcgtgcatgcccacacctacaaagctgagaactggtagtggtcatgtgtccgcttcaagcaatgcatgtattcacagccgscagcatcaagaggggccatcttttgataggatgacacatgcatgktcaaacatattttaaaagattagggagaaaagaatactgtgaacaaatagaamccaattatgagcaaattcacgaattcggstatgtactattgwggctggcaaaasccacttaaactaggctctctagcctgattttcagccatcattacccctcactaagaatccttgtaaaatttcttccgtaaaagttaattacactcatcaccactgtttgctaatgggagcaaacccctagccaatattttttagaataatatggttgggataactttttttttttttttttgctaaatgaatgcatgattatcttatacaataaaagtataacacaaaatactgttttaagatagtcgctgggactctccttacccttgaagtgtccccctttccctcctccacatccagtcaaccgcaggttcctcccaggtttactatctgacatgttttagctctcttccttcttttccattcctctacaacttctctagttctggctttcattgtttctcaaccaaaacagtctccccttctctctcctccattcttgcgtccttccaaaacatcctctccaccctgccagagcagctcaccttagtcacagtctgactgcaactgcatgtgcttatcaatcctctcatttctcctcatcacctataacagtgcttttgacgctgcaacttgtgagccatttcgcgggttagaaaataagtttcatgggttgtaaccagtagtttaaaaaaaaaaaaaaaaaactcgagggggggcccggtayccaattcgccctatagtgagtcgtattacaattcactggccgtcgttttacaacgtcgtgactgggaaaaccctggcgttacccaacttaatcgccttgcagcacatccccctttcgccagctggcgtaatagcgaanaggcccgcaccgatcgcccttcccaacagttgcgcagcctgaatggcgaatggcaaattgtaagcgttaatattttgttaaaattcgcgttaaatttttgttaaatcagctcattttttaaccaataggccgaaatcggcaaaatcccttataaatcaaaagaatagaccgagatagggttgagtgttgttccagttttggaacaagagtccactattaaagaacgtggactccaacgtcaaagggcgaaaaaccgtntatcagggcgaaggcccactacgnggaccatnaccctaatcaagtttttgggg

SEQ ID NO: 880 - DNA, 971 bp, Homo sapiens
  misc_feature (957)..(957): n equals a,t,g, or c
  misc_feature (964)..(964): n equals a,t,g, or c
cgcgtcggaactcggccgcgggacatccacggggcgcgagtgacacgcgggagggagagcagtgttctgctggagccgatgccaaaaaccatgcatttcttattcagattcattgttttcttttatctgtggggcctttttactgctcagagacaaaagaaagaggagagcaccgaagaagtgaaaatagaagttttgcatcgtccagaaaactgctctaagacaagcaagaagggagacctactaaatgcccattatgacggctacctggctaaagacggctcgaaattctactgcagccggacacaaaatgaaggccaccccaaatggtttgttcttggtgttgggcaagtcataaaaggcctagacattgctatgacagatatgtgccctggagaaaagcgaaaagtagttatacccccttcatttgcatacggaaaggaaggctatgcagaaggcaagattccaccggatgctacattgatttttgagattgaactttatgctgtgaccaaaggaccacggagcattgagacatttaaacaaatagacatggacaatgacaggcagctctctaaagccgagataaacctctacttgcaaagggaatttgaaaaagatgagaagccacgtgacaagtcatatcaggatgcagttttagaagatatttttaagaagaatgaccatgatggtgatggcttcatttctcccaaggaatacaatgtataccaacacgatgaactatagcatatttgtatttctactttttttttttagctatttactgtactttatgtataaaacaaagtcacttttctccaagttgtatttgctatttttcccctatgagaagatattttgatctccccaatacattgattttggtataataaatgtgaggctgttttgcaaacttaaaaaaaaawwaaaaaaactsgaggggggcccgtacccaantcgccgnatatgat

SEQ ID NO: 881 - DNA, 968 bp, Homo sapiens
  misc_feature (241)..(241): n equals a,t,g, or c
  misc_feature (954)..(954): n equals a,t,g, or c
  misc_feature (961)..(961): n equals a,t,g, or c
ggcacgagggccgcgggacatccacggggcgcgagtgacacgcgggagggagagcagtgttctgctggagccgatgccaaaaaccatgcatttcttattcagattcattgttttcttttatctgtggggcctttttactgctcagagacaaaagaaagaggagagcaccgaagaagtgaaaatagaagttttgcatcgtccagaaaactgctctaagacaagcaagaagggagacctactnaaatgcccattatgacggctacctggctaaagacggctcgaaattctactgcagccggacacaaaatgaaggccaccccaaatggtttgttcttggtgttgggcaagtcataaaaggcctagacattgctatgacagatatgtgccctggagaaaagcgaaaagtagttatacccccttcatttgcatacggaaaggaaggctatgcagaaggcaagattccaccggatgctacattgatttttgagattgaactttatgctgtgaccaaaggaccacggagcattgagacatttaaacaaatagacatggacaatgacaggcagctctctaaagccgagataaacctctacttgcaaagggaatttgaaaaagatgagaagccacgtgacaagtcatatcaggatgcagttttagaagatatttttaagaagaatgaccatgatggtgatggcttcatttctcccaaggaatacaatgtataccaacacgatgaactatagcatatttgtatttctactttttttttttagctatttactgtactttatgtatwaaacaaagtcmcttttctccmagttgkatttgctatttttcccctatgagaagatattttgatctccccaatacattgattttggtataataaatgtgaggctgttttgcaaacttaaaaaaaaatttaaaaaaactggaggggggcccgtacccaantcgccgnatatgat

SEQ ID NO: 882 - DNA, 2460 bp, Homo sapiens
  misc_feature (172)..(172): n equals a,t,g, or c
  misc_feature (2457)..(2457): n equals a,t,g, or c
  misc_feature (2459)..(2460): n equals a,t,g, or c
ggatcgccgggaggacccccgcctcgccgaagacgggcggggcaagccgagcctcacggggtccccggagctgggccgggcctccagatggagaaggcgcaacggggagttcttgagtaagccagagcggtgtccagcgcggtgtagccgcagccgccgctgtcaggcgcancaacgggcaaccccgtagaagtcggtcggcaggtcctctccaacccgccgctaccgcgccgctgtgggagagaccccagcaggagcccaarggcagctacgggggcgcgaaggccgctggcgccgcctcggccagcccttcccgcgcggttccactgccttaaggatgacagtcgtagggaaccctcgaagttggagctgccagtggttgccaatcctgatactgttgctgggcacaggccatgggccaggggtggaaggcgtgacacactacaaggccggcgaccctgttattctgtatgtcaacaaagtgggaccctaccataaccctcaggaaacttaccactactatcagcttccagtctgctgccctgagaagatacgtcacaaaagccttagcctgggtgaagtgctggatggggaccgaatggctgagtctttgtatgagatccgctttcgggaaaacgtggagaagagaattctgtgccacatgcagctcagttctgcacaggtggagcagctgcgccaggccattgaagaactgtactactttgaatttgtggtagatgacttgccaatccggggctttgtgggctacatggaggagagtggtttcctgccacacagccacaagataggactctggacccatttggacttccacctagaattccatggagaccgaattatatttgccaatgtttcagtgcgggacgtcaagccccacagcttggatgggttacgacctgacgagttcctaggccttacccacacttatagcgtgcgctggtctgagacttcagtggagcgtcggagtgacaggcgccgtggtgacgatggtggtttctttcctcgaacactggaaatccattggttgtccatcatcaactccatggtgcttgtgtttttactggtgggttttgtggctgtcattctaatgcgtgtgcttcggaatgacctggctcggtacaacttagatgaggagaccacctctgcaggttctggtgatgactttgaccagggtgacaatggctggaaaattatccatacagatgtcttccgcttccccccataccgtggtctgctctgtgctgtgcttggcgtgggtgcccagttcctggcccttggcactggcattattgtcatggcactgctgggcatgttcaatgtgcaccgtcatggggccattaactcagcagccatcttgttgtatgccctgacctgctgcatctctggctacgtgtccagccacttctaccggcagattggaggcgagcgttgggtgtggaacatcattctcaccaccagtctcttctctgtgcctttcttcctgacgtggagtgtggtgaactcagtgcattgggccaatggttcgacacaggctctgccagccacaaccatcctgctgcttctgacggtttggctgctggtgggctttcccctcactgtcattggaggcatctttgggaagaacaacgccagcccctttgatgcaccctgtcgcaccaagaacatcgcccgggagattccaccccagccctggtacaagtctactgtcatccacatgactgttggaggcttcctgcctttcagtgccatctctgtggagctgtactacatctttgccacagtatggggtcgggagcagtacactttgtacggcatcctcttctttgtcttcgccatcctgctgagtgtgggggcttgcatctccattgcactcacctacttccagttgtctggggaggattaccgctggtggtggcgatctgtgctgagtgttggctccaccggcctcttcatcttcctctactcagttttctattatgcccggcgctccaacatgtctggggcagtacagacagtagagttcttcggctactccttactcactggttatgtcttcttcctcatgctgggcaccatctcctttttttcttccctaaagttcatccggtatatctatgttaacctcaagatggactgagttctgtatggcagaactattgctgttctctccctttcttcatgccctgttgaactctcctaccagcttctcttctgattgactgaattgtgtgatggcattgttgccttcccttttgccctttgggcattccttccccagagagggcctggaaattataaatctctatcacataaggattatatatttgaactttttaagttgcctttagttttggtcctgatttttctttttacaattaccaaaataaaatttattaagaaaaagaaaaaaaaaaaaaaaaaaaaaaaggggggggngnn

SEQ ID NO: 883 - DNA, 1163 bp, Homo sapiens
ggcacgagctggctgcagggtctctggggagagaaggggcctcggcttcacaggatggggctgccagtgtcctgggcccctcctgccctctgggttctagggtgctgcgccctgctcctctcgctgtgggcgctgtgcacagcctgccgcaggcccgaggacgctgtagcccccaggaagagggcgcggaggcagcgggcgaggctgcagggcagtgcgacggcggcggaagcgtccctactgaggcggacccacctctgctccctcagcaagtcggacaccagactgcacgagctgcaccggggcccgcgcagcagcagggccctgcggcctgccagcatggatctcctgcgcccacactggctggaggtgtccagggacatcaccggaccgcaggcagccccctctgccttcccacaccaggagctgccccgggctctgccggcagctgcagccaccgcagggtgcgctggcctcgaggccacctattccaacgtggggctggcggcccttcccggggtcagcctggcggccagccctgtggtggccgagtatgcccgcgtccagaagcgcaaagggacccatcgcagtccccaagagccacagcaggggaagactgaggtgaccccggccgctcaggtggacgtcctgtactccagggtctgcaagcctaaaaggagggacccaggacccaccacagacccgctggaccccaagggccagggagcgattctggccctggcgggtgacctggcctaccagaccctcccgctcagggccctggatgtggacagcggccccctggaaaacgtgtatgagagcatccgggagctgggggaccctgctggcaggagcagcacgtgcggggctgggacgccccctgcttccagctgccccagcctagggaggggctggagacccctccctgcctccctgccctgaacactcaaggacctgtgctccttcctccagagtgaggcccgtcccccgccccgccccgcctcacagctgacagcgccagtcccaggtccccgggccgccagcccgtgaggtccgtgaggtcctggccgctctgacagccgcggcctccccgggctccagagaaggcccgcgtctaaataaagcgccagcgcaggatgaaagcgaaaaaaaaaaaaaaaaaa

SEQ ID NO: 884 - DNA, 1183 bp, Homo sapiens
tgcaggaattcggcacgagctggctgcagggtctctggggagagaaggggcctcggcttcacaggatggggctgccagtgtcctgggcccctcctgccctctgggttctagggtgctgcgccctgctcctctcgctgtgggcgctgtgcacagcctgccgcagcccgaggacgctgtagcccccaggaagagggcgcggaggcagcgggcgaggctgcagggcagtgcgacggcggcggaagcgtccctactgaggcggacccacctctgcttccctcagcaagtcggacaccagactgcacgagctgcaccggggcccgcgcagcagcagggccctgcggcctgccagyatggatctcctgcgcccacactggctggaggtgtccagggacatcaccggaccgcaggcagccccctctgccttcccacaccaggagctgccccgggctctgccggcagctgcagccaccgcaggtgcgctggcctcgaggccacctattccaacgtggggctggcggcccttcccggggtcagcctggcggccagccctgtggtggccgagtatgcccgcgtccagaagcgcaaagggacccatcgcagtccccaagagccacagcaggggaagactgaggtgaccccggccgctcaggtggacgtcctgtactccagggtctgcaagcctaaaaggagggacccaggacccaccacagacccgctggaccccaagggccagggagcgattctggccctggcgggtgacctggcctaccagaccctcccgctcagggccctggatgtggacagcggccccctggaaaacgtgtatgagagcatccgggagctgggggaccctgctggcaggagcagcacgtgcggggctgggacgccccctgcttccagctgccccagcctagggaggggctggagacccctccctgcctccctgccctgaacactcaaggacctgtgctccttcctccagagtgaggcccgtcccccgccccgccccgcctcacagctgacagcgccagtcccaggtccccgggccgccagcccgtgaggtccgtgaggtcctggccgctctgacagccgcggcctccccgggctccagagaaggcccgcgtctaaataaagcgccagcgcaggatgaaagcgaaaaaaaaaaaaaaaaaagggcggccgc

SEQ ID NO: 885 - DNA, 1938 bp, Homo sapiens
  misc_feature (1296)..(1296): n equals a,t,g, or c
gcacacttctggctgctggtcttcatgcctctcttcttcgtgtcccccgtgtccgtggctgcctgcgtctggggctttcracacgataggtcgctggagctggagatcctgtgctcggtcaacatcctgcagttcatcttcatcgccctaaagctggacaggattattcactggccgtggctggtggtgtttgtgcccctgtggatcctcatgtcgttcctttgcctggtcgtcctctattacatcgtctggtccctcctgttcctgcggtccctggatgtggttgccgagcagcggagaacacacgtgaccatggctatcagttggataacgattgtcgtgcctctgctcacttttgaggtcctgctggttcacagattggatggccacaatacattctcctacgtctccatatttgtccccctttggctttccttactaactttaatggccacaacatttaggcgaaaggggggcaatcattggtggtttggcattcgcagagacttctgtcagtttctgcttgaaawtttcccatttttaagagaatatgggaacatttcatatgatctccatcacgaagatagtgaagatgctgaagaamcatcagttccagaagctccgaaaattgctccaatatttggaaagaaggccagagtagttataacccagagccctgggaaatacgttcccccccctcccaagttaaatattgatatgccagattaaactcctagagaggacccaggcacacacagactccacttggccttcgcctcttgttcattcatcccaaacctggaaatggaaacaggcttcaaacactcgtctcacgccgtgtttgagatcaccgcctcatcagtatgcatcatagatggaggtggtttcagtatgtgggtgtgtgtgatgtgtacctgggtaagagacttgctttccaggttcgcactttcaggtgtagctgggggcagtaagtcgaattgttttagtaggtcctcaaaaggaataaccacacagctgtttgtttaaatgctactgtacctatcaaaactattgtttaaaaagtatttttatacactgctaatctaaaattgtatttcagattgtgcctgtcataacaatagcaaatgtaaaaagttctctttcccaccacttgtttataaacctcatagttgatatttttagtgttcctactgttaaaatactctctccttgggctttgctgatactggtctttaatattctgataggtgaatttttctaatggaatgaacccatgcatatatagtatttatatgnaatattttagcagtgtaatatgttgaattctagttctctgcattaccattattacgttaaagtattttttaaagcttargtgtgaagatatgtgkctattgcagatgtccttggaaaactgcataaaacagtatgtgccyggtgtggatcttaccaaagtactaggcatgaatgtagggactgcaaatcccatgggtcttaatatttaggtgttagtaaccaaggtctctggtagtacccgttagtagaggaagaggccactgcccttgggaacttgtgacaggctctagtgtggtaccaggccataaagtgacactgttatttagcaacttgaatttytccacacaggtagtaactgtgtggaaataagcaacaagtggtttgtccatttctaagaatcttaaactattagttggctgtagtgtgaagcattacttgtcattggaaagatggagagagtggccttaaccggaagtggtcagtagaagcaggtgtcattttaagggccaaactttaatctgtcagcaatagggaaacaactgttcaaattatctttgtagataagaacagtgkttcttttttcttttcttttgkttttttgkttgkttgktttgktttgttttgagacagagtttcactctt

SEQ ID NO: 886 - DNA, 768 bp, Homo sapiens
  misc_feature (7)..(7): n equals a,t,g, or c
  misc_feature (707)..(707): n equals a,t,g, or c
  misc_feature (726)..(726): n equals a,t,g, or c
  misc_feature (743)..(743): n equals a,t,g, or c
tgcctgnagcgcgtgtgtaaaggactggggaggcgtgtcttgaaaaagcaactgcagaaattccttatgatgattgtgtgcaagttagttaacatgaaccttcatttgtaaattttttaaaatttcttttataatatgctttccgcagtcctaactatgctgcgttttataatagctttttcccttctgttctgttcatgtagcacagataagcattgcacttggtaccatgctttacctcatttcaagaaaatatgcttaacagagaggaaaaaaatgtggtttggccttgctgctgttttgatttatggaatttgaaaaagataattataatgcctgcaatgtgtcatatactcgcacaacttaaataggtcatttttgtctgtggcatttttactgtttgtgaaagtatgaaacagatttgttaactgaactcttaattatgtttttaaaatgtttgttatatttcttttcttttttcttttatattacgtgaagtgatgaaatttagaatgacctctaacactcctgtaattgtcttttaaaatactgatatttttatttgktaataatactttgccctcagaaagattctgataccctgccttgacaacatgaaacttgaggctgctttggttcatgaatccaggtgttcccccggcagtcggcttcttcagtcgctccctggaggcaggtgggcactgcanaggacactggaatccagancgagcgcagttcatgcncaaggccccgtgatttaaaatattg

SEQ ID NO: 887 - DNA, 1392 bp, Homo sapiens
  misc_feature (3)..(4): n equals a,t,g, or c
  misc_feature (6)..(6): n equals a,t,g, or c
  misc_feature (13)..(13): n equals a,t,g, or c
  misc_feature (18)..(18): n equals a,t,g, or c
aannanaactacntccgnttttaggtttagggggcctggccttgctgctgttttgatttatggaatttgaaaaagataattataatgcctgcaatgtgtcatatactcgcacaacttaaataggtcatttttgtctgtggcatttttactgtttgtgaaagtatgaaacagatttgttaactgaactcttaattatgtttttaaaatgtttgttatatttcttttcttttttcttttatattacgtgaagtgatgaaatttagaatgacctctaacactcctgtaattgtcttttaaaatactgatatttttatttgttaataatactttgccctcagaaagattctgataccctgccttgacaacatgaaacttgaggctgctttggttcatgaatccaggtgttcccccggcagtcggcttcttcagtcgctccctggaggcaggtgggcactgcagaggatcactggaatccagatcgagcgcagttcatgcacaaggccccgttgatttaaaatattggatcttgctctgttagggtgtctaatccctttacacaagattgaagccaccaaactgagaccttgatacctttttttaactgcatctgaaattatgttaagagtctttaacccatttgcattatctgcagaagagaaactcatgtcatgtttattacctatatggttgttttaattacatttgaataattatatttttccaaccactgattacttttcaggaatttaattatttccagataaatttctttattttatattgtacatgaaaagttttaaagatatgtttaagaccaagactattaaaatgatttttaaagttgttggagacgccaatagcaatatctaggaaatttgcattgagaccattgtattttccactagcagtgaaaatgatttttcacaactaacttgtaaatatattttaatcattacttctttttttctagtccatttttatttggacatcaaccacagacaatttaaattttatagatgcactaagaattcactgcagcagcaggttacatagcaaaaatgcaaaggtgaacaggaagtaaatttctggcttttctgctgtaaatagtgaaggaaaattactaaaatcaagtaaaactaatgcatattatttgattgacaataaaatatttaccatcacatgctgcagctgttttttaaggaacatgatgtcattcattcatacagtaatcatgctgcagaaatttgcagtctgcaccttatggatcacaattacctttagttgttttttttgtaataattgtagccaagtaaatctccaataaagttatcgtctgttcaaaaaaaaaaaaaaaaaaaaaaagctcgagggggggaccggtacccgggctga

SEQ ID NO: 888 - DNA, 768 bp, Homo sapiens
  misc_feature (581)..(581): n equals a,t,g, or c
  misc_feature (675)..(675): n equals a,t,g, or c
  misc_feature (721)..(721): n equals a,t,g, or c
  misc_feature (723)..(723): n equals a,t,g, or c
  misc_feature (742)..(742): n equals a,t,g, or c
ggtactgtgttggcttgttttgcagtgagacttattctgagattaagagctgcatttagcttcttggccaccaggatcccagagtaaattacttttcaggactctacatagtacgcaggagatttgaaagaactgatgcaatttctaaagcagcctgacttcctcccaggaggttactcccacaccaagcctctgacttcatgaccaccagatttagaaattgaagtatctatgtaagaagttgcctcctaggcagaaatcaagaaatccaactataacataggttagagtccattttggtttttatatccttccacagaggaaagaggaggaagaatctggagatgcgtttttggtttttggtttttkgtttttttttttttccagaggctcatgtatatcctacatcatggkcagtttcagagcagggctgkgccaccatctcagtgactcctggaatactaaattggatctttgtagaggaagaaaataacacagttctagattttccctagctgttaattagttttatggcataattaaaatagctcaggagtaaaaacaaagtccagccttaacancctgttaagtcttcttttcttatctgaaaagaggtaagataatgaagtttaaacagttgaagaagttaaccgggaaaggaattaacatttcaanggccttgccgctttcttcctcctcttgtgatatgaaccagaattgnangggaaaatagggcagggangggaaccccacactggaaattttcca

SEQ ID NO: 889 - DNA, 2087 bp, Homo sapiens
  misc_feature (17)..(17): n equals a,t,g, or c
  misc_feature (25)..(25): n equals a,t,g, or c
  misc_feature (73)..(73): n equals a,t,g, or c
  misc_feature (94)..(94): n equals a,t,g, or c
  misc_feature (1552)..(1552): n equals a,t,g, or c
cttcatctccctttcgnttaaggcncctcccttttttttttttccagaggctcatgtatatcctacattttgnttagtttcagagcagggctgngccaccatctcagtgactcctggaatactaaattggatctttgtagaggaagaaaataacacagttctagattttccctagctgttaattagttttatggcataattaaaatagctcaggagtaaaaacaaagtccagccttaacagcctgttaagtcttcttttcttatcttgaaaagaggtaagataatgaagtttaaacagttgaagaagttaaccggaaaggaattaacatttcaaggccttgccgcttcttcytcctcttgygatatgaaccagaattgagggaaaataggcaggagggaacccacactgaattttccagactctactgctgaaagacattgtatatttttattgtaatcatatgtgatgcaagataatattgctcatatctgaatcccaaaagaaaagaagatgtttgyctgagcatcccatgaggtaagcagccccatggaaggaccagctgcatccagcaaagggctccaggtccctgacgtagttgacggtgatggcagaagtaaatctttgtattcttgcagagactttgtttctgaaagaggccaaaagtcatttcaaactgaatctgacggataagataggggccatagctgagaaaaataagtagcgaagccgatctaaaccaaggtgtaactgtgaaatagtaaccatcttctttgcacgtttcaaaattggccctggacgccatcgcaagaggaaaattccaaagctgtgcagcagcggcagtaccattggaagagtttacagcctaccaggactacttagaaggggatcatgtttatttggatatataacccctgattggtttgttttaaaaataaacgttattatgttagtgtcatacctcatggtttccttggaacattctcctctaatcctctttgagagagtgggagggagagattgtgaggggagagagaagtgttaaacagagatgttcctaaggaggaccaggaatcctaaattacctaaataacccacttggttatctccactccttgatagcactgtgtgaggtatgatgcagtcaggtaaaggacaatttatctttgaagacaaagataaattcgagtccccattttcaagagtcagtgagaagtamcagcttgtttgtgtggcactgattgatccttgtccgggcaagtggtccctccacaggttatccggcttggcacacaacagacagaggtgctggcggactgtggaaccagacccgctgtggttcccctcctcaccctgccacttcctagctgtgcatcttggacaactgattgaatcttgtgcctcatttttctgtggaattgaaacaataccctgacccattgggcaatggagatcaaatggcattgatgcaggtaacatgcttaacacagggcctggtatgtagtgggcattcagtaagtggaagttacgattattattaggtatcaaagarcnaaacttaattgtcagawtaagcaaaccagttggaataataaacgtagcctttagagttaaatggcacaaccctgatagccacacataaactgttttggttatttttcgttggatattcccagtctttatttctacatccctcttcaggctgagtgcttaaaatacatttatatgtagtctcaattagattatgctgtttcccccaaaagactacagtgactattattttaatttatagaacctcgaattgcatggaatagctaccacatctccctttaaacctggtagcttccaaaacttcctgatggcgttttcgcaaatgggtccctatgtgtcattgaaggagacagtgtatctaggaaaagaaatgaggatactgagcaaggtgttggtggctcatgcctataattccagcattttgggagactaaggcaggtagctagcttgaggccaggagttcaagaccagcctggccaacacaatgagaccccatctccacaaaaaaaaaaaaaaaaaaaaaaaaaagggcggccgc

SEQ ID NO: 890 - DNA, 2096 bp, Homo sapiens
  misc_feature (2070)..(2070): n equals a,t,g, or c
  misc_feature (2083)..(2083): n equals a,t,g, or c
  misc_feature (2090)..(2090): n equals a,t,g, or c
ggaggaacggtggaagtcgccggaagttcggtgggctccaggcgtcgcgatggaggagagcgggtacgagtcggtgctctgtgtcaagcctgacgtccacgtctaccgcatccctccgcgggctaccaaccgtggctacagggctgcggagtggcagctggaccagccatcatggagtggccggctgaggatcactgcaaagggacagatggcctacatcaagctggaggacaggacgtcaggggagctctttgctcaggccccggtggatcagtttcctggcacagctgtggagagtgtgacggattccagcaggtacttcgtgatccgcatcgaagatggaaatgggcgacgggcgtttattggaattggcttcggggaccgaggtgatgcctttgacttcaatgttgcattgcaggaccatttcaagtgggtgaaacagcagtgtgaatttgcaaaacaagcccagaacccagaccaaggccctaaactggacctgggcttcaaggagggccagaccatcaagctcaacatcgcaaacatgaagaagaaggaaggagcagctgggaatccccgagtccggcctgccagcacaggagggctgagcctgcttccccctcccccaggggggaaaacctccaccctgatccctccccctggggagcagttggctgtggggggatccctcgtccagccagcagttgctcccagttcaggaggtgctcctgtaccctggccacagcccaatcctgccactgctgacatctggggagactttaccaaatctacaggatcaacttccagccagacccagccaggcacaggctgggtccagttctgacctgagcacggtttttcctcatgtgacttctgggaaggcgctccctcatctgggccaaaggaaggaggacgaagccctcctcagctggcctgtgtttggggcatgaatctctcctctcctccttgtctggctctgttgacaaaccgggcatgtttggcagtaaattggcaccgtgtcacactgtttcctgggattcaagtatgcaaccagaacacaggagaagaaaagctccaggatccctgtccccatctgtcctcttgatgtgagagagactctgagacttcttccatcgcaatgacctgtattaaacacaagccccccaagcaaaagaagaggttgagtttgctgccaggattcagatcagcccttcccagggtctgcaggtgtcacatgatcacagttcagcgggaggctttccgtacccacactggctgtagccacttcagtccatctgccctccagaggaggggtttcttcctgatttttagcaggtttagaggctgcagcttgagctacaatcaggagggaaattggaaggattagcagcttttaaaaatgtttaaatattttgctttgctaatgtgctgatccgcactaactcatctttgcaaaaggaactgctccctcggcgtgccccagctggggcctctgaagggattcctcactgtgggcagctgccctgagcttcaggcagcagtgttcatctctggccagttgtctggtttccatgtattctaggccaggtaggcaacacagagccaaggcgggtgctggaagccagacggaacagtgttggggcaggaaggtggatgctgttgtcatggagctgtgggagttggcactctgtctgctggtggccctctcggctcacatgttcacagtgcagctcctggcagacttgggttttctctttggtggtttctaaagtgccttatctgcaaacaacttcttttctccttcaggaactgtgaatggctagaagaaggagctcagtaaactagaagtccagggttgcttggtttactggtttataagaaatctgaaagcacctctgacattccttttattaactcacctctcagttgaaagatttcttctttgaaaggtcaagaccgtgaactgaaaaaagtgttggcctttttgcgggaccagatttttaagataaaataaatatttttacttctgtcattgtatgtgaaaagatgaatgtgtttctggcgcgtggctgntaaaactcttcanggtgccncaagct

SEQ ID NO: 891 - DNA, 1707 bp, Homo sapiens
ccacgcgtccgggcctgagtcctctgacctctattcagaaatccctgccctgacccgctgtgccaaggttagcacctgccagaatcaaccaaggccggacaaggcatgaggagcgctgcttcctgggcctggctcctcccccttctccccatttgggctgctgtgccagggcttgctccagccacctgggtgtgagctatgccctctgccagaaatgctctttcctctattggcctggccacacctactcagtctttgggtctgtttaactgccacttcccccagtaaaccttctgctccccattcacatcagatggacttgtgtctcttgcactagtctatgagatttggatgtctgtgtccttagggcccaagctggccactctggcccagaagcagcctcgggccatgtcttgtctacagggtgtggggggacagtatgtgcacccccttgctttctcaggtggactttgaacagctgactgagaacctggggcagctggagcgccggagccgggcagccgaggagagcctgcggacttggccaagcatgagctggccccagccctgcgtgcccgcctcacccacttcctggaccagtgtgcccgcgcgtgttgccatgctaaggatagtgcaccgccgtgtctgcaataggttccatgccttcctgctctacctgggctacaccccgcaggcggcccgtgaagtgcgcatcatgcagttctgccacacgctgcgggaatttgcgcttgagtatcggacttgccgggaacgagtgctacagcagcagcagaagcaggccacataccgtgagcgcaacaagacccggggacgcatgatcaccgaggtgggtgcccttccaggtcttagtcttgactgccacctccttggtttccttcgctcctcccagctcacccttcttctttctccagacagagaagttctcaggtgtggctggggaagcccccagcaacccctctgtcccagtagcagtgagcagcgggccaggccggggagatgctgacagtcatgctagtatgaagagtctgctgaccagcaggcctgaggacaccacacacaatcgccgcagcagaggcatggtccagagcagctccccaatcatgcccacagtggggccctccactgcatccccagaagaacccccaggctccagtttacccagtgatacatcagatgagatcatggaccttctggtgcagtcagtgaccaagagcagtcctcgtgccttagctgctagggaacgcaagcgttcccgcggcaaccgcaagtcttgtaagtaaccccccacaatcccactgcccacctgaaccccatcaaccccctccaaccctgctctgtccctgcagtgagaaggacgttgaagagtgggctcggagatgacctggtgcaggcactgggactaagcaagggtcctggcctggaggtgtgaaggtgctgtatcccggaaatctatctggaccctggactgcagtgcaggagatgacagagtgaggagggcccagagcagaattctggccccagaactctgtgcccaggagccatgccttgagcagtattagccgtgtgtgtatgcatgtgagtgtgtgtgtatgtgtgtgtgtgcatgcatatgcatgtgcatgtgtgtgagctccttgaacgcacggagcaaaataaaattttcttagctaatccaaaaaaaaaaaa

SEQ ID NO: 892 - DNA, 1239 bp, Homo sapiens
cccacgcgtccgcccacgcgtccgcccacgcgtccggctgcggcgcgatggcggcggggctggcgcggctcctgttgctcctcgggctctcggccggcgggcccgcgccggcaggtgcagcgaagatgaaggtggtggaggagcccaacgcgtttggggtgaacaacccgttcttgcctcaggccagtcgcctccaggccaagagggatccttcacccgtgtctggacccgtgcatctcttccgactctcgggcaagtgcttcagcctggtggagtccacgtacaagtatgagttctgcccgttccacaacgtgacccagcacgagcagaccttccgctggaacgcctacagtgggatcctcggcatctggcacgagtgggagatcgccaacaacaccttcacgggcatgtggatgagggacggtgacgcctgccgttcccggagccggcagagcaaggtggagctggcgtgtggaaaaagcaaccggctggcccatgtgtccgagccgagcacctgcgtctacgcgctgacgttcgagacccccctcgtctgccacccccacgccttgctagtgtacccaaccctgccagaggccctgcagcggcagtgggaccaggtagagcaggacctggccgatgagctgatcaccccccagggccatgagaagttgctgaggacactttttgaggatgctggctacttaaagaccccagaagaaaatgaacccacccagctggagggaggtcctgacagcttggggtttgagaccctggaaaactgcaggaaggctcataaagaactctcaaaggagatcaaaaggctgaaaggtttgctcacccagcacggcatcccctacacgaggcccacagaaacttccaacttggagcacttgggccacgagacgcccagagccaagtctccagagcagctgcggggtgacccaggactgcgtgggagtttgtgaccttgtggtgggagagcagaggtggacgcggccgagagccctacagagaagctggctggtaggacccgcagggaccagctgaccaggcttgtgctcagagaagcagacaaaacaaagattcsaggttttaattaattcccatactgataaaaataactccatgaattctgtaaaccattgcataaatgctatagtgtaaaaaaatttaaacaagtgttaactttaaacagttcgctacaagtaaatgattataaatactaaaaaaaaaaaaaaa

SEQ ID NO: 893 - DNA, 1333 bp, Homo sapiens
  misc_feature (485)..(486): n equals a,t,g, or c
  misc_feature (493)..(493): n equals a,t,g, or c
  misc_feature (496)..(496): n equals a,t,g, or c
  misc_feature (587)..(587): n equals a,t,g, or c
  misc_feature (633)..(633): n equals a,t,g, or c
  misc_feature (1330)..(1330): n equals a,t,g, or c
agctggtaccaaagcaagtttttcactgagctctcatgaaagatcctcagtctcttgtggatttagaatcctgcagcagcccaccatctaagagcaagarccaaagatgtttgtcttgctctatgttacaagttttgccatttgtgccagtggacaaccccggggtaatcagttgaaaggagagaactactcccccaggtatatctgcagcattcctggcttgcctggacctccagggccccctggagcaaatggttcccctgggccccatggtcgcatcggccttccaggaagagatggtagagacggcaggaaaggagagaaaggtgaaaagggaactgcaggtttgagaggtaagactggaccgctaggtcttgccggtgagaaaggggaccaaggagagactgggaagaaaggacccataggaccagagggagagaaaggagaagtaggtccaattggtcctcctggaccaaagggagacnnatgatanctntgggacccggggctgcctggagtttgcagatgtggaagcatcgtgctcaaatccgccttttctgttggcatcacaaccagctacccagaanaaagactacctattatatttaacaaggtcctccttccacgaggganagcactacaaccctgccacaggggaagttcatctgtgctttcccaggggatctattacttttcttatgatatcacattggctaataagcatctggcaatcggactggtacacaatgggcaataccggataaagaccttcgacgccaacacaggaaaccatgatgtggcttcggggtccacagtcatctatctgcagccagaagatgaagtctggctggagattttcttcacagaccagaatggcctcttctcagacccaggttgggcagacagcttattctccgggtttctcttatacgttgacacagattacctagattccatatcagaagatgatgaattgtgatcaggaccaagatccctgtggtaaacactctgattgaatctggggttccagaaggtggaacaagcaggaatgggatccaaagagactcccactcagattctaaagcatttaaagacaattctagcagaatttatcaaaacaagatgaaacacagaaaagttgaaaccacaacaaaatgaattctattaaagaatagccccagatataaattctcttgaaagcaatgttcataaatatttaagcaaattaaagacaatgttaacaaattttctattaaatgccctgagtgataaaaccagttggcaataatattgccttattaaatcttcaaaaaataaaaaaaattaaaanaaa

SEQ ID NO: 894 - DNA, 1797 bp, Homo sapiens
ggtcgacggtatcgataagcttgatatcgaattcctgcaacagttcttggaaacccactcgagagggccacgcctccattcaccaggccacgcatcacaagaggcaacaccaggagccaacatgagctcggggactgaactgctgtggcccggagcagcgctgctggtgctgttgggggtggcagccagtctgtgtgtgcgctgctcacgcccaggtgcaaagaggtcagagaaaatctaccagcagagaagtctgcgtgaggaccaacagagctttacggggtcccggacctactccttggtcgggcaggcatggccaggacccctggcggacatggcacccacaaggaaggacaagctgttgcaattctaccccagcctggaggatccagcatcttccaggtaccagaacttcagcaaaggaagcagacacgggtcggaggaagcctacatagaccccattgccatggagtattacaactgggggcggttctcgaagcccccagaagatgatgatgccaattcctacgagaatgtgctcatttgcaagcagaaaaccacagagacaggtgcccagcaggagggcataggtggcctctgcagaggggacctcagcctgtcactggccctgaagactggccccacttctggtctctgtccctctgcctccccggaagaagatgaaggaatctgaggattatcagaacttcagcattccatccattcagtggcgcgagtccaggaaggtcatggggcaactccagagaagaaagcatcccctggcccggtgggaagcccagacgaggaggacggggaaccggattacgtgaatggggaggtggcagccacagaagcctagggcagaccaagaagaaaggagccaaggcaaagagggaccactgtgctcatggacccatcgctgccttccaaggaccatttcccagagctactcaacttttaagcccctgccatggttgctcctggaaggagaaccagccaccctgaggaccacctggccatgcgtgcacagcctgggaaaagacagttactcacgggagctgcaggccccgtcaccaagccctctcccgacccaggctttgtggggcaggcacctggtaccaagggtaacccggctcctggtatggacggatgcgcaggatttaggataagctgtcacccagtccccataacaaaaccactgtccaacactggtatctgtgttcttttgtgctatgaatttggattcctaattgctattgttggttgctggggttttaaatgattgataagcttgtacagttaacttatagagggggagccatatttaacattctggatttcagagtagagatttctgtgttgtctcctagaaagcattacatgtagtttatttcagcatccttgttgggtggggccctggctctcttcccctttggtgggacctcccctttctttgggcttcagttcactcaggaagaaatgaggctgtcgccatctttatgtgcttccagtggaaatgtcacttgctacagacaatagtgcatgagagtctagagaagtagtgaccagaacagggcagagtaggtcccctccatggccctgaatcctcctctgctccagggctggcctctgcagagctgattaaacagtgttgtgactgtctcatgggaagagctggggcccagagggaccttgagtcagaaatgttgccagaaaaagtatctcctccaaccaaaacatctcaataaaaccattttagttgaaaaaaaaaaaaaaaaaaaaaaaaaaaaaaaaaaa

SEQ ID NO: 895 - DNA, 1140 bp, Homo sapiens
ctaggagcctcctaatgcagtgttctgcacagtcctggggactgactgactgaatcacacctctggggctgggggctgctgacatgtgtgcctttccttggctgcttcttctcctgctgctccaggarggcagccaaaggagactctggagatggtgtggatccgaggaagtggttgcggtccttcaggagtccatcagcctccccctggaaataccaccagatgaagaggttgagaacatcatctggtcctctcacaaaagtcttgccactgtggtgccagggaaagagggacatccagctaccatcatggtgaccaatccacactaccagggccaagtgagcttcctggaccccarctattccctgcatatcagcaatctgagctgggaggattcagggctttaccaagctcaagtcaacctgagaacatcccagatctctaccatgcagcagtacaatctatgtgtctaccgatggctgtcagagdccccasatcactgtgaactttgagagttctggggaaggtgcctgcagtatgtccctggtgtgctctgtggagraaggcaggcatggatatgacctacagctggctctcccggggggatagcacttatacattccatgaaggccctgtcctcagcacatcctggaggccgggggacagtgccctctcctacacctgcagagccaacaaccccatcagcaacgtcagttcttgccccatccctgatgggcccttctatgcagatcctaactatgcttctgagaagccttcaacagccttctgcctcctggccaagggattgctcatcttcttgctcttggtaattctggccatgggactctgggtcatccgagtccagaaaagacacaaaatgccaaggatgaagaaactcatgagaaacagaatgaaattgaggaaggaggcaaagcctggctccagccctgcctgactgctccttgggaaccccagtcctgagcttggtttcttcccagcacccagagaatccttcctcagctctcttctttccaggggaaggaggtgctcaggggtgggtatccagagagccatacttctgagggaagactggctggcaataaagtcaaattaagtgaccaccaaaaaaaaaaaaaaaaa

SEQ ID NO: 896 - DNA, 738 bp, Homo sapiens
  misc_feature (646)..(646): n equals a,t,g, or c
  misc_feature (670)..(670): n equals a,t,g, or c
  misc_feature (696)..(696): n equals a,t,g, or c
  misc_feature (707)..(707): n equals a,t,g, or c
  misc_feature (718)..(718): n equals a,t,g, or c
catcagaccacacccagcagtcagaaaagaggtgcaggggcccgggctgggacagtgaagagtgctgggcagtctgtggtcctctgtatctcaactttttcatcttaaaaaaacaaatagggttgtgtgtgtggctggtggtcataaggtcctttctggctctaataacctgagcttctgttatgaagctgggacccttagagcctcaggatgatcctctgtttgtttgtgaagccccaatcaggtgctaagcaccatagtggcacttagctgaagctcctctgtaactcctgtgggccctgccttgcccacccccgacagctgctgcagtgctcctgagcagcacaggcctgatggagcttctggagaagatgctggccctcaccttggcaaaggcagattctcccaggactgcactcctctgctctgcctggctgctcactgcctccttctctgcccagcagcacaagggcagtttgcaggttcaccagacactctctgtggaaatggaccargtattgaaggctctcagctttccaaagaaaaaggctgcactactctcaactgccatcttatgcttcctgcggacagccctgcgacaaagcttttcctctgcctggaaccctggtgcccttaagggcccagncactgcagccaccaaggacactgncctaacttcactgcgaatgtccaagnccggccctggncattgggctgnaaaaacctcctggtgcaaaa

SEQ ID NO: 897 - DNA, 935 bp, Homo sapiens
  misc_feature (6)..(6): n equals a,t,g, or c
  misc_feature (14)..(14): n equals a,t,g, or c
  misc_feature (16)..(16): n equals a,t,g, or c
  misc_feature (50)..(50): n equals a,t,g, or c
  misc_feature (95)..(95): n equals a,t,g, or c
  misc_feature (101)..(101): n equals a,t,g, or c
  misc_feature (139)..(139): n equals a,t,g, or c
  misc_feature (176)..(176): n equals a,t,g, or c
ggccancttttttntnggggaaaaaatgggacccaaaagttatttgaaangggctttttcaagctttttcccaaaaggaaaaaaagggttgccantaattnttcaaggattgcccatctttaatgctttccttgggganaagccttgcgacaaaagctttttccttctgccctggnagccctggtgccttcaggggcccagccactgccagccaccaaggacactgtcctagctccactgcgaatgtcgcaagtccggtccctggtcattgggctgcagaacctcctggtgcagaaggaccctctattgtcccaggcctgtgttggctgcctggaggccttgcttgactacctggatgcccggagcccagacattgctctccacgtggcctcccagccttggaatcggtttttgctgtttaccctcttggatgctggagagaattccttcctcagacctgagattttgaggctcatgaccctgtttatgcggtaccggagtagcagtgtcctctctcatgaagaggtgggtgatgttctgcaaggtgtggctttggctgacctgtctaccctctcgaacaccacactccaggccctgcatggcttcttccagcagctccagagcatgggacacctggctgaccacagcatggcccagaccctgcaggcctccttggagggccttccccctagcacctcctcaggccagccacccctgcaggacatgctctgcctgggaggggtggctgtatccctgtcccacatcagaaactgatcctcaggacttgaaggcccagaagtggagagagaatgagacctggagacaaagggcataattgttggggaaatggatgacagctgaagctattcatatggagccatatactctattgttgaaatagaataaggaaataaaatgatacactcacaaaaaaa

SEQ ID NO: 898 - DNA, 810 bp, Homo sapiens
  misc_feature (688)..(688): n equals a,t,g, or c
gatcctccacatccttccatggctctgaagaataaattcagttgtttatggatcttgggtctgtgtttggtagccactacatcttccaaaatcccatccatcactgacccacactttatagacaactgcatagaagcccacaacgaatggcgtggcaaagtcaaccctcccgcggccgacatgaaatacatgatttgggataaaggtttagcaaagatggctaaagcatggggcaaaccagtgcaaatttgaacataatgactgtttggataaatcatataaatgctatgcagctttkgaawawgttggagaaaatatctggttaggtggaataaagtcattcacaccaagacatgccattacggcttggtataatgaaacccaattttatgattttgatagtctatcatgctccagagtctgtggccattatacacagttagtttgggccaattcattttatgtcggtkgtgcarttgcaatgtgtcctaaccttgggggagcttcaactgcaatatttgtatgcaactacggacctgcaggaaattttgcaaatatgcctccttacgtaagaggagaatcttgctctctctgctcaaaagaagagaaatgtgtaaagaacctctgcaaaaatccatttctgaagccaacggggagagcacctcagcagacagcctttaatccattncagcttaggttttcttcttctgagaatcttttaatgtcatttatatacaaaagaaattctcaaatgttaaaataaaggaatagtttattgcttaaaaaaaaaaaaaaaaaaaaaaaactcga

SEQ ID NO: 899 - DNA, 1092 bp, Homo sapiens
gctacgaccctgattacgccaagctcgaaattaaccctcactaaagggaacaaaagctggagctccaccgcggtggcggccgctctagaactagtggatcccccgggctgcaggaattcggcacgagcggtttccgcggtggccatgactgcggccgtgttcttcggctgcgccttcattgccttcgggcctgcgctcgccctttatgtcttcaccatcgccaycgagccgttgcgtatcatcttcctcatcgccggagctttcttctggttggtgtctctactgatttcgtcccttgtttggttcatggcaagagtcattattgacaacaaagatggaccaacacagaaatatctgctgatctttggagcgtttgtctctgtctatatccaagaaatgttccgatttgcatattataaactcttaaaaaaagccagtgaaggtttgaagagtataaacccaggtgagacagcaccctctatgcgactgctggcctatgtttctggcttgggctttggaatcatgagtggagtattttcctttgtgaataccctatctgactccttggggccaggcacagtgggcattcatggagattctcctcaattcttcctttattcagctttcatgacgctggtcattatcttgctgcatgtattctggggcattgtattttttgatggctgtgagaagaaaaagtggggcatcctccttatcgttctcctgacccacctgctggtgtcagcccagaccttcataagttcttattatggaataaacctggcgtcagcatttataatcctggtgctcatgggcacctgggcattcttagctgcgggaggcagctgccgaagcctgaaactctgcctgctctgccaagacaagaactttcttctttacaaccagcgctccagataacctcagggaaccagcacttcccaaaccgcagactacatctttagaggaagcacaactgtgcctttttctgaaaatccctttttctggtggaattgagaaagaaataaaactatgcagatatgcgttccattcaaaaaaaaaaaaaaaaaaaaaaaaaraaaaaaaaaaaaaaaa

SEQ ID NO: 900 - DNA, 284 bp, Homo sapiens
  misc_feature (5)..(5): n equals a,t,g, or c
aggancccaatttttatcggggaaaatttttatcccccggttcgcgggcgggtggggatgtcagcgtgtcaggggggggggggggggggggggggggggggggggggggggggggggggggggggggggggggggggggggggggggggggggggcgttgataagctaccctgtctcaccatgtgctggtgtggaaacggggcccagccagcacgcctcaaggtagatggaatccccactggtcagagaaaaagctatgcggacactccagcttggcctgggtc

SEQ ID NO: 901 - DNA, 1494 bp, Homo sapiens
  misc_feature (52)..(52): n equals a,t,g, or c
  misc_feature (453)..(453): n equals a,t,g, or c
agacttcatcatgaaattttagccaagtcttatgtccagaatggtatttctnaggttatttttcagagtttttatagtttaatgttttatatttaagtctttaatccttcttaagttgatttttgtatgcagagtaagctgggggcccagtttcaatcttctgcatatggctagccagtaatcccagcaccatttattaaatggggacttctttccccattgcttgtttttgtcagctttgtccaagatcagatgattgtaggtgtacagcattatttctggactctctgttatgttccatttatctgtgtgtctgtttttctactaataccatgctgttttggttactgtagctctgtagtatggtttgaggtttggtaacttgatgcctccccttttgttctttatgtttaggattgccttggctaggctcttttttggttccatatgaantttaaagtagtttctaattctgtgaagaatgtcattggtagtttgataggatagcattgaactatttgctcaactcaacattttaggaatttatttctgctgtctagtgctcaaaacttgcagctagaattgagggaagagagagaccttcttatattgttttatattgtttkatactcagtacctgttttaagaaaaaacaacaaggaagtaaaaccaaagacargcagcccrgcgccaggcccraaaccaggcctgggcctgcctggcctaaacccagtagttaaaaatcaactcataacttagaaacygatgttattcatagattccagacattgtatagaagaacattgtgaaactccctgccctgttctgtttctctctgaccaccggtgcatgcagcccctgtcaygtaccgcctgcttgctcaaatcaatcaygaccctttcatgtgaaatctttagtgttgtgagcccttaaaagggacagaaattgtgcaytyggggagctcggattttaaggcagtagcttgcygatgctcccagctgaataaagcccttccttctacaaytyggtgtctgagrggttttgtctgcggctcgtcctgctacatttcttggttcctgaccaggaaacgaggtaactgatggacagccgaggcagccccttaggcggcttaggctcccctgtggagcrtcmctgrggcggastccggccagcccgagtgacgcgatccaaagagcactcccgggtaggaaattgccccggtggaatgcctcaccagagcagcgtgtagcagttccctgtggaggattaacacagtggctgaacaccgggaaggaactggcacttggagtccggacatctgaaacttgatctccagcaccctgccggtggactactgagagacgaggtgccagggtggttcctgaaagtgcctgagccccaacttatcagcaaggagctcatcatgctgacagaagtcatggaggtctggcatggcttagtgatcgcggtggtgtcctcttcctgcaggcctgc

SEQ ID NO: 902 - DNA, 1014 bp, Homo sapiens
  misc_feature (12)..(12): n equals a,t,g, or c
  misc_feature (16)..(16): n equals a,t,g, or c
  misc_feature (19)..(19): n equals a,t,g, or c
  misc_feature (78)..(78): n equals a,t,g, or c
  misc_feature (83)..(83): n equals a,t,g, or c
  misc_feature (124)..(124): n equals a,t,g, or c
  misc_feature (929)..(929): n equals a,t,g, or c
  misc_feature (1000)..(1000): n equals a,t,g, or c
  misc_feature (1007)..(1007): n equals a,t,g, or c
tggattcccccngggnttncaggaatttccgcacgaggttcttccccctgaacttggagggggggaaaaaggattttnagggncatagagtccacgggctgggcccaaacagcaggttccaggnttccaccgccccagtgatttccaggctctctggctgaaggctgcctgcctggaggggacatcagggaagaggcttccggagaggggatgggagaaagtaggggatgtggcttgagctgcagtcacaggccttggctggaccagggatggcccccagctcccaggagggcccactgaccctgcagctccagccttctccatacttcaacaaagaatgagttgtggcaatgagggaagagagaccctctcatagtgttttatactcagtacctgttttaagaaaaaacaacaaggaagtaaaaccaaagacaggcaggcagcctggcgctaggcccgaaaccaggcctgcgcctgyctggcctaaacccagtagttgaaaatcaattcataacttagaaaccgatgttattcatagattccagacattgtatagaagaacatttgtgaaactccctgccgtgttctgtttctctctgaccgccggtgcatgcagcccctgtcacgtaccgcctgcttgctcaaatcaatgacgaccctttcatgtgaaatcttyrgtgttgtgagcccttaaaagggacagaaattgtgcacttgrggagctcrgattttaaggcwgtagcttgccgatgctcccagctgaataaagcccttccttctacaactctgagaggttttgtctgcggctcgtcctgctacatttcttggttccctaaccaggaaacgaggtgactgacggacggctgagacagcccttaggcaacttaggcctgccccgtggagcgtccctgcggggactccggccagcntgagtgatgccatccaaagagtgctcctgggtaagcattgccccggtggaaggccttgccagagcagcacntagcagnccctgcg

SEQ ID NO: 903 - DNA, 1038 bp, Homo sapiens
ggcacgaggcgcctcggacggccgtcggggccgagaaaccatgagccccaggggcacgggctgctccgccgggctgctgatgactgtcggctggctgcttctggcgggcctccagtccgcgcgcgggaccaacgtcaccgctgccgtccaggatgccggcctggcccacgaaggcgagggcgaggaggagaccgaaaacaacgacagcgagaccgcggagaactacgctccgtctgaaaccgaggatgtttcaaataggaatstcgtcaaagaagtagaattcggaatgtgcaccgttacatgtggtattggtgttagagaagttatattaacaaatggatgccctggtggtgaatccaagtgtgttgtacgggtagaagaatgcccgtggaccaacagattgtggctggggtaaaccaatttcagaaagtcttgaaagtgttagattggcatgtattcacacatctcccttaaatcgtttcaaatatatgtggaacttctaagacaagaccacaatccattatacttgtaaatgattcagcaatcctagaagtacgcaaggaaagtcaccccttggctttcgagtgtgacacactggataataatgaaatartagcaactattaaattcacagtctatacgagcagtgaattgcagatgagaagatcaagcctaccagccactgatgccagccctaatttttgtgctgaccataggagtcattatctgtgtatttataattttcttattgatcttcataatcataaattgggcagcagtcaaggctttctggggggcaaaagcctctacacctgaggtacaatccgagcagagttctgtgagatacaaagattcaacttctcttgaccaattaccaacagaaatgcctggtgaagatgatgctttaagtgaatggaatgaatgatgtttgaatgatatataacaaaccaaaggatattacagaatattagattcattattacaaaaataaaatacacattgaaatactttaaaaaaaaaaaaaaaaaaaaaactcga

SEQ ID NO: 904 - DNA, 745 bp, Homo sapiens
  misc_feature (312)..(312): n equals a,t,g, or c
gtacaggactgagaagcagataacaagagtgacgctcacagggctgggctgacgctaacaggaggcagtgtgtggctcgaagattcttgaacccacagcagcagctgcggccaccccatcctgcccacagctccagccctgagacgacgaggaggagagtcgactttgcctcttgcccaagggaccatgcccaggtgccggtggctctccctgatcctcctcaccattcccctggccctggtggccaggaaagacccaaaaaagaatgagacgggggtgctgaggaaattaaaacccgtcaatgccttcaantgccaacgtggaagcagtgtyygtggttttgccatgcaagaatacaacaaagagagcgaggacaagtatgtcttcctggtggtcaagacactgcaagcccagcttcaggtcacaaatcttctggaataccttattgatgtagaaattgcccgcagcgattgcagaaagcctttaagcactaatgaaatcgcgccattcaagaraactccaagctgaaaaggaaattaagctgcagctttttggtaggagcacttccctggaatggtgaattcactgtgatggagaaaaagtgtgaagatgcttaatggtgttttgaggcatccctccaacctctgtgactactttatccatgaaaatgaagcaatggtcaggtgggaggctcttcccaatgtgctttcttcaaaaaaaaaaaaaaaaaaaaaaaaaaactcga

SEQ ID NO: 905 - DNA, 1147 bp, Homo sapiens
ggcacgagacccattgagcagaaggaggccaggtgggaaagctcctgggaagagcagccagactggacactgggctgcttgagtcctgagtcacaattcagaattcctgggctccctgggtgcattctatcattccagttgaaagtttgcttccttccagtcatgtggctcttcattctactctccttggctctcatttcagatgccatggtcatggatgaaaaggtcaagagaagctttgtgctggacacggcttctgccatctgcaactacaatgcccactacaagaatcaccccaaatactggtgccgaggctatttccgtgactactgcaacatcatcgccttctcccctaacagcaccaatcatgtggccctgaaggacacagggaaccagctcattgtcactatgtcctgcctgaacaaagaagacacgggctggtactggtgtggcatccagcgggactttgccagggatgacatggattttacagagctgattgtaactgacgacaaaggaacctggccaatgactttggtctgggaaagactatcaggcacaaaaccagaagctgcaaggctcccaaagttgtccgcaaggctgaccgctccaggacgtccattctcatcatttgcatactgatcacgggtttgggaatcatctctgtaatcagtcatttgaccaaaaggaggagaagtcaaaggaatagaagggtaggcaacactttgaagcccttctcgcgtgtcctgactccaaaggaaatggctcctactgaacagatgtgactgaagatttttttaatttagttcataaagtgatgctacaacagaataatcaccatgacaactggccccacacctcagagactgattctgatctcccaggaattctgaaggtccctctatccttgacaacaatcatttgcagccaggtagcaacggcagtagtcagaggagctatgatagaccacacccaagcaaggctgccctcaaataacatctcaagatcttagttcttatgcattccatcagtcagaagtgaagaagaggtggagaatctggattggggaccaggaaatcacttgtattttgttagccaataaattcctagccagtgttgaatgaaaaaaaaaaaaaaaaaaaaaaaa

SEQ ID NO: 906 - DNA, 1134 bp, Homo sapiens
  misc_feature (418)..(418): n equals a,t,g, or c
  misc_feature (803)..(803): n equals a,t,g, or c
  misc_feature (816)..(816): n equals a,t,g, or c
acccattgagcagaaggaggccaggtgggaaagctcctgggaagagcagccagactggacactgggctgcttgagtcctgagtcacaattcagaattcctgggctccctgggtgcattctatcattccagttgaaagtttgcttccttccagtcatgtggctcttcattctactctccttggctctcatttcagatgccatggtcatggatgaaaaggtcaagagaagtttgtgctggacacggcttctgccatctgcaactacaatgcccaytacaagaatcaccccaaatactggtgccgaggytatttccgtgaytactgcaacatcatcgccttctcccctaacagcaccaatcatgtggccctgaaggacacagggaaccagctcattgtcactatgtcctgcctgaacaaanaagacacgggctggtactggtgtggcatccarcgggactttgcmagggatgacatggattttacagagctgattgtaactgacgacaaaggaaccctggccaatgacttttggtctgggaaagacctatcaggcaacaaaaccagaagctgcaaggctcccaaagttgtccgcaagctgaccgctccaggacgtccattctcatcatttgcatactgatcacgggtttgggaatcatctctgtaatcagtcatttgaccaaaaggaggagaagtcaaaggaatagaagggtaggcaacactttgaagcccttctcgcgtgtcctgactccaaaggaaatggctcctactgaacagatgtgactgaagwtttttttaatttagttncataaagtgatgnctacaacagawtaatcacccatgacaactggccccacacctcagagactgattctgatctcccaggaattctgaaggaccctctatccttgacaacaatcatttgcagccaggtagcaacggcrgtagtcagaggagctatgatagaccacacccaagcaaggctgccctcaaataacatctcaagatcttagttcttatgcattccatcagtcagaagtgaagaagaggtggagaatctkgattggggaccaggaaatcacttgtattttgttagccaataaattcctagccagtgttgaatgaaaaaaaaaaaaaa

SEQ ID NO: 907 - DNA, 632 bp, Homo sapiens
  misc_feature (537)..(537): n equals a,t,g, or c
  misc_feature (579)..(579): n equals a,t,g, or c
tttgagcactactgggtggttagcatgattgaggaaaaatgatgggaataagaagtggaagtggtctttgtatcacaagttgaatttctcactttgagtagtagtgaagtcactactgtaagagctggtcagtgaatgtggttgcagcatggcctttgggcaagaagtaacccatttaactaaaaccagctggttggccccactcagatttatcaaagggttactgggtccctgggggtggatattgcttatattagacttagaatagcatactgttttaatattatatgaactaaaatgtttctttaaaaaaagagtggtctgttaatggatttatgtagtggtcaagaatttagacttcagagtcaaataaacctatatcagtcctagtcctacagtttactaattgtgagatgkcaagcaagkttttgaactcctctaagcctctgktttcttatctataaattaataaatgaatgaatcgggttgagtgaataattaagtaaaatcttaagacatactagttattggaactgngaaactgggttttttgggaatgggtttcacatttgggaagtngaaataccactttctaaaggtctggtttatctcaaatctctatccaggcctaa

SEQ ID NO: 908 - DNA, 2036 bp, Homo sapiens
  misc_feature (521)..(521): n equals a,t,g, or c
  misc_feature (687)..(687): n equals a,t,g, or c
  misc_feature (1799)..(1799): n equals a,t,g, or c
  misc_feature (1807)..(1807): n equals a,t,g, or c
gtctcaaacatgcacgtgtacctttaggatgaatttctgcaattggatgtgccaaggccagagcgtgtgcatttgtggctttggttgacatcaccaagtcgcccttcctggggcctgtgctggtgtactctgaggcgcgattgtgtgaaaggtgggctaaggtgcctgttcgaccacatcctcactggtagactgggtcaccacagttttggaaaggtgagaaatggtatctaaacatagtttgaatttgcatttcttttactggaagggaggctgcgcgtgtttcacatcagagccacgtgtgtttgtggttgttgaactttctctcttggattgctaggagtgctttatgtattagggaagcagacttccctaatgcgtgataacgcatgcagatactgtttccaagtttttgttatttgtcttttaaatttgtttttgcatttgtcttttcactttgatttttgccaggctggagttttgatgtttatgtggtcataggtgtgaatattttcttttgnggcttctggattttgagacacagtggctatagaaccactatagccaaaagttatgtytgcttttggyttcatatactttgctttggtcctgtcttcttgactttatttaaaatagtaagatatwcttactacatttttccattgcccatagctggaaggagattgnaattatcaccaaagatgaaaaactaaggcatgttctcagcagaggcagattagactttaagttagaggcttgtccttggtgcagaggcctgtgagcgacccggccccacttgccctgcacaccatggcgtggattgtgggcagtcacagggaagatctctggctttgctgggagctggggtacggttcttagagtgccattctagagtggcttcgcgtactggtaatgaacgcccatcaagtggccttgggaattcatgagccggatgatgatgacttcgccggtgaaaagcaaatcccaaataggttgttttctgtgcattccagtcccaatttctcttccaagtaattattagatgtgccaagcctgttacgtttattacttacagaattgkttttgtctgtgtgagtttactgaggacttaggggttggtatgtgaggaggggagccccccttctyctgtgggcactctagcactcttaataatcagtattaaacatgttgaaggccataaaggaaataaccttctcttaaaaacaagttagagtcagtcataaaactgtttgcctagaccttgatcacttaaaataagatcttagatgtgatgtgtctttgtggagtatttcctgtggctcgggaggtgtgcatgagagtggggtctgagggacagtgaggggtgaaggaaaggtgggagagagggccttcagtgactgtaccaaagactcacagacactgggtgkcttggtgatgggtgcacatagcccttcttttgtgactgaagctgtgyggccttcatcccacagggtctgccctctccagataattctgtcactgaacttcaaactgtcaatggaacgatagcgcagtctcttaacaatgcttcaggacagataatagagctgtgcgggcagcctcsgtgacagtgttgggaatctgcagaatggctttgtccacttctttcctttcagaggagacattgagcctcggcatggtgtctcacgccaggaatcccagcatgttgggaggctgaggttgggggatcggattgcttgaggctaggagcttgaggtcagcctgcgcaacatagtgagacccctgtctctaccaaaaanaaaaaaanaaaactcgagggggggcccggtacccaattcgccctatagtgagtcgtattacaattcactggccgkcgttttacaacgmcgtgactggcaaaaccctggcgttacccaacttaatcgccttgcagcacatccccctttcgccagctggcgtaatagcgaagaggcccgcaccgatcgcccttcccaacagttgcgcagcctgaatggcgaatggcaaattgtaaagcg

SEQ ID NO: 909 - DNA, 2694 bp, Homo sapiens
  misc_feature (258)..(258): n equals a,t,g, or c
  misc_feature (925)..(925): n equals a,t,g, or c
ggcgccgcgccgagcgaatctcggagtcggtgggtgcagatggcggcggcagttgtggtggcggagggggacagcgactcccggcccggacaggagttgttagtggcctggaacaccgtgagcaccggcctggtgccgccggctgcgctggggctggtgtcttcccggaccagcggtgcagtcccgccaaaggaagaggagctccgggcggcggtggaggttctgargggccacgggctacactcggtcctggargantggttcstggagktgctgcagaacgatctgcargccaacatctyccctgarttctggaatgccatctcccaatgcgagaactctgcggatgagccccagtgccttttgctactccttgacgcttttggcctgctggagagccgcctggatccctacctgcgtacctagagctgctggagaaatggactcgcctgggcttgctgatgggcactggtgctcaggggctgcgagaagaagtccacactatgttgcgcggagtcttgttctttagcacccccagaaccttccaagagatgatccagcgtctgtatgggtgcttcttgagagtctatatgcagagtaagaggaagggggaagggggcacagacccggaactggaaggggagctggacagccggtatgcccgtcgccggtactaccggctcctgcagagcccgctgtgtgcagggtgcagcagtgacaagcaacagtgctggtgtcgccaggctctggagcagttccatcagctcagccaggtcttacacaggctcagtctgctggagcgggtcagtgccgaggctgtgaccaccaccctgcaccaggtgacccgggagaggatggaggaccgttgccggggcgagtacgagcgctccttcctgcgtgagtwccacaagtggatcgagcgggnggttggctggctcggcaaggtgttcctgcaggacggccccgccaggcccgcatctcccgaggccggcaacaccctgcgccgctggcgctgcacgtgcaaaggttcttctaccgcatctacgccagcctgcgcatcgaggagctcttcagcatcgtccgagacttcccagactcccggccagccatcgaggacctcaagtactgcctggagaggacggacyagaggcagcagctgctcgtgtccctcaaggctgccctggagactcggctcctgcatccaggcgtcaacacgtgtgacatcatcaccctctatatctctgccatcaaggcgctgcgcgtgctggacccttccatggtcatcctggaggtggcctgtgagcctatccgccgctacctgaggacgcgggaggacacagtgcggcagattgtggctgggctgacgggggactcggacgggacaggggacctggctgttgagctgtccaagaccgacccggcgagcctggagacaggccaggacagtgaggatgactcaggcgagccagaggactgggtcccggaccctgtggatgccgatccagggaagtcgagctccaagcggcgttcatcggacatcatcagcctgctggtcagcatctacggcagcaaggacctcttcatcaatgagtaccgctcgctgctggccgaccgcctgctgcaccagttcagcttcagccccgagcgggagatccgcaacgtggagctgctgaagctgcgctttggcgaggccccaatgcacttctgtgaagtcatgctgaaggacatggcggactcccgccgcatcaatgccaacatccgggaggaggatgagaagcggccagcagaggagcagccaccgttcggggtctacgctgtcatcctgtccagtgagttctggccgcccttcaaggacgagaagctggaggtccccgaggatatcagggcagccctggaggcttactgcaagaagtatgagcagctcaaggccatgcggaccctcagttggaagcacaccctgggcctggtgaccatggacgtggagctggccgaccgcacgctgtctgtggcggtcaccccagtacaggcggtgatcttgctgtattttcaggaccaagccagctggaccctggaggaactgagcaaggcggtgaagatgcccgtggcgctgctgcggcggcggatgtccgtgtggctgcagcagggtgtgctgcgtgaggagccccccggcaccttctctgtcattgaggaggagcggcctcaggaccgggacaacatggtgctcattgacagtgacgacgagagcgactccggcatggcctcccaggccgaccagaaggaggaggagctgctgctcttctggacgtacatccaggccatgctgaccaacctggagagcctctcactggatcgtatctacaacatgctccgcatgtttgtggtgactgggcctgcactggccgagattgacctgcaggagctgcagggctacctgcagaagaaggtgcgggaccagcagctcgtctactcggccggcgtctaccgcctgcccaagaactgcagctgacacatcgcccgcccgcccgcccgcccgccaggcgctgccctgcaggtgctctcgtcctcccgtgccagcccccgcccgcccgtgtcccagaatgcactgctgaggagcatgcccacccccacccccgcagtgtgcagattaaagcaagtcagatcatcaaaaaaaaaaaaaaaaaaaagggcggccgc

SEQ ID NO: 910 - DNA, 810 bp, Homo sapiens
  misc_feature (731)..(731): n equals a,t,g, or c
  misc_feature (733)..(733): n equals a,t,g, or c
tttttttttttttttcaaacaaaatactgttttactttgtttctcagccttttccaattttacgccagcgcggaatgaggcgccagggcggtgctcaggtgtggcccaccaggcgcggggtgcaggggaaggtcttacgcatgcccatgcacttctccttgtcgatgcaragggtgttggccttgatggcgagctcgtgctccagccggcacttggtcatgaccagcagctgcagcgtgtcctgtgtctcccgcagccgcagcttgagggtctgcagggtgtcgtcgatggtgaacacctcgttcaccagcttcaactgcgggatgtccctgcacagctccatgttggggcgccgggtccggcactccagccttgtctgggccaccktcagcgggccctccttggccatgatggacctttccagcagcatgatggtgttctcggcctggaagatctcctgcagcgtcttcgccagctgcgtctgcagcttattcttcacatccgtcacctcagagatgcgggcgttgaaggccaggttggtgtctgtgaactgcctccacatctgatccgacaaggtctcaaagaggtgctccgcctcctcccgcagctggatggagttggcccgcatgttctgagagtgtttgatgttgtcgttactgaacttggcccaggtctcaggtacggagatcgtgccgtcggtttctccatgccgtggaagaagctaatgccgncngaccggatttctcaggttaaagcacttctcatcgatacactggggggagcttttgtctaaaaggggctccttacccg

SEQ ID NO: 911 - DNA, 2298 bp, Homo sapiens
  misc_feature (4)..(4): n equals a,t,g, or c
  misc_feature (1653)..(1653): n equals a,t,g, or c
gcgnccgcggcatggtcttcggaggggtggtgccctacgtcccgcagtatcgggacattcgcaggacgcagaacgccgacggyttctccacctacgtgtgcctggtgctgctggtggccaacattttgcggatactcttctggtttggaaggcgctttgagtccccgctgctgtggcagagcgccatcatgatcctgaccatgctgctgatgctgaagctgtgcaccgaggtccgtgtggccaacgagctcaacgccaggcgccgctcctttacagacttcgacccccaccacttctggcagtggagcagcttctcggactacgtgcagtgcgtcctggccttcacgggcgtggcgggctacatcacctacctgtccattgactccgccctgtttgtggagaccctgggcttcctggctgtgctgaccgaagccatgctgggtgtgccccagctttaccgcaaccaccgccaccagtccacggagggcatgagcatcaagatggtgctcatgtggaccagtggtgacgccttcaagacggcctacttcctgctgaagggtgcccctctgcagttctccgtgtgcggcctgctgcaggtgctggtggacctggccatcctggggcaggcctacgccttcgcccgccacccccagaagccggcgccccacgccgtgcaccccactggcaccaaggccctctgacagtggggaggacgaggatgtgggaccgccagccgcgggcactggtgggccctgacctccccgcggggagggtgggtgccgtggcccctgcaggtgtggcagagatggggcaygggcattggggtctccatcagcctctgtggggtgtctcagggtgggcagtgggggtggggctgggacgctgtttgtgctcagcggggacagccagggttgatctggccccgagggttttggatgtttttaggatgacataaaaagcaagtgttttccccatttcctcttatgaaacaccgtctgagcccaaggtacacattgggcggcctgcaggaacctgctccaggtggacacacgggccagcagccgcgaaccttgaagctggggtgaccgcagagaccctgtaaggcctgtgagcggagccctcgaccccgtgacaccctggccagacaccctgcttggactggggtggcctctgctacccaggggtctggcacgggggagggctggggctttctctgcctggtacacacggaaaggcggctgtgcggacgcagggtcaccgtgctccgggttttctgacagtcggtgtttcctgggcctttggagtggctgcgaggcctgaacgccttgtggatccgctgtgtccagcccggctgagcatcgccagggctagctcatgctgctcttgtcagcctctggttctcctcgagtccttggggacgtggcagatgccagcgaccatcagacaacgtggaggccctcatgggcaatggctgagggggccgggctgaggctgtgcacatgcagtctgcacgccactcttgggctctgctggcggagatccccttccttctgggtgcagactgcacctccggatgcagttttgatgtccatcttccaggagagagacggtctcgggtccagggagtggagggggctgcccctgccgtgcagntcctggccgatggcgccttaccctgctgccctgggcttttggcctgaagcaaattcctgagtggggggtactggggcctgccgcatcctgtcctgtccactgcccacccccgtgtgctggctccctcacttctggctgcagtgggagccgccagtctgacccttgtcaccgcacgctctgcccccaccccgttgcaagaggtcacaccatgtcagcagccttgcactgaccgcagccggcccccaggcctcagagttctggatgcttccgtgcggctccaacaggcatcgtcttcccttccgcaggtggaggggccgcttcccgcaggcatctgagctctgtgccggggccgtggccatgggaagatgttccacgctgcctcctcctcgagttttcctcggaaacactcttgaatgtctgagtgagggtcctgcttagctctttggcctgtgagatgctttgaaaatttttatttttttaagatgaagcaagatgtctgtagcggtaattgcctcacattaaactgtcgccgactgcaggcgcagtgactgctgaatgtaccctgtgtggcgacttggaatcaataaaccatttgtggatcctgaaaaaaaaaaaaaaaaaaaaaaaaaaaaaaagggggggggc

SEQ ID NO: 912 - DNA, 928 bp, Homo sapiens
gggcttctccacctacgtgtgcctggtgctgctggtggccaacattttgcggatactcttctggtttggaaggcgctttgagtccccgctgctgtggcagagcgccatcatgatcctgaccatgctgctgatgctgaagctgtgcaccgaggtccgtgtggccaacgagctcaacgccaggcgccgctcctttacagacttcgacccccaccacttctggcagtggagcagcttctcggactacgtgcagtgcgtcctggccttcacgggcgtggcgggctacatcacctacctgtccattgactccgccctgtttgtggagaccctgggcttcctggctgtgctgaccgaagccatgctgggtgtgccccagctttaccgcaaccaccgccaccagtccacggagggcatgagcatcaagatggtgctcatgtggaccagtggtgacgccttcaagacggcctacttcctgctgaagggtgcccctctgcagttctccgtgtgcggcctgctgcaggtgctggtggacctggccatcctggggcaggcctacgccttcgcccgccacccccagaagccggcgccccacgccgtgcaccccactggcaccaaggccctctgacagtggggaggacgaggatgtgggaccgccagccgcgggcactggtgggccctgacctccccgcggggagggtgggtgccgtggcccctgcaggtgtggcagagatggggcacgggcattggggtctccatcagcctctgtggggtgtctcagggtgggcagtgggggtggggctgggacgctgtttgtgctcagcggggacagccagggttgatctggccccgagggttttggatgtttttaggatgacataaaaagcaagtgttttccccaaaaaaaaaaaaaaaaaaaaaaaaaaaaaaaaaa

SEQ ID NO: 913 - DNA, 1433 bp, Homo sapiens
ggcagagcacttatgtktttggcattctccgtcatcattctggccggggcgggcagttctaggagttggaactcagtcctggtggaaaaggaagtcgtggagggagggctagggccgtgggggaactgctctgctgagcctcttcctcacctgctgcttcctaggactaacctgaaggctaaggtaccaggctgaagtcagtgctcagaaaaccaatcgtcattctttggggttttttttcttgaagagccactttctctttaccttgttctagcctgttggaggtagggtttctgcaattccaaaggccgtacacagcctctcaccatcagaccactttttaaggctcttcgttcatacctagctcgaagattcacttcctcaggaagccattttagttacaaatctgggaaaacttaaaatgctttcattgtgccatgttttctgttgcagcttcagtaccgtacctagtggtcaggcatacttacaagtttctttttacagtaaccccttgtggacatctaataaatggtcattattttttagtactagtttgttttcctgaacactgtaagatctgtgactgacgtttgataccttaaagcagtgccatataataactacccactatttgttctttatttctgtcagataaaaatgttctatgtagtgtctacagtcattttttttttaactagaatttagatttggaagtagtttttctattagttgatttgcatgaaatacaaaattaggaaaaggcttattccacctcaacctagttgaactattaatgatttttttttttttttgaggatttgggctctttctagatagaaaatcaccctgaacttctagctttgcattgtgaagtgagcatcatgaagatgagaaaatgttgggagatcatttttgcaaagggcataatagtcggcattcagatatgagttaactgcagagggaaaattgcaagctgtcatgttggccttgttcctctcaaccttctggtaacctaacaagctcctacaggttgtatgtgaaattgcaagatgattatatagccctgttgaatttacaaccagatcttgctttcaaaccattattagccaagggtttgattccacacctgtgttcatggattttttggtattagacattgctgtaactctgttttcactttttcatctgttatcttggctcacttaagggagaaggtatcagcagcctaggaccacttggtttctgtttttatgtttcatagttcatggctgataaaaattacctgtccttaggccgagtgcagtgcctcacacctgtaatcccagcactttgggaggccgaggtgagtagatcacctgagatcaggagttcgagaccagcctggacaacaagagcaaaactccatctccaaaaaaaaaaaaaaaaaaactcga

SEQ ID NO: 914 - DNA, 408 bp, Homo sapiens
  misc_feature (350)..(350): n equals a,t,g, or c
  misc_feature (376)..(376): n equals a,t,g, or c
  misc_feature (386)..(386): n equals a,t,g, or c
  misc_feature (404)..(404): n equals a,t,g, or c
gatctacctggaatgaacaagaatgaacgccagcctcatttcatgggttttggttctccacaggatctgcctcggtctgtcagacattcctaaggaaaattgtataataactatttcgggaatgcagttatctcatcatggtcagtctttggggaagtgggctgagaaattacatgtgttctattctctattttcattcctattgtgaccttcacaccgactcaaaaccttccttttagatacttctggatataaaaatatatgttaattttggggtttcacactcctgagtgaaaggcagtgtcatcaagtacgtgaatgcccagctcctaaatgtctttctcgttctnctcccacccagtcacgtcctccaagnagtgaacttnctttaattcacaatccgnttac

SEQ ID NO: 915 - DNA, 1299 bp, Homo sapiens
  misc_feature (1291)..(1291): n equals a,t,g, or c
atccaaagaattcggcacgagcgaagatggcggcggcgacaggaggcgctgagggagttcgtggcggtgacgggcgccgaggaggaccgggcccgcttctttctcgagtcggccggctgggacttgcagtgataatagagtgacatccttcaragacctcattcatgaccaagatgaagatgaggaggaagaggaaggccagaggttttatgctgggggctcagagagaagtggacagcagattgttggccctcccaggaagaaaagtcccaacgagctggtggatgatctctttaaaggtgccaaagagcatggagctgtagctgtggagcgagtgaccaagagccctggagagaccagtaaaccgagaccatttgcaggaggtggctaccgccttggggcagcaccagaggaagagtctgcctatgtggcaggagaaaagaggcagcattccagccaagatgttcatgtagtattgaaactctggaagagtggattcagcctggataatggagaactcagaagctaccaagacccatccaatgcccagtttctggagtctatccgcagaggggaggtgccagcagagcttcggaggctagctcacggtggacaggtgaacttggatatggaggaccatcgggacgaggactttgtgaagcccaaaggagccttcaaagccttcactggcgagggtcagaaactgggcagcactgccccccaggtgttgagtaccagctctccagcccaacaggcagaaaatgaagccaaagccagctcttccatcttaatcgacgaatcagagcctaccacaaacatccaaattcggcttgcagacggcgggaggctggtgcagaaatttaaccacagccacaggatcagcgacatccgactcttcatcgtggatgcccggccagccatggctgccaccagctttatcctcatgactactttcccgaacaaagagctggctgatgagagccagaccctgaaggaagccaacctgctcaatgctgtcatcgtgcagcggttaacataaccgcccagccagctgcctggcctccctcctgtgtttcccatgccagtggccatgccccatggggatcgcccctcctgcccccttgtgcacacccagcagtccagtgcaacgtctcctccatagctctgggttcttagatcttggttggacgtttgttttctccttagttgcatttcctgggtttttgtgatgatcaatggactttaatgaaaaaaaaaataaaaacaaccaaaggggggcccggtcccaatncccccctt

SEQ ID NO: 916 - DNA, 1669 bp, Homo sapiens
  misc_feature (4)..(4): n equals a,t,g, or c
  misc_feature (54)..(54): n equals a,t,g, or c
  misc_feature (1424)..(1424): n equals a,t,g, or c
  misc_feature (1663)..(1663): n equals a,t,g, or c
gctnctaaatgtctttctcgttctcctcccacccagtcacgtcctccaggcagngaccttcctttatttcacattccgcttacttccttgacccctcagcatttcagacctgaaaggacactggtactgwtgtccttgtcggggcctgtggctttgcctctcattccctggtgaatgtcaggaaatagagggctgagactaatttttataggctctcaatttttcttgcwtggggacaagctgttgacttagctctgaataggagtaataaggaggcagtgggccaggctgcatgacaactggttttcaggcccatataaaaaagtactaactttattatctcaagccatgcctggcctattgcaaagcccagtgtgggtgtcttggggcttgtatttgagattggagcttctctgacctccagtaccctttcctcaggggccacagtgtgtgtcacatgaatggcaaggtgaggtgaggcttgggggagctcctggtgctgtgtcacaccaccttacctgtgtgcattactctgtgcttgttcttttgcatacatctgctgatttgaacctcacggctctgacttaagagcagtaggtagggcatgtggtccttccctcccgtttcaaagacaaggaaagtgagtcacagagtagtgcactggcttacccaggacatacagtggcagagccaagactggagcctagctgcttgtactaaccatgccagtgccaccattaaccccaagtcactagtggtagctacttctgactatgactgtagtcactgtctcctggagaggagcctggccaccagattgatagtcccagctgagactctctcctgaactgataagctgttttgcatgcttggaatgcctttccccagtttgttcacctgataaactcatccttatcctcaagattcagcccagaagacacccttaaaggaagccttggctgtccttcccacccagtgttccctcactgacttctgttgctgctcacactgcattttacctgcttgcctccttccatgtgttcccagctagccagtaaattctttaaagacaagcattgtaccctttgcctcagtgtgcccagcaccaacctggcacatgctctattcatgttttccatgagtgtttcatgttagaggtgtattttgtacacaggttttatgctgggggctcagagagaagtggacagcagattgttggcccwcccaggaagaaaagtcccaacgagctggtggatgatctctttaaaggtgccaaagagcatggagctgtagctgtggagcgagtgacaaagagctggctgatgagagccagaccctgaaggaagccaacctgctcaatgctgtcatcgtgcagcggttaacataaccgcccagccagctgcctggcctccctcctgtgtttncccatggccagtggccatgccccatggggatcgcccctcctgcccccttgtgcayacccagcagtccagtgcaacgtctcctccatagctctgggttcttagatcttggttggacgtttgttttctccttagttgcatttcctgggtttttgtgatgatcaatggactttaatgaaaaaaaaaaaaaaamaaccaaaaaaattgaaaaaaaaaaaaaaaaaaaaaaaaaaaaggggggncccttt

SEQ ID NO: 917 - DNA, 1369 bp, Homo sapiens
  misc_feature (1351)..(1351): n equals a,t,g, or c
  misc_feature (1353)..(1354): n equals a,t,g, or c
gggcgaaggcgatgacaaagaagagtctgttgaaaaactggactgtcattattcaggtcatcatcctcagccagcatctttttgcacatttgggagccggcagataggaagaggctattacgtgtttgactccaggtggaatcgacttcgctgcgccctcaacctcatggtggagaagcatctgaatgcacagctatggragaaaatcccaccagtgcccagtaccacctcacccatctccacacgtattcctcaccggacaaactctgtgccgacatcacaatgtggagtcagctatctggcagcagccaccgtctctacatccccagtcctgctctcatctacctgcatctccccaaatagcaaatcggtaccagctcatggaaccacactaaatgcacagcctgctgcttcaggggcgatggatcctgtgtgcagtatgcaatccagacaagtgtcctcttcatcctcatccccttccacgccctctggcctttcctcggttccttcctcccccatgtccaggaaacctcagaaattgaaatccagcaaatctttgaggcccaaggagtcttctggtaacagcactaactgtcaaaatgccagtagcagtaccagtggcggctcaggaaagaaacgcaaaaacagttccccactgttggttcactcttcctcctcctcttcctcctcctcctcttcttctcattccatgggagtcttttaggaaaaactgtgtggctcactctgggcctccctacccctcaacggtaacatcttcccatagcatcggcctcaactgtgtgacgaataaagcaaatgcggtgaacgtccggcatgaccagtcagggaggggcccccccaccgggagccctgctgaatccatcaagaggatgagtgtgatggtgaacagcagtgattctactctttctcttgggccattcattcaccagtccaatgaactgcctgtcaactcccacggcagtttttcccactcacacactcctctagacaaactcataggaaagaaaagaaagtgctcacccagctcgagcagcatcaacaacagcagcagcaaacccacaaaggttgccaaagtgccagccrtgaacaatgtccacatgaaacacacaggcaccatcccaggggcacaaggactgatgaacagttccctccttcatcaggtaggaaatggactgtgagccccatgggaatgcccatttcttctcccttaagatcttttgtcagctcagaaatgtgtttggttgggttggttggttggtttgtaaacagatattcagcttcatggtgtcttcttaaaaaaaaaaaaaaaaaaaaaaaamcycggggttcntnnaaaggggcccggggg

SEQ ID NO: 918 - DNA, 1515 bp, Homo sapiens
  misc_feature (69)..(69): n equals a,t,g, or c
aattcggcacgagggaaattcaagcacttttcctaaaagaagggggaatggatgctgaaacaacacgtntcccacaaagggagcagacactgggcttgtgaagctgccccataccttccccacagaactggggtccggcctccctgacatgcagatttccacccagaagacagagaaggagccagtggtcatggaatgggctggggtcaaagactgggtgcctgggagctgaggcagccaccgtttcagcctggccagccctctggaccccgaggttggaccctactgtgacacacctaccatgcggacactcttcaacctcctctggcttgccctggcctgcagccctgttcacactaccctgtcaaagtcagatgccaaaaaagccgcctcaaagacgctgctggagaagagtcagttttcagataagccggtgcaagaccggggtttggtggtgacggacctcaaagctgagagtgtggttcttgagcatcgcagctactgctcggcaaaggcccgggacagacactttgctggggatgtactgggctatgtcactccatggaacagccatggctacgatgtcaccaaggtctttgggagcaagttcacacagatctcacccgtctggctgcagctgaagagacgtggccgtgagatgtttgaggtcacgggcctccacgacgtggaccaagggtggatgcgagctgtcaggaagcatgccaagggcctgcacatagtgcctcggctcctgtttgaggactggacttacgatgatttccggaacgtcttagacagtgaggatgagatagaggagctgagcaagaccgtggtccaggtggcaaagaaccagcatttcgatggcttcgtggtggaggtctggaaccagctgctaagccagaagcgcgtgaccgaccagctgggcatgttcacgcacaaggagtttgagcagctggcccccgtgctggatggtttcagcctcatgacctacgactactctacagcgcatcagcctggccctaatgcacccctgtcctgggttcgagcctgcgtccaggtcctggacccgaagtccaagtggcgaagcaaaatcctcctggggctcaacttctatggtatggactacgcgacctccaaggatgcccgtgagcctgttgtcggggccaggtacatccagacactgaaggaccacaggccccggatggtgtgggacagccaggyctcagagcacttcttcgagtacaagaagagccgcagtgggaggcacgtcgtcttctacccaaccctgaagtccctgcaggtgcggctggagctggcccgggagctgggcgttggggtctctatctgggagctgggccagggcctggactacttctacgacctgctctaggtgggcattgcggcctccgcggtggacgtgttcttttctaagccatggagtgagtgagcaggtgtgaaatacaggccttcactccgttaaaaaaaaaaaaaaaaaaaaaaaaaaaaaaaaaaaaa

SEQ ID NO: 919 - DNA, 1404 bp, Homo sapiens
  misc_feature (1351)..(1351): n equals a,t,g, or c
cgttttccggccgtgcgtttgtggccgtccggcctccctgacatgcagccctctggaccccgaggttggaccctactgtgacacacctaccatgcggacactcttcaacctcctctggcttgccctggcctgcagccctgttcacactaccctgtcaaagtcagatgccaaaaaagccgcctcaaagacgctgctggagaagagtcagttttcagataagccggtgcaagaccggggtttggtggtgacggacctcaaagctgagagtgtggttcttgagcatcgcagctactgctcggcaaaggcccgggacagacactttgctggggatgtactgggctatgtcactccatggaacagccatggctacgatgtcaccaaggtctttgggagcaagttcacacagatctcacccgtctggctgcagctgaagagacgtggccgtgagatgtttgaggtcacgggcctccacgacgtggaccaagggtggatgcgagctgtcaggaagcatgccaagggcctgcacatagtgcctcggctcctgtttgaggactggacttacgatgatttccggaacgtcttagacagtgaggatgagatagaggagctgagcaagaccgtggtccaggtggcaaagaaccagcatttcgatggcttcgtggtggaggtctggaaccagctgctaagccagaagcgcgtgggcctcatccacatgctcacccacttggccgaggctctgcaccaggcccggctgctggccctcctggtcatcccgcctgccatcacccccgggaccgaccagctgggcatgttcacgcacaaggagtttgagcagctggcccccgtgctggatggtttcagcctcatgacctacgactactctacagcgcatcagcctggccctaatgcacccctgtcctgggttcgagcctgcgtccaggtcctggacccgaagtccaagtggcgaagcaaaatcctcctggggctcaacttctatggtatggactacgcgacctccaaggatgcccgtgagcctgttgtcggggccaggtacatccagacactgaaggaccacaggccccggatggtgtgggacagccaggyctcagagcacttcttcgagtacaagaagagccgcagtgggaggcacgtcgtcttctacccaaccctgaagtccctgcaggtgcggctggagctggcccgggagctgggcgttggggtctctatctgggagctggccagggcctggactacttctacgacctgctctaggtgggcattgcggcctccgcggtggacgtgttcttttctaagccatggagtgagtgagcaggtgtgaaatacaggcctncactccgtttgctgtgaaaaaaaaaaaaaaaaaaaaaaaaaaaaaaaaaaaaa

SEQ ID NO: 920 - DNA, 2008 bp, Homo sapiens
cgggggctttctaacgggaaaaactctactaaagggttcaaaagctggagctccaccgcggtggcggccgctctagaactagtggatcccccgggctgcaggaattcggcacgagctcgtgccgaattcggcacgagtcacagaacacatccatggctctmatgctcagtttggttctgagtctcctcaagctgggwtcagggcagtggcaggtgtttgggccagacaagcctgtccaggccttggtgggggaggacgcagcattctcctgtttcctgtctcctaagaccaatgcagaggccatggaagtgcggttcttcaggggccagttctctagcgtggtccacctctacagggacgggaaggaccagccatttatgcagatgccacagtatcaaggcaggacaaaactggtgaaggattctattgcggaggggcgcatctctctgaggctggaaaacattactgtgttggatgctggcctctatgggtgcaggattagttcccagtcttactaccagaaggccatctgggagctacaggtgtcagcactgggctcagttcctctcatttccatcacgggatatgttgatagagacatccagctactctgtcagtcctcgggctggttcccccggcccacagcgaagtggaaaggtccacaaggacaggatttgtccacagactccaggacaaacagagacatgcatggcctgtttgatgtggagatctctctgaccgtccaagagaacgccgggagcatatcctgttccatgcggcatgctcatctgagccgagaggtggaatccagggtacagataggagatacctttttcgagcctatatcgtggmacctggytaccaaagtactgggaatactctgctgtggcctattttttggcattgttggactgaagattttcttctccaaattccagtggaaaatccaggcggaactggactggagaagaaagcacggacaggcagaattgagagacgcccggaaacacgcagtggaggtgactctggatccagagacggctcacccgaagctctgcgtttctgatctgaaaactgtaacccatagaaaagctccccaggaggtgcctcactctgagaagagatttacaaggaagagtgtggtggcttctcagagtttccaagcagggaaacattactgggaggtggacggaggacacaataaaaggtggcgcgtgggagtgtgccgggatgatgtggacaggaggaaggagtacgtgactttgtctcccgatcatgggtactgggtcctcagactgaatggagaacatttgtatttcacattaaatccccgttttatcagcgtcttccccaggaccccacctacaaaaataggggtcttcctggactatgagtgtgggaccatctccttcttcaacataaatgaccagtcccttatttataccctgacatgtcggtttgaaggcttattgaggccctacattgagtatccgtcctataatgagcaaaatggaactcccagagacaagcaacagtgagtcctcctcacaggcaaccacgcccttcctccccaggggtgaaatgtaggatgaatcacatcccacattcttctttagggatattaaggtctctctcccagatccaaagtcccgcagcagccggccaaggtggcttccagatgaagggggactggcctgtccacatgggagtcaggtgtcatggctgccctgagctgggagggaagaaggctgacattacatttagtttgctctcactccatctggctaagtgatcttgaaataccacctctcaggtgaagaaccgtcaggaattcccatctcacaggctgtggtgtagattaagtagacaaggaatgtgaataatgcttagatcttattgatgacagagtgtatcctaatggtttgttcattatattacactttcagtaaaaaaaaaaaaaaaaaaaaaaaaaaaaaaamctcgagggggggcccggtacccaattcgg

SEQ ID NO: 921 - DNA, 675 bp, Homo sapiens; identical to SEQ ID NO: 596

SEQ ID NO: 922 - DNA, 1162 bp, Homo sapiens
ggcacgaggcgccccggactcttctcagttgagagtgcggttcctgggcaggtttccacaccagttcctttccgcgtccttcggccctggctctggctgcctggcggaggtggggtagcatttgtcatttgcacactgctggctttatctttggggctgcaccccgaggcaacaaatgcaggatgctctgtcacccacatgtccaccaccatctggtttgccttttggctactttgactttctccttaaatgcttcctgtgctgagcaaacattccacagccagcagagcaatggagagttcatggccactcttcccagtatcagcaagcaatttggggtgatcgtttggaagcctcagaggaaagatgtcatcaggcttcctgtggctttgtccttcagcatggggctcggcttgctttcacctgccttaggaagatttctggcttctgagctctgatatggggagaagataagggctgggatctttgagtctgcccctagctgggtatgtgcgtccggtgtgcgggccttggagtttttggtaatgactcacttgtgctctttctgggatctgtctccctcccacatgaccccgtggggtccctgaatgactgttttagagtacccatgtgggttccctgagtcacagcaggggatgtttaataaggaggttagcactgagcttggggacgtgctgtcacaccagcaggacgctgcaggaaggagcaggctacttcctttcttgacgtgcaaataactcgtataggctaatcaacaggcttataagttaaaagggctaccgctcggccccttggggattccatcccctcctctgtaacttggagatgtttgtttctgctgcagactcagagggttgcgatgaagagtggtgggactgagttgagaagcttatcccttcgctgggtgggaggtttctaattgccctgttctttgggggatccttaagtccagcttccaggtgggggcagcgataggaccaagttctcctagtagtctctgggaagccacttgagggaagctgccggtcatgcccatgcacccattggtcttctgccagcaggccctgtaggtcgtgccatgttccatgtccttctgggttcttgggggagaaggaagctgttgaaaaaaaaaaaaaaaaaa

SEQ ID NO: 923 - DNA, 884 bp, Homo sapiens
  misc_feature (873)..(873): n equals a,t,g, or c
ggccgacgcctggggtgtggagctgccccaccgccaccccgtgggcgagtggatcaagaagaaaaaacctggcccgagagtcgaagggccgccccaggccaacagaaatcacccggccttacctctgtccccacccttaccttcccccacataccgccccctgcttgggttcccaccccagcgcttgccgctgctcccgctcctgtccccacagcctcctcctcccattctccatcaccagggaatgccccggttcccacagggtcccccagatgcctgtttttcctcagaccatactttccagtcggatcaattctattgccattcagatgtcccctcatcagcccatgcaggtttcttcgtcgaagacaattttatggttggtcctcagctgcctatgcccttcttccccacaccccgttatcagcggcctgccccagtggtacataggggttttggcaggtatcgtccccgtggcccctatacgccctggggacagcggcctcgaccttcaaagagaagggccccagccaatcctgagccaaggcctcaatagacggacctaggccttatttcctctttatgaacatggattggacagatctgacacttcctttccattgcttggcctgaacagactgaccttgttaacttaagcctggagtccatgcctcgtcttccttttgttcattgctgttaccaagaaagccaaggaagagcagcctgactcattcttcttggctgcagcctcttccccacttcctgggagtgacccagcgttattcctgcctcctcactcctattctctttgcctttgtgtaaaaataaaatggaaataaacaagttgcacagaaaaaaaaaaaaaaaaaaaancccaagggggg

SEQ ID NO: 924 - DNA, 1265 bp, Homo sapiens
  misc_feature (766)..(766): n equals a,t,g, or c
ggggcagatggaaatgtctcggattttgataatgaagaagaggaacagtcagtccctcccaaagtggatgagaatgacacccgtccagatgtggagccaccactgccattgcagatccaaatagccatggacgtgatggaacgctgcatccacttgttgtcagataaaaatctgcaaatccgcctgaaggtcttggatgtgctggatctgtgtgtggttgttcttcagtcccacaaaaaccagctgcttcccttggctcatcaggcctggccctcgctcgttcaccgactcacacgggacgcccccctggcagtgcttagagccttcaagttttacgtaccctgggaagcaagtgtggtgactttcttcgcagccggttctgcaaagatgtcctgccaaagctggctggctccctagtcacccaggcccccatcagtgccagggctggaccagtttactcgcacacgctggccttcaagttgcagctggctgtcttacagggcctgggccccctctgtgagagactggacctaggtgagggtgacctgaataaagtggctgatgcctgcttgatttacctcagtgtcaaacagcccgtgaaattacaagaggctgccaggagcgtcttcctccacttgatgaaggtggacccagactccacctggttcctcctgaacgagctttactgccccgtgcagttcacacctccccaccccagcctccaccctgtgcagctgcasggggccagcgggcagcagaacccctnacacgaccaacgtgctccagctgctcaaggagctgcagtgaccctgctcccccaccacagaggccaccgatccctcccctactgccagccagaagctgggctgaccccaccccggccataggcggtggcagcggcagcagagaaggtgaattagttagccaatcgatttataaattgatcgatcacacaactgcttagaaatggattgaaggaaagtagctgactattatttatatttcataccttgtgttttcaagtgacattgtctggtggctctaagggtttaaccccttagcctaccatctctatagccccagctccctcacaggccacacacacacacacacaagaggtcagttcccctccatctgcatacacctccctgtcttcaaataatgagatggaactaatttgttttacctaacctgatctttgggaaacaaacggaaataaagacacttcttggatgaaaagtaaaaaaaaaaaaaaaaaactcgag

SEQ ID NO: 925 - DNA, 1012 bp, Homo sapiens
acgcgtccggaagtgggagaggtcgcagccccgccttctctacacaggaaagctcagtggcccccaagccaggatgtcccaagcttgggtccccggcctcgcgcccaccttgctgttcagcctgctggctggcccccaaaagattgcagccaaatgtggtctcatccttgcctgccccaaaggattcaaatgctgtggtgacagctgctgccaggagaacgagctcttccctggccccgtgaggatcttcgtcatcatcttcctggtcatcctgtccgtcttttgcatctgtggcctggctaagtgcttctgtcgcaactgcagagagccggagccagacagcccagtggattgccgggggcccctggaactgccctccatcatccccccagagagggtgattctgaagcccagcctgggcccaactcccacagagccaccccctccctacagcttcaggcctgaagaatataccggggatcagaggggcattgacaacccggccttctgagtcacctcctgcctggaatcttgccatcagcaacctcctccccagtgcctcctggatcaagctagagactgctggcaccccaggaatgtccctgcccatcctgccgtgtctctgttcattcttggatttaacttattactttttctgcttctgtttccaccccagctgcctctcttgtcctgagggttaggctggagtgacagtttccgcccaccccccagcccaagaaagaggctgccggaaagaaaatgctgaccattggaggtgcccaacagtagaatgggctactgtgaggggtagtaagagccccatttctggaggtatgcaaatcttgactggacagccagctctgagattttatcagggcacttctatacctgtgggacattggactggatgagccctgagccagcttccactcctacctgaatagagaactcactgcacccacccacaacacatgataaacacatgtcctcactgaaaaaaaaaaaaaaaaaa

SEQ ID NO: 926 - DNA, 539 bp, Homo sapiens
  misc_feature (528)..(529): n equals a,t,g, or c
  misc_feature (531)..(532): n equals a,t,g, or c
  misc_feature (537)..(537): n equals a,t,g, or c
gagatacattccatgaatacctagtttattgagagtttttagcatgaaggactgtcgaattttgtcaaaggctttttctgcatctattgagataatcatgtggtttttgtctttggttctgtttatgtgatggactatgtttattgatttgcatatgttgaaccagccttgcatctcagggatgaagccaactcgatcgttgtggataagctttttgatgtgctgctggatttggtttgccaatattttattgaggatttttgcatcagtgttcttcagggatattggtctaaaattctcttttttttgttgtgtctctgccaggctttggtatcaggatgatgctggcctcataaatgagttagggaggattccctctttctattgatcagaatagtttcagaaggaatggtaccagctcttctttgtacctctggtagaatttgggtgkgaatctatcttgkcctggaatatttttggggttggaactcaaaaaaaaaaaaaaaaaaatcaaaaaaaaaaaaaaannannaaaanaa

SEQ ID NO: 927 - DNA, 754 bp, Homo sapiens
ttaaccctcactaaagggaacaaaagctggagctccaccgcggtggcggccgctctagaactagtggatcccccgggctgcaggaattcggcacgagcactgcagctccctgagcactctctacagagacgcggaccccagacatgaggaggctcctcctggtcaccagcctggtggttgtgctgctgtgggaggcaggtgcagtcccagcacccaaggtccctatcaagatgcaagtcaaacactggccctcagagcaggacccagagaaggcctggggcgcccgtgtggtggagcctccggagaaggacgaccagctggtggtgctgttccctgtccagaagccgaaactcttgaccaccgaggagaagccacgaggcaccaaggcctggatggagaccgaggacaccctgggccgtgtcctgagtcccgagcccgaccatgacagcctgtaccaccctccgcctgaggaggaccagggcgaggagaggccccggttgtgggtgatgccaaatcaccaggtgctcctgggaccggaggaagaccaagaccacatctaccacccccagtaggggctccaggggccatcactgcccccgccctgtcccaaggcccaggctgttgggactgggaccctccctaccctgccccagctagacaaataaaccccagcaggccggaaaaaaaaaaaaaaaaaaaaaaaaaaaaaaaaaaaaaaaaaaaaaaaaaaaaaaaaaaaaaaaaaaaaaaaaaa

SEQ ID NO: 928 - DNA, 667 bp, Homo sapiens
ggcacgagcactgcagctccctgagcactctctacagagacgcggaccccagacatgaggaggctcctcctggtcaccagcctggtggttgtgctgctgtgggaggcaggtgcagtcccagcacccaaggtccctatcaagatgcaagtcaaacactggccctcagagcaggacccagagaaggcctggggcgcccgtgtggtggagcctccggagaaggacgaccagctggtggtgctgttccctgtccagaagccgaaactcttgaccaccgaggagaagccacgaggcaccaaggcctggatggagaccgaggacaccctgggccgtgtcctgagtcccgagcccgaccatgacagcctgtaccaccctccgcctgaagaggaccagggcgaggagaggccccggttgtaggtgatgccaaatcaccaggtgctcctgggaccggaggaagaccaagacacatctaccacccccagtaggggctccaggggccatcaatgcccccgccctgtcccaaggcccaggctgttgggactgggaccctccctaccctgccccagctagacaaataaaccccagcaggccggaaaaaaaaaaaaaaaaaaaaaaaaaaaaaaaaaaaaaaaaaaaaaaaaaaaaaaaaaaaaaaaaaaaaaaaaaaaaa

SEQ ID NO: 929 - DNA, 2025 bp, Homo sapiens
gcccgagaggcccggttcctttaggccgcctgcccgcctccagctctcggggtcggctccaggaggcgccctcaggagaggggcgggcgctctattccagagaccgagtggcagggcggccactgtggcggggctctttccccgtttcgcctcagctacccctcagctccggtagtcgccagtccggggtcgtcgccgtttggggcgggagctgctcggccccgccgccgtccccgtcgccgcttccgggtccaggcccctcgggccgcctgccgccgtcatgaggctgcgggtgcggcttctgaagcggacctggccgctggaggtgcccgagacggagccgacgctggggcatttgcgctcgcacctgaggcagtccctgctgtgcacctgggggtacagttctaatacccgatttacaattacattgaactacaaggatcccctcactggagatgaagagaccttggcttcatatgggattgtttctggggacttgatatgtttgattcttcaagatgacattccagcgcctaatataccttcatccacagattcagagcattcttcactccagaataatgagcaaccctctttggccaccagctccaatcagactagcatrcaggatgaacaaccaagtgattcattccaaggacaggcagcccagtctggtgtttggaatgacgacagtatgttagggcctagtcaaaattttgaagctgagtcaattcaagataatgcgcatatggcagagggcacaggtttctatccctcagaacccatgctctgtagtgaatcggtggaagggcaagtgccacattcattagagaccttgtatcaatcagctgactgttctgatgccaatgatgccttgatagtgttgatacatcttctcatgttggagtcaggttacatacctcagggcaccgaagccaaagcactgtccatgccggagaagtggaagttgagcggggtgtataagctgcagtacatgcatcctctctgcgagggcagctccgctactctcacctgtgtgcctttgggaaacctgattgttgtaaatgcactgaacctaccagatgtatttgggttggtcgtcctcccattggaactgaaactacggatcttccgacttctggatgttcgttccgtcttgtctttgtctgcggtttgtcgtgacctctttactgcttcaaatgacccactcctgtggaggtttttatatctgcgtgattttcgagacaatactgtcagagttcaagacacagattggaaagaactgtacaggaagaggcacatacaaagaaaagaatccccgaaagggcggtttgtgatgctcctgccatcgtcaactcacaccattccattctatcccaaccccttgcaccctaggccatttcctagctcccgccttcctccaggaattatcgggggtgaatatgaccaaagaccaacacttccctatgttggagacccaatcagttcactcattcctggtcctggggagacgcccagccagtttcctccactgagaccacgctttgatccagttggcccacttccaggacctaaccccatcttgccagggcgaggcggccccaatgacagatttccctttagacccagcaggggtcggccaactgatggccggctgtcattcatgtgattgatttgtaatttcatttctggagctccatttgtttttgtttctaaactacagatgtcaactccttggggtgctgatctcgagtgttattttctgattgtggtgttgagagttgcactcccagaaaccttttaagagatacatttatagccctaggggtggtatgacccaaaggttcctctgtgacaaggttggccttgggaatagttggctgccaatctccctgctcttggttctcctctagattgaagtttgttttctgatgctgttcttaccagattaaaaaaaagtgtaaattaaaaaaaaaaaaaaaaaaactygaggggggcccsggacccaattsccctatagggggc

SEQ ID NO: 930 - DNA, 1020 bp, Homo sapiens
aaactaggggaaaatgtagccaacatatacaaagatcttcagaaactctctcgcctctttaaagaccagctggtgtatcctcttctggcttttacccgacaagcactgaacctaccagatgtatttgggttggtcgtcctcccattggaactgaaactacggatcttccgacttctggatgttcgttccgtcttgtctttgtctgcggtttgtcgtgacctctttactgcttcaaatgacccactcctgtggaggtttttatatctgcgtgattttcgagacaatactgtcagagttcaagacacagattggaagactgtacaggaagaggcacatacaaagaaaagaatccccgaaagggcggtttgtgatgctcctgccatcgtcaactcacaccattccattctatcccaaccccttgcaccctaggccatttcctagctcccgccttcctccaggaattatcgggggtgaatatgaccaaagaccaacacttccctatgttggagacccaatcagttcactcattcctggtcctggggagacgcccagccagtttcctccactgagaccacgctttgatccagttggcccacttccaggacctaaccccatcttgccagggcgaggcggccccaatgacagatttccctttagacccagcaggggtcggccaactgatggccggctgtcattcatgtgattgatttgtaatttcatttctggagctccatttgtttttgtttctaaactacagatgtcaactccttggggtgctgatctcgagtgttattttctgattgtggtgttgagagttgcactcccagaaaccttttaagagatacatttatagccctaggggtggtatgacccaaaggttcctctgtgacaaggttggccttgggaatagttggctgccaatctccctgctcttggttctcctctagattgaagtttgttttctgatgctgttcttaccagattaaaaaaaagtgtaaattaaaaaaaaaaaaaaaaaaa

SEQ ID NO: 931 - DNA, 1006 bp, Homo sapiens
gcgkgcctycaaggccctgctcccagtgggcgcctatgaagtcttcgcccgggaggcggtgggtgcgggtgcagctcggggcctgctgcctggagatgaggacgctggtcgagctcgggccctgggctggggactttgggcctgacctgctgctcaccctgctcttcctgctcttcctggcgcacggggtcaccttggacggggcctcggccaaccccactgtgtccctgcaggagttcctcatggccgagcagtctctgcctggcacgctgttgaagctggcggcacaggggctgggcatgcaggccgcctgcaccctgaygcgcctctgctgggcctgggagctcagtgacctgcacctgctgcagagcctcatggcccagagctgcagctcggccctgcgcacatccgtgccccacggggcgcttktggaggccgcctgcaccttttgtttccatctgaccctcctgcacctgcggcacagtcctccsgcctacagcgggccygctgtggctctgttggtcaccgtcayggcctacacggccggcccttacgtctgcttcttcaaccctgccctggccgctctgtgacctttgcctgctcgggacacaccttactggagtacgtgcaggtgtactggctgggccctctgacagggatggtcctggctgtgctgctgcaccagggccgcttccccrccttttccagaggaacctgttctacggccagaagaacaagtaccgagcaccccgagggaagccggccccggcctyaggggacacccagacccctgcaaaggggtccagtgtccgggagcctgggcgcagtggtgttgaggggccacattccagctgagtggccttgctctgtgtgagccccgtgcgagggccctgcttgtagctggaccctggaaccttctgtagctaagagggaatcctggccccctccccagaagccatttgtcaataaaccatttctaagaaaaaaaaaaaaaaagggcggccgc

SEQ ID NO: 932 - DNA, 3306 bp, Homo sapiens
ccacgcgtccggcccagggctgtctgtctccaaagcccaaccataactcacatccccattccagctcctctgggtgagtctgttccccctcagcctcactttccttatcctgtcaaatgaaggatttggaatgacttaagttattcaagcaacaaacacttactgaattgtcttgccacttccagggtgacattatggagttctgtgattctgcaagaggccagaggggacaaggtcaagtgggtgttcacctggcccctcatcttcctcctgtgcgtcaccattcccaactgcagcaagccccgctgggagaagttcttcatggtcaccttcatcaacgccacgctgtggatcgctgtgttctcctacatcatggtgtggctggtgactattatcggatacacacttgggatcccggatgtcatcatgggcattactttcctggcagcaggacaagtgttccagactgcatggccagcctaattgtggcgagacaaggccttggggacatggcagtctccaacaccatagaagcaacgtgtttgacatcctggtaggacttggtgtaccgtggggcctgcagaccatggttgttaattatggatcaacagtgaagatcaacagccgggggctggtctattccgtggtcctgttgctgggctctgtcgctctcaccgtcctcggcatccacctaaacaagtggcgactggaccggaagctgggtgtctacgtgctggttctctacgccatcttcttgtgcttctccataatgatagagtttaacgtctttaccttcgtcaacttgccgatgtgccgggaagacgattagcgctgagtcgcggcccctgggagctgatctggacaccctgtgacactggcgtcctcctctcccctccttcccccaccacaggtctctcctgcataggcagccactgtccgttctttcacacactggaaggaagagccatcgtggtctttgtctggccacagccaagctgctgggcatcctcctcctccttggagttccacccctgcaaggctggatttgggggccattatctgagcagcttcaaagacccctgagctgccaaccacggagatgtgccaagcatctcatctctcctgcacactttagtcagaaggacttctgcatgcagtttgtctttctgttctgcaggcagcttcagaattgaggtcatttgtgagcacaagatctcatagggcaggtgcaaaataggaatgttgttctcaagtgtcacctccagcccagaggtggttccttaggcagcatgtgctcctgggagcctctgacttttgctggaagcacccacagtttggaaggggcaagacctcaacctgttggggtttagggcccatgatggcagacattctaccccttttcctggaaaaactggaagaatgaaaataatttttttctgtggaagagagaaaatgagtgaatattcttctcacttttattgatgcattcagagaataagcaatgaaatattaaaaaatgaaacatcatataggtcatcatacttgaaaattatcattccatatgaaaggatcatgatacacaccaaaaaagtaatgatcgtaaagacacaaatcctctgtatgccatcttgcattggcactgaggtgtttggtttggaatagggaaaaagagacaggatctcgctgtgttccccaggtaggtcttgaactcctggcctcaagtgatcctcctgccttgacctcccaaagtgctggattacaagcgtgagcccctgcacccggcccaagcagttgcttctttttttctctttttttttttttttgagatggagcctcactctgttgcccaggctggagtgcagtggcgcgatctccactcactgcaagctccgcctcccgggttcatgccattctcctgcctcagcctcccgagtagctgggactacaggcgcctgccaccacacccagctaattttttgtatttttggtacagacagggtttcaccgtgttagccaggatggtcttgatctctgatctcggatccgccaccccggcctccaaagtgctggattacaagcgtgagccaccgggccccgccaagcagttgcttcttatgcaacatgttgggtgggacttgtccacgggccaggccaataaaattcttaatcctgcagagagcagtaccctcatcaccccatcactggaaaacaaatgtttaagctatcaagagagggaatgtgcagcttggttctagatgcatggtttggaggatctaccttggcctaaagggaatgtcccaaacaacagagccttctttgctgcactccagaattctctacacagaatttcccaagtccattcaggacagacgcgcagtcctctttcaatggaagaagagaggacttttcccctcctgaaaaatgactggagtgtgaacaaggcagctctgtttttctaaataagttgttcttgtgagttttttctggccactgggcatctctgccctcacttttcatccctgccctctaagctgcagaccccatgaccacactgtctgcttccttgagcttcccgcacgaggcttgcacctgggggacctggagaccctgcggacagaactgtggctgagccactgtggccaactcttggggagctccacagtgggggttgctggtctgtgaggctgagtctccatttcagagcacacactccctggcagggcgcctccgcctgtgtctcctgcccagcagccgccagcagggaatagttgctggtgtctgagcacaaagagagctttgattacctagagaggaaaaaggctgtcagccagatgcagccaggcccaggggtagatacaggagttgctaaggaaggggccgagccaggagaggccaggcagatccacaaagcccaaggggatgcaggctgggtgtggtttctgagggaacctaccaaatagcaggtagatggaatcagaggactcttgtgtcctgaaagaacctccttaaaaacaactaaaaccaagaacttctggggctgttcacacattgttcaagtcaccccaagatcgttctggcacgctgagctgaacaccaccatctttgttcattctctctctaatgggcaaagcaggatcatcgagttgaaaagttgtaaataatgaggatatttatcccgctatttattttttcaataactgtgacctcctgcactgtgaatgctctgtgacatgagattcttagtttaataaaactgtcattaaatttgaaaaaaaaaaaaaaaaaaaaaaaaaaaaaaaaaaaaaa

SEQ ID NO: 933 - DNA, 2194 bp, Homo sapiens
  misc_feature (441)..(441): n equals a,t,g, or c
  misc_feature (987)..(987): n equals a,t,g, or c
  misc_feature (2034)..(2034): n equals a,t,g, or c
  misc_feature (2041)..(2041): n equals a,t,g, or c
  misc_feature (2121)..(2121): n equals a,t,g, or c
  misc_feature (2169)..(2169): n equals a,t,g, or c
  misc_feature (2184)..(2184): n equals a,t,g, or c
ggcccagggctgtctgtctccaaagcccaaccataactcacatccccattccagctcctctgggtgagtctgttccccctcagcctcactttccttatcctgtcaaatgaaggatttggaatgacttaagttattcaagcaacaaacacttactgaattgtcttgccacttccagggtgacattatggagttctgtgattctgcaagaggccagaggggacaaggtcaagtgggtgttcacctggcccctcatcttcctcctgtgcgtcaccattcccaactgcagcaagccccgctgggagaagttcttcatggtcaccttcatcamcgccacgctgtggatcgctgtgttctcctacatcatggtgtggctggtgactattatcggatacacacttgggatcccggatgtcatcatgggcattamtttcctggcagcanggacaagtgttccagactgcatggccagcctaattgtggcgagacaaggccttggggacatggcagtctccaacacyataaraagcaacgtgtttgacatcctggtaggacttggtgtaccgtggggcctgcagaccatggttgttaattatggatcaacagtgaagatcaacagccgggggctggtctattccgtggtcctgttgctgggctctgtcgctctcaccgtcctcggcatccacctaaacaagtggcgactggaccggaagctgggtgtctacgtgctggttctctacgccatcttcttgtgcttctccataatgatagagtttaacgtctttaccttcgtcaacttgccgatgtgccgggaagacgattagcgctgagtcgcggcccctgggagctgatctggacaccctgtgacactggcgtcctcctctcccctccttcccccaccacaggtctctcctgcataggcagccactgtccgttctttcacacactggaaggaagagccatcgtggtctttgtctggccacaggccangctgctgggcatcctcctcctccttggagttccacccctgsaaggcygatttgggggccattatctgagcagcttcaaagacccctgarctgccaaccacggagatgtgccaagcatctcatctctcctgcacactttagtcagaaggacttctgcatgcagtttgtctttctgttctgcaggcagcttcagaattgaggtcatttgtgagcacaagatctcatagggcaggtgcaaaataggaatgttgttctcaagtgtcacctccagcccagaggtggttccttaggcagcatgtgctcctgggagcctctgacttttgctggaagcacccacagtttggaaggggcaagacctcaacctgttggggtttagggcccatgatggcagacattctaccccttttcctggaaaaactggaagaatgaaaatmatttttttctgtggaagagagaaaatgagtgaatatycttctcacttttattgatgcattcagagaataagcaatgaaatattaaaaaatgaaacatcatataggtcatcatacttgaaaattatcattccatatgaaaggatcatgatacacaccaaaaaagtaatgatcgtaaagacacaaatcctctgtatgccatcttgcattggcactgaggtgtttggtttggaatagggaaaaagagacaggatctcgctgtgttccccaggtaggtcttgaactcctggcctcaagtgatcctcctgccttgacctcccaaagtgctggattacaagcgtgagcccctgcacccggcgccaagcagttgcttctttttttctctttttttttttttttgagatggagcctcactctgttgcccaggctggagtgcagtggcgcgatctccactcactgcaagctccgcctcccgggttcatgccattctcctgcctcagcctcccgagtagctgggactacaggcgcctgccaccacacccagctaattttttgtatttttggtacagacagggtttcaccgtgttagccaggatggtcttgatctctgatctcgngatccgnccaccccggccttccaaagtgcttggattacaagcgtgagccacccgggccccgccaagcaagttgcttcttatgcaacnatgttgggttggggacttggtccacggggcccaggcccaataaaaatnctttaatccctgcanaagaggccag

SEQ ID NO: 934 - DNA, 1940 bp, Homo sapiens
  misc_feature (5)..(5): n equals a,t,g, or c
  misc_feature (1573)..(1573): n equals a,t,g, or c
tcganccacgcgtccgcggacgctgggcgcaacaaagccttctacttgagcagtttttccatcactgatatgtgcaggaaatgaagacattgcctgccatgcttggaactgggaaattattttgggtcttcttcttaatcccatatctggacatctggaacatccatgggaaagaatcatgtgatgtacagctttatataaagagacaatctgaacactccatcttagcaggagatccctttgaactagaatgccctgtgaaatactgtgctaacaggcctcatgtgacttggtgcaagctcaatggaacaacatgtgtaaaacttgaagatagacaaacaagttggaagaagagaagaacatttcatttttcatctacrytttgaaccagtgcttcctaatgacaatgggtcataccgctgttctgcaaattttcagtctaatctcattgaaagccactcaacaactctttatgtgacaggtgagttctcaacacctagaccatctgatatttttcttataatgtttccaggaagaggggggttcagtttctcaagtgattatgttagaaagccaactcctatagcacatctgaaatctgctacacctcacagattgttatgtgccagtgtgtacatatgtgtgtgtatgtgtgcgtttgargtgagtgagatagaggagagtagakaaatagatagtaaaagttattgtttttgactttagggattataaaatttatttgataagtccaaaagtagaccactgaaatattgaaaaaattataaagtgaatacctatagttgcgaatagctctgtgattgcttgtccttctttgttgttttttttttctctttttcccatttttctcttctttacttttgttcattacaatttcttgaagttatgtttgtggtgcttaggcaattaaacacttcttaatagttcacagtttgtttagaggaaaaacagcaaacaactaactgacttcctagtgattttctgggaatattcagagyttcatctytyttccctgttccccgaaagaggcctttaatatgctttgacaactgaggaaggacagatagaagttaagcttggggaaaccaagctgaataaaacatgaaaaaatacatagggggggagtaggtaagagtaaaaaatacttggtttataaaaattttatagccaacatcatattcaatggtgaaaggcttagagctttccccctaagaacaggaacaagacatggatccttgcttttgccatttccatttaacattaaactgaaaattctagccagagcaaacaggcaagaacaagaaataaaagatatctaacttagaaaaaaagaagtaaaactttattcacagatggcatgaacttatgtgtagaaaaattcttaaaaatttgtttaaaactattaaagctaatacatgaatttagcaattccacatgatacaggatcaacacacmaaaatcagtgatatttctatacactagcaataaacaatccacaaagaaaattaaggaaacagttccatttacaatagcatcaaaatgaataaaatatttnagtacaaatttaaccaaagaggtataagagttgtacactgaacaaagaaagcatggctgaaagaaattcaagaatatgtaaataaatgcaaagacattctgtattcatggactgaaagatgtaatattgtaaagatagcaatattccccaaggtgatctacagattcaatgcagttccactaaaatcctaacagctttttgttgctattgcagaaataaaaaagctgatcctaaaattcacattgagttgcaacagacccagaattgccaaaacaatcttgaaaaagaacaaaactgaagctaagacttccctatttcaaaacttactacaaaatgacagttaaaaaaaaaaaaaaagggcggccgc

SEQ ID NO: 935 - DNA, 1315 bp, Homo sapiens
acgcgtccggacgccgccacctccggaacaagccatggtggcggctacggtggcagcggcgtggctgctcctgtgggctgcggcctgcgcgcagcaggagcaggacttctacgacttcaaggcggtcaacatccggggcaaactggtgtcgctggagaagtaccgcggatcggtgtccctggtggtgaatgtggccagcgagtgcggcttcacagaccagcactaccgagccctgcagcagctgcagcgagacctgggcccccaccacttcaacgtgctcgccttcccctgcaaccagtttggccaacaggagcctgacagcaacaaggagattgagagctttgcccgccgcacctacagtgtctcattccccatgtttagcaagattgcagtcaccggtactggtgcccatcctgccttcaagtacctggcccagacttctgggaaggagcccacctggaacttctggaagtacctagtagccccagatggaaaggtggtaggggcttgggacccaactgtgtcagtggaggaggtcagaccccagatcacagcgctcgtgaggaagctcatcctactgaagcgagaagacttataaccaccgcgtctcctcctccaccacctcatcccgcccacctgtgtggggctgaccaatgcaaactcaaatggtgcttcaaagggagagacccactgactctccttcctttactcttatgccattggtcccatcattcttgtgggggaaaaattctagtattttgattatttgaatcttacagcaacaaataggaactcctggccaatgagagctcttgaccagtgaatcaccagccgatacgaacgtcttgccaacaaaaatgtgtggcaaatagaagtatatcaagcaataatctcccacccaaggcttctgtaaactgggaccaatgattacctcatagggctgttgtgaggattaggatgaaatacctgtgaaagtgcctaggcagtgccagccaaataggaggcattcaatgaacattttttgcacataaaccaaaaaataacttgttatcaataaaaacttgcatccaacatgaatttccagccgatgataatccaggccaaaggtttagttgttgttatttcctctgtattattttcttcattacaaaagaaatgcaagttcattgtaacaatccaaacaatacctcacgatataaaataaaaatgaaagtatcctcctcaaaaaaaaaaaaaaaaaaaaaaaaaaaaaaaaaaaaaaaaaaaaaaaaaaaaaaaaaaaaaaaaaaaaaaaaaaaaaaaaaaaaaaaaaaaa

SEQ ID NO: 936 - DNA, 1138 bp, Homo sapiens
gggcgcctgtagtcccagctattcaggaggccgaggcaggagaattgcctgaactcaggaggcggasttgcagtgagccgagatcgcgccattgcactccagcctgggtgacagagtgagactctttctcccaaaaaaaaaaaaaaaaaaaaagtcaaatgcagctgggaatgtggttcgtgcctttttgtatattaaccatttgaaacttggttgtaaggtggggttggcaatgtcaggcctggctgcagcagctcatgtctttagagtgtgcctcttccctctctcgtggggctcgagcaagactaccttcatacatgggctctccagttacatagcaactccagtgttaaattccatcttttcttcctggaaaagccgtagaaaggacacctggacatgcctgctgcacaggttgtctgccttccccatcagccscagaaggaggaactttgctctcttctctcacagctgtgtgtgcataagaagtagttcggatgatgtgggtcccaccatgtattccttctctgttccatgtagagtaaaataaatgggagttctgtttaatgcatcacctcggttcatattgcatttgccaagaaagtgcaattttattgaacattaggattgaattcttaactgagtaatcaatttcagtagtaagttaaaatgccttctattaatggacaactgcaaccgttaatcagagttacagtagattaacagttgtcagcatttatgctaatagcactaataaaccgtgggctcatgatttgcactttataattccatatttctcaaaacagttggtaatactttttgcttgaaggtattgattcttttgtccctttgcttgctacttggagatgtagagaaagctaaatgacattttcacggtgatgacacaatatcaccttctgcttttgcacacttggctttgtgtcaaaatagatggaaagggttcatttgttctggtgctctactgtttaatttgatctggtgtgtgactaaagcaagacaaatagtatttttaatgaaaccatttaataacctctggtagcttagagtcgaaggcattggaaaaatgcaattaaaggatgcctagatgtaaacaaaaaaaaaaaaaaagggcggccgc

SEQ ID NO: 937 - DNA, 314 bp, Homo sapiens
gtcgacccacgcgtccgctttgaggagcattcctctagattgcacaagggacagtgcctttaaccaagcgaggagtccaaagctcaggacctgactaccctgagggcacgctgacgcctcttcccagggggatggggagctttctgcacccccagtggcatctcctcatcacgttctgtgccgtccttgggaaaggcctgcattctgatccttccaggcccttcgagcatggaggggcactggggaaggtcccccgagggaggagcacgttgctgagtaaagaggtgttactcaaaaaaaaaaaaaaaaaaagg

SEQ ID NO: 938 - DNA, 5811 bp, Homo sapiens
  misc_feature (2809)..(2809): n equals a,t,g, or c
  misc_feature (2827)..(2827): n equals a,t,g, or c
  misc_feature (5787)..(5787): n equals a,t,g, or c
  misc_feature (5803)..(5803): n equals a,t,g, or c
aaatttttttttttttttttttttttttttttttttttttttttttttcaccascacggcttctctccagccttctctttattttctccagggcaccagcccctctgccagcctgagtccagggctcctaggcactctaccttgcccttgccattcccagggcctccccgcggccccgcaggggagggaggctcagagcacagtctcggcagtgctagggtcatcgaggaactggctgacgcgtttggggtgctgcaggcctggcgcggggtccactcccactcctgcctccttctgctcttcggtgtcctcgtccttcccctggtccttggagaagtacaagaatacctcctccagcatcgtctggctcacggaaaagtcctccacgccgtgctctgcgccgtgcaccgccagctctccaaagacgcgcgccagggcgcagcgccctcccggcggcagctggaagcgcaggcggcctccatgtgcctcgcgcagctccgmcccagggaactcggccgccacgaaggccgctgccggctgggaccttgcggcgggcacccgcagggtcagtgtgtgacccgccgcgaatctgcccttgagatgttgcgggctgcccaggcagcggaaccgcccattcaccatgatggccaggcgcgagcagagcgcttcacactcctccatgctatgggaggtgagcatcactgaacggccctcccgcaccacggccaaaaggctgttccaaaggaagcgccgcgcgctggggtccatgcctgtggtcggctcgtccagaaacaccacggctgggtccccaaccagcgccagggccgtcgccagcttgcgtttgttccctccgctgtaggtgcctgcaggccggtctgcgtaccatgagagtcccagacgcgccaggcccgagccagcggtctgggcaacctgggcctccgggacaccgcgcaggcgcgcaagcagctccaggtgctcgcggcccgtcagcagctcaaagatggcatcggattgagggcagtatcccatgctgaggtgcgcagcactgggttcccgggccacgctgtggcctgccagcacagcctcgcccctgctggccaatgtgtcccccgtcaccatgcgaaacgtggacgtcttccctgctccattcacacccagcagcccaaaacactcaccagggggaatccccaggcacaagcggtcaacagctggcatcctctgcccacggtataccttggtcaagttcctcagcaccaacacatccccctgggtggctccttggaccacccgctcccgttcacgggctacatcctcgtcctcctctcccaggagtggcagagacctcaccctgggctgtggcaggagttggcttcggtgctgcagcagtagtgtgaagagaaggaagaggggcccctgtatcaccatggccaagaggttcttgccgaccacctcccagcgcaggggtgactggaactgcctgtctcccaagcgctcaaaggcatcagccatggcctggttccgcaccatgtcaatgagcccccggcccaagcagaagtgggggaagataaggaagacctgtttcaagatccggctcacctcctgcagcttctgatcagagaagagctcaagcacaaaggtggccatgcttccattgatgccaataaagaggtttatgcaggtgagcaccacataggctgtgctgggcacggagaagaagaaggaggctgggtacatgagcggtgtgatcgaccagccatacagtagtagcaacagcaggagagcaggcaggttggcaggggccacatatgccctctgctggaaggccagaaagatgagcaccacgatgcatgctggcaccaagtagttacacatgtcccagagaaagttgccaagccagtagagggtgggggacaggccccccatgagctgcaggtgcttggctcgggtgactcgctcctcaatgaggacaagagtgaagctggccgggacaaaggacatggcaaagaccacacagatggagacgaggacgtccaccgaggaggccatcagtgcaccctcagacagctgctccttggtgaggttcaaggggtggttgagtgtggtgatgctgtgggcgtggcgggccgggcctgggggcaggtgagcacggaggattgcgttgctggctcggttgacaaaggccaccatggagtgccagcctttgttgttgaaccagatcttgagactgtcctgagcatccaggctgtgagcccaggctgtgaggtttttcaggacacggtcgagggccccgccaggcaggggactcagcagcgcccacaactcctccactgagcggcccaactcttggcccgagggcaggcctgggtctcggccccccagcgagaagcctccgtatctgacctcattcacccacttcttagtcttcaggccctggcgcaccaggcgcgggtaggtcttgaccaggaagtcagacaggttccggcctgtcaggttctgaaccacttccccagagccggtcactgcctggggcggagggggaccaccagctgcagccgggcagtcgggcagcaggcgccgggcaccgggccggctacactggcaggctggggatggagactctggggtccagttgccactggccaagaccttggccacttcagcaggaacttctggtgccgagaacctgtgggagctatgctgcactgggggctcctccagtcctgcctcctgcagcagcgcctcgagcagccgggcacgtccagggtcccctggggcgtcctcactgggcgaacaggacgcggcgcccccncccccccccccccccccnccgcttgagaagcagggcctggagctgctggcgggtcagtgcccagccctgtacccggcccacggcgtctggcccagagccctggtcagtctctggggctgacccagctggttccccgttctccagcgctgtctcctgtggcggcatcttgagccgtakggttacgtctaggccagcaatgcctgtgcataggtgctgcccgcagctgccatcctccatatctgtgtccgcagcacactcctccaccaccttcaggaagatctcctcgaggctggtgtcggagatcccgtagccagtgagcctcagctccgccagccgcgtgtctagctctcggaagagtgtggcgaagctgccgtcatgggcacccgtgtagggcagcaccagcaccagctcgtgtggcagctcctccaccagccgtgccccgggcacccagtgctgtaccagggccagcagctgaggagtgccgactctgctgccctggctgccattcttcttttcctgcctggtgtccacactgccctccatgtcagtgtcagccttctcattggtggtcaggggcaggcgggccttcaccagcgtcaggtagtagccggagcccaggtgacggcgcaggaagagtggggagccacagcagcacaagcggccacctgccaccacggccacacggtctcccagcagctctgcctcatccaggtggtgggtggagaggatcagcgtgcgaccttctcggtatttgagcagcagctcccaaataccgcggcgggaagcaggatccacgccagccgtaggctcgtccaggataacaacttgggmgmcgcccacaaaggcaatggccacggacagcttccgttgcatcccaccagagaggtggcgagtctgcacactctgcttggagaccagccccacatcctgcagcagacggtcctgctcggggcccactacagcggcactcagacccttcagccgcccatagaaccagacgtgctcgtccacggtcagcatgtcaaacagcacgttgtactgaggacagacgcccaggtggggccggatggcggccatgctggagcggacgtcgtggcccaggatgaaggcagagccaccactgggtgggaagaggccactcaagatggacagggtggtggtcttgccggccccgttgtggcccaggaaggcggtgatgtggccctggtagaagtccaggctgagcccccgcagggctggctgcgggcttccaggaaagcgcttctccaggctgcgaacggagacgccaggactcaggccgggcggtgcctcttctaccagcacctttgggtccagcggggtggggcaaggggctggactcttggggggccgaggtccgcaccagtagctcctccgaaaaggaaaattccatggttcagggatcccgtactggcctgggcacacagcttccaggtaccaggtggcgaggccgtagagcgccgcgtccagcagcagaaggccagagacctgggccaggctgaagacgtctgccgtaggccgggtgcccacgttgtgccactgcgcgccctcgccctgytcctccagcagagccaggctcttcgcagccgaagccgaaaggccacgggcgacagcaggctcgcggccacgcggccacccgcgggcagccggtcccgccaagccacacacagcacgtagggcaggtagagggagaagtaggccaggccgccgcaggccgcagccaggttggcgcgggagaagaaggcgctgagcaggaagctctgggtcaccgtggccaccgcgaaggctgccaagaacaggaagaccacgcccgggtggctgtaggggaggatgtcycccagcttgagcaccagaaccagcagygcggcgctgagcaggaagggcccgaggcagctgaggaaccagcctagccagagcaccgcgcggctgagccccatggcgcgcatggtgtcccgcagccgcgtctccttctcccgcaccacggccttcactgtcagtgtcacggagtagatccaggccagcgtcaggaagagcggcagcgaccggctcagcacacgcaggaacacgtcgtccacatagcacggatagggcatctgctgcaggtagaggccggcccgggggttggcgccgctgagcacgcggacggctgcacgctccaccaggtcttgcaggtacacgaagccgccccacacgtagcgcaggtcggtcagggggtccgcggctgggccagggtcccaaaacctgtccctgatcttattggtcctcgtgaccacgtcaatgtccatgcggattttgatgcgcacgtgccggggcccaggtctggggttgggtgctctgtggggtctgaagagtcctcaggtcccaagaagacgacgccggcccagaatcgatgttccgcgagcagttgcagggcccgcgacaccagggctgcctctgagggtgccgcctccagcttgtccaaggacaggcactccgtcactcggcccagcgtgcccaccaggtgccccacatcagcgtgtgcgtcctgccagctgtagccaccgctcccagggtccagaaaggatcgcagggcctccatgtggtcccggcctccaggtctgggctgccttcttccttcatcctgcatctgcaggagccgctgcagcatggccmcattggaactgtcgttcatraaggtgaagawccggggtcccagcatctcccacacctcccggacatcccycagcagggtgagctcctcgaaggtccggttcacctgggccatgagcttccgggtaaaaggtgtatctggtgcaaagagtagcttcccgaggatcagaggcttcaggcgtctccagagcaggcgggacagcgggtggctgtccagggctccaatcagctccgagcaggcggggctcaggctgctgtctggcagggcggattctggctcctgccccaccagctccatcaggtcactagcntcgtaccagtgaagtnttcctttc

SEQ ID NO: 939 - DNA, 1012 bp, Homo sapiens
  misc_feature (19)..(19): n equals a,t,g, or c
  misc_feature (956)..(956): n equals a,t,g, or c
  misc_feature (970)..(970): n equals a,t,g, or c
  misc_feature (981)..(981): n equals a,t,g, or c
  misc_feature (989)..(989): n equals a,t,g, or c
  misc_feature (999)..(999): n equals a,t,g, or c
gccatggtagcatatgtantacattttctttatccagttcaccgttgatgggcacctgggtttactccatgtctttgctattgtgaatagtgctgcgataaacataggagtacaggtgtctttttgatagaacaatttgttttcctttgagtatatacctagtaatgggattgctgggatgaatggtagttctatttttagttctktgagaaatctccaaactgctggaaaacaagttttaatacacaagcaccctctttccccacctacagaaccttgacctcctttctagattgatctctgctaatcaccctcccactcccccaaccctggcttgcactagacttgtttgctattccctggtaawtctcatgagcattggctgaagcagtttctctkttctgaaataccctgaccctccgtacctagctaggcttttctccaggcagcatttatgaggccggtgttgtctgagtgtcctttgtggccaggcaggacagagcaagggcaagatgcttgatatatgctgacaagacaccattctagccgcacagatattccagcaaattggaagaccagcgtcgtccattcttgcaccttgcacctttttggtacctttgtcccttgtgtctggctttggagttaggatgggtctgtctgtcctccacgtagggagttagagcgagtttcatgttgcaccccacagagccctgcacggggatttgagaatggtaggcctccagggaatgttttgtatccaactacatgatttagggggcacaaaaatttctccctggccctgtgagagtcagagctgagaagcatcgagaaagtgtagctctgggcgtggataactaatcagactgcataaatgacaaaagccctctcatcccacagcaggttattgggagtcgtaccttgacttcagttcattttgctcacatagaccaaaaagnaaagcccaagaaangacaatttggngaacttcngtagaaggtnctgtaagaagatc

SEQ ID NO: 940 - DNA, 734 bp, Homo sapiens
gactgcttatatttggcattgtcttttccctggcactgccactgtcaccaccatcccccttctggatccctactttaccccttcatgctgctctggtggcagtgcctctgctgccatgctgtacttgagcctgctgctacagccatgcctgaagatgcagccccttcctctcttcctgtcccaccaaatatgaccagctctaggttccattacttctggactttgctccaaataaaacttacacaattttattccaaacccaggtctctttctgcaacacccgagaaaaatattgggctgcaggagccagagaggagagagagatttactggtgagagttgtaggtgggaattgaaagccaagtcatgtctttgccccaccagaaactcactaggatgtacacaatgccactgtgatggtkttaaaatatgtaactaacctgcacgttgtgcacatgtaccctaaaacttcaagtatatataaararagaaagaactgstgatacacatatcatgaaaaaagaccaaataaaataaaaaaataaaaataaataaataaaataaaatatgtccacaaatgctttgatgttcctttgtttcttgatctgtatgctagcaacacaggttcattccgtttgtgaaaattcattgagctgtgctcttatgagctgtgtacttctctacatgtatgttaaatgtggacaagaacttcacataaaaatcattttaaaaaaa

SEQ ID NO: 941 - DNA, 796 bp, Homo sapiens
  misc_feature (4)..(4): n equals a,t,g, or c
ggantcctcaggcgttctttagaaggtccgcctgcaggtaccggtccggaattcccgggtcgacccacgcgtycggcagacacaggcacttattcattcatctcattgaaaagctacgagttggttccttattgcctctccataatagaaaaactctttaatgagctctctttttgtttttcaaatcagatatgcaaagaagctcataacaattttttttaaaaatgcaaaacaagaatctccaattatgggagcaaaatcttcagcttctgggttcctgtctcactgaggaaatggatttgaaatggcaaggaggaaatgaggaggcaaactttcatgtctattttagttttccaatgcagtcctatttcctttggactttgtataaacaaggaaaggacagttgttagttcagttattacagataacctgtgtctttaaagtaaatgtatcttaaataagtaggactcccataaatgactacactttttcaaaatatgactccccagcttataacaagaataatagcaaacatcactttattaagcaattactatgtaaaagacacttagtgcttagcacacactggaaatattgttgactggctatattttccccagaaatcccatttctgaaagcctattacaaagaaataaaatcatcagtataacaaaggagtgtgtgtgtgtgtgggtgtgagtgtgtgtgggtgtgagtgtgtggggggtgtgagtgtgtgtggggtgtgagagtgtgtgtgtgagtgtaagtgtgtgtgtgtgtaagtgcacacacg

SEQ ID NO: 942 - DNA, 1037 bp, Homo sapiens
  misc_feature (12)..(12): n equals a,t,g, or c
tcgacccacgcntccggataggcacaggacaggagtaggcacctcgcctactgctgcttaacctttcagcttctccaggcccccaatcctgcttgcacccagcttgggaacgagacactgctgagctggaagacttcgcgggccacaggcacagccttcctgctgctggcggcgctgctggggctgcctggcaacggcttcgtggtgtggagcttggcgggctggcggcctgcacgggggcgaccgctggcggccacgcttgtgctgcacctggcgctggccgacggcgcggtgctgctgctcacgccgctctttgtggccttcctgacccggcaagcctggccgctgggccaggcgggctgcaaggcggtgtactacgtgtgcgcgctcagcatgtacgccagcgtgctgctcaccggcctgctcagcctgcagcgctgcctcgcggtcacccgccccttcctggcgcctcggtgcgcagcccggccctggcccgccgcctgctgctggcggtctggctggccgccctgttgctcgccgtcccggccgccgtctaccgccacctgtggagggaccgcgtatgccagctgtgccacccgtcgccggtccacgccgccgcccacctgagcctggagactctgaccgctttcgtgcttcctttcgggctgatgctcggctgctacagcgtgacgctggcacggctgcggggcgcccgctggggctccgggcggcacggggcgcgggtgggccggctggtgagcgccatcgtgccttcttcggcttgctctgggccccctaccacgcagtcaaccttctgcaggcggtcgcagcgctggctccaccggaaggggccttggcgaagctgggcggagccggccaggcggcgcgagcgggaactacggccttggccttcttcagttctagcgtcaacccggtgctctacgtcttcaccgctggagatctgctgccccgggcaggtccccgtttcctcacgcggctcttcgaaggctctggggaggcccgagggggcggccgct

SEQ ID NO: 943 - DNA, 1410 bp, Homo sapiens
ccgcctccttgccgcccagccggtccaggcctctggcgaacatggcgcttgtcccctgccaggtgctgcggatggcaatcctgctgtcttactgctctatcctgtgtaactacaaggccatcgaaatgccctcacaccagacctacggagggagctggaaattcctgacgttcattgatctggttatccaggctgtcttttttggcatctgtgtgctgactgatctttccagtcttctgactcgaggaagtgggaaccaggagcaagagaggcagctcaagaagctcatctctctccgggactggatgttagctgtgttggcctttcctgttggggtttttgttgtagcagtgttctggatcatttatgcctatgacagagagatgatatacccgaagctgctggataattttatcccagggtggctgaatcacggaatgcacacgacggttctgccctttatattaatcgagatgaggacatcgcaccatcagtatcccagcaggagcagcggacttaccgccatatgtaccttctctgttggctatatattatgggtgtgctgggtgcatcatgtaactggcatgtgggtgtaccctttcctggaacacattggcccaggagccagaatcatcttctttgggtctacaaccatcttaatgaacttcctgtacctgctgggagaagttctgaacaactatatctgggatacacagaaaagtatggaagaagagaaagaaaagcctaaattggaatgagatccaagtctaaacgcaagagctagattgagccgccattgaagactccttcccctcgggcattggcagtgggggagaaaaggcttcaaaggaacttggtggcatcagcacccccctcccccaatgaggacaccttttatatataaatatgtataaacatagaatacagttgtttccaaaagaactcaccctcactgtgtgttaaagaattcttcccaaagtcattactgataataacattttttccttttctagttttaaaaccagaattggaccttggatttttattttggcaattgtaactccatctaatcaagaaagaataaaagtttattgcacttctttttgagaamtatgttaaagtcaaaggggcatatatagagtaaggcttttgtgtatttaatcctaaaggtggctgtaatcatgaacctaggccaccatggggacctgagagggaaggggacagatgtttctcattgcataatgtcacagttgcctcaaatgagcaccatttgtaataatgatgtcaatttcatgaaaagcctgagtgtattgcatctcttgatttaatcatgtgaaacttttcctagatgcaaatgctgactaataaagacaaagccaccctgaaaaaaaaaaaaaaaagggcggccgc

SEQ ID NO: 944 - DNA, 1796 bp, Homo sapiens
  misc_feature (417)..(417): n equals a,t,g, or c
tcgacccacgcgtccgccagattctggaggcgaagaacgcaaagctgagaacatggacgttaatatcgccccactccgcgcctgggacgatttcttcccgggttccgatcgctttgcccggccggacttcagggacatttccaaatggaacaaccgcgtagtgagcaacctgctctattaccagaccaactacctggtggtggctgccatgatgatttccattgtggggtttctgagtcccttcaacatgatcctgggaggaatcgtggtggtgctggtgttcacagggtttgtgtgggcagcccacaataaagacgtccttcgccggatgaagaagcgctaccccacgacgttcgttatggtggtcatgttggcgagctatttccttatctccatgtttggaggagtcatggtctntgtgtttggcattacttttcctttgctgttgatgtttatccatgcatcgttgagacttcggaacctcaagaacaaactggagaataaaatggaaggataggttgaagaaggacaccgatgggcatgtcctggatgcctagaacagcaggaagaaggcatcaacagactcactgactatatcagcaaagtgaaggaataaacataacttacctgagctagggttgcagcagaaattgagttgcagcttgcccttgtccagacctatgttctgcttgcgtttttgaaacaggaggtgcacgtaccacccaattatctatggcagcatgcatgtataggccgaactattatcagctctgatgtttcagagagaagacctcagaaaccgaaagaaaaccaccaccctcctattgtgtctgaagtttcacgtgtgtttatgaaatctaatgggaaatggatcacacgatttctttaagggaattaaaaaaaataaaagaattacggcttttacagcaacaatacgattatcttataggaaaaaaaaaatcattgtaaagtatcaagacaatacgagtaaatgaaaaggctgttaaagtagatgacatcatgtgttagcctgttcctaatcccctagaattgtaatgtgtgggatataaattagtttttattattctcttaaaaatcaaagatgatctctatcactttgccacctgtttgatgtgcagtggaaactggttaagccagttgttcatacttcctttacaaatataaagatagctgtttaggatattttgttacatttttgtaaatttttgaaatgctagtaatgtgttttcaccagcaagtatttgttgcaaacttaatgtcattttccttaagatggttacagctatgtaacctgtattattctggacggacttattaaaatacaaacagacaaaaaataaaacaaaacttgagttctatttaccttgcacattttttgttgttacagtgaaaaaaatggtccaagaaaatgtttgccatttttgcattgtttcgtttttaactggaacatttagaaagaaggaaatgaatgtgcattttattaattccttaggggcacaaggaggacaataatagctgatcttttgaaatttgaaaaacgtctttagatgaccaagcaaaaagactttaaaaaatggtaatgaaaatggaatgcagctactgcagctaataaaaaattttagatagcaattgttacaaccatatgcctttatagctagacattagaattatgatagcatgagtttatacattctattatttttcctccctttctcatgtttttataaataggtaataaaaaatgttttgcctgccaaaaaaaaaaaaaaaaaaaa

SEQ ID NO: 945 - DNA, 2136 bp, Homo sapiens
ggggacggagccgctgtcaactctccaactcagctcagctgatcggttgccgccgccgccgccgccagattctggaggcgaagaacgcaaagctgagaacatggacgttaatatcgccccactccgcgcctgggacgatttcttcccgggttccgatcgctttgcccggccggacttcagggacatttccaaatggaacaaccgcgtagtgagcaacctgctctattaccagaccaactacctggtggtggctgccatgatgatttccattgtggggtttctgagtcccttcaacatgatcctgggaggaatcgtggtggtgctggtgttcacagggtttgtgtgggcagcccacaataaagacgtccttcgccggatgaagaagcgctaccccacgacgttcgttatggtggtcatgttggcgagctatttccttatctccatgtttggaggagtcatggtctttgtgtttggcattacttttcctttgctgttgatgtttatccatgcatcgttgagacttcggaacctcaagaacaaactggagaataaaatggaaggaataggtttgaagaggacaccgatgggcattgtcctggatgccctagaacagcaggaagaaggcatcaacagactcactgactatatcagcaaagtgaaggaataaacataacttacctgagctagggttgcagcagaaattgagttgcagcttgcccttgtccagacctatkttctgcttgcgtttttgaaacaggaggtgcacgtaccacccaattatctatggcagcatgcatgtataggccgaactattatcagctctgatgtttcagagagaagacctcagaaaccgaaagaaaaccaccaccctcctattgtgtctgaagtttcacgtgtgtttatgaaatctaatgggaaatggatcacacgatttctttaagggaattaaaaaaaataaaagaattacggcttttacagcaacaatacgattatcttataggaaaaaaaaaatcattgtaaagtatcaagacaatacgagtaaatgaaaaggctgttaaagtagatgacatcatgtgttagcctgttcctaatcccctagaattgtaatgtgtgggatataaattagtttttattattctcttaaaaatcaaagatgatctctatcactttgccacctgtttgatgtgcagtggaaactggttaagccagttgttcatacttcstttacaaatataaagatagctgtttaggatattttgttacatttttgtaaatttttgaaatgctagtaatgtgttttcaccagcaagtatttgttgcaaacttaatgtcattttccttaagatggttacagctatgtaacctgtattattctggacggacttattaaaatacaaacagacaaaaaataaaacaaaacttgagttctatttaccttgcacattttttgttgttacagtgaaaaaaatggtccaagaaaatgtttgccatttttgcattgtttcgtttttaactggaacatttagaaagaaggaaatgaatgtgcattttattaattccttaggggcacaaggaggacaataatagctgatcttttgaaatttgaaaaacgtctttagatgaccaagcaaaaagactttaaaaaatggtaatgaaaatggaatgcagctactgcagctaataaaaaattttagatagcaattgttacaaccatatgcctttatagctagacattagaattatgatagcatgagtttatacattctattatttttcctccctttctcatgtttttataaataggtaataaaaaatgttttgcctgccaattgaatgatttcgtagctgaagtagaaacatttaggtttctgtagcattaaattgtgaagacaactggagtggtacttactgaagaaactctctgtatgtcctagaataagaagcaatgatgtgctgcttctgatttttcttgcattttaaattctcagccaacctacagccatgatctttagcacagtgatatcaccatgacttcacagacatggtctagaatctgtacccttacccacatatgaagaataaaattgattaaaggttaaaaaaaaaawaaaaaaamwaggggggcccggtwcccag

SEQ ID NO: 946 - DNA, 1203 bp, Homo sapiens
gatctgtctttttgcttttagcatcctaatgagtatgaaatgctatcttgtggttttgatttgcattcccctgatggcaactgatgctgagtgtcttttcctgtgcttacgggccatgcgtatttctttggagaaaggtctatccaggtcctttgcctatttttaattgagttgtcttttttttttaagttttctgttttcctaaccactagactaccagggatgagyyttctttttattattgagttgggtgagctatttgtatattctagacgccagtcttttatcmsgyatmtgactggtaaaaatgttctccccttctgtggattgttttcagtttcttgttggtgtcctttgagacacaaaactttttaactttgatgatttccaagatacgtattttttttctattgtcacttgtgcttttggtgccatatctagaaaaccattgcctaatccaaggtcaagaagattaatgcctgtgttttcttctaagaacttgtatagttttagttctcacaatggtctttgatccatttcgagtatatttttatatatgatgtgatgtaggggtccagcttcattcttttgcttgtggatctccacttgtcccactgctggattattgagaaaaatatcctttctccacggaattgycttggcatccttgctaaaggcctctgcttcttactggatcttctttcctgggacatggtgtcgttgggaagcttaccttttkttttttttacttagtctgtgtttggttccaccagttttatgctgcctttctactctgttcttgctgtctccctcyttacctgagtcaacggtactgagtcctatctctctctgatgttccccagtcttccttggtgcatgttctagctccacacactagtccttggaggaaggttgagaccaatgatttcctgttatgagtcatgaggaaactgaatcacctagaagtggaataatgtgctcagggtcaccatagcccattagtggaaggaccaggactagacctttagtcttctgaggtccagccccttaggctgtctgtcatcactgtacccaagtgatgtcactaccaaggccaaatgatggtgggctaaattttaattctcaaaagtgtaggaggctaatattgtcttctaagttccaaaagaagatgtaataaaagtctgttaccttaaaaaaaaaaaa

SEQ ID NO: 947 - DNA, 1144 bp, Homo sapiens
  misc_feature (3)..(3): n equals a,t,g, or c
  misc_feature (10)..(10): n equals a,t,g, or c
  misc_feature (24)..(24): n equals a,t,g, or c
ctntctatanatcatgtaggaaanggtacctgacgtacggtcsgaattcccgggtcgacccacgygtccgccacgtttgtggcgtacgagctcacggtgctggtgttcctcaccttgtcagtggtggtgatgaagtttctcctggcggcgctggtcctgtctctcattctgccgaggagcagccagtacatcaagtggatcgtctctgcggggcttgcccaggtcagcgagttttcctttgtcctggggagccgggcgcgaagagcgggcgtcatctctcgggaggtgtacctccttatactgagtgtgaccacgctcagcctcttgctcgccccggtgctgtggagagctgcaatcacgaggtgtgtgcccagaccggagagacggtccagcctctgatggctcggagatgatggaccgtggaagggaagcgtctgtggggagtgagcgcttagatggccagcagctgctccttctgggaagctcgcaccttggcaacagaacagccctctagcagagcgtcagtgcagtcgtgttatcccggcttttacagaatattcttgtcctattttagaattttccggagtagtttatttgcagtctgttgattatgtgcagtagacccgggacactgcgttttaccgatcaccttgaatgtggtgcctggatgtgccttttttttttttccctgaaattattattaattttctattgtgagttcatcagttcatagtttttttagtaaagaagcaaaattaaaaggcttttaaaaatgtacaacttcagaattataatctgttagtcaaatatttgttattaaacatttctgtaatatgaagttgtaatcctggccgtgagcttggaagcttacttttgattcttaaagcctatgttttctaaaatgagacaaatacggatgtctatttgccttttattgtaacttttaaatgaaataatttcatgtcaatttctattagatatatcacttaaaatatttggttttaaatcacaagaatatgtattctttaataaagataatttatgatcatggtataattaattgaaatttattaaaatctgtttttattaaaaaaaaaaaaaaaaaaactcgagggggggcccggtacccaattcgccctaggaa

SEQ ID NO: 948 - DNA, 1120 bp, Homo sapiens
ggaggagaacgccacctccatcgaacccatccgcgacttcctggccatcgttttcttcgcctccatagggctccacgtgttccccacgtttgtggcgtacgagctcacggtgctggtgttcctcaccttgtcagtggtggtgatgaagtttctcctggcggcgctggtcctgtctctcattctgccgaggagcagccagtacatcaagtggatcgtctctgcggggcttgcccaggtcagcgagttttcctttgtcctggggagccgggcgcgaagagcgggcgtcatctctcgggaggtgtacctccttatactgagtgtgaccacgctcagcctcttgctcgccccggtgctgtggagagctgcaatcacgaggtgtgtgcccagaccggagagacggtccagcctctgatggctcggagatgatggaccgtggaagggaagcgtctgtggggagtgagcgcttagatggccagcagctgctccttctgggaagctcgcaccttggcaacagaacagccctctagcagagcgtcagtgcagtcgtgttatcccggcttttacagaatattcttgtcctattttagaattttccggagtagtttatttgcagtctgttgattatgtgcagtagacccgggacactgcgttttaccgatcaccttgaatgtggtgcctggatgtgccttttttttttttccctgaaattattattaattttctattgtgagttcatcagttcatagtttttttagtaaagaagcaaaattaaaaggcttttaaaaatgtacaacttcagaattataatctgttagtcaaatatttgttattaaacatttctgtaatatgaagttgtaatcctggccgtgagcttggaagcttacttttgattcttaaagcctatgttttctaaaatgagacaaatacggatgtctatttgccttttattgtaacttttaaatgaaataatttcatgtcaatttctattagatatatcacttaaaatatttggttttaaatcacaagaatatgtattctttaataaagataatttatgatcatggtataattaattgaaatttattaaaatctgtttttattaaaaaaaaaaaaaaaaaaa

SEQ ID NO: 949 - protein, 45 aa, Homo sapiens
MEKMGQGLLSSTYLTVLHLIQLVGCGLLTEEIKESKYLIKTLGSG

SEQ ID NO: 950 - protein, 72 aa, Homo sapiens
MPSIRLGLSHLFLTAGIYCLLLCARCCALGRGTAWAACPGGACGLMGEADPSPPHCQQGQGKSTHRGLIPYV

SEQ ID NO: 951 - protein, 100 aa, Homo sapiens
MTKARLFRLWLVLGSVFMILLIIVYWDSAGAAHFYLHTSFSRPHTGPPLPTPGPDRDRELTADSDVDEFLDKFLSAGVKQSDLPRKETEQPPAPGSMEET

SEQ ID NO: 952 - protein, 131 aa, Homo sapiens
  SITE (43): Xaa equals any of the naturally occurring L-amino acids
  SITE (44): Xaa equals any of the naturally occurring L-amino acids
  SITE (49): Xaa equals any of the naturally occurring L-amino acids
  SITE (66): Xaa equals any of the naturally occurring L-amino acids
  SITE (78): Xaa equals any of the naturally occurring L-amino acids
  SITE (94): Xaa equals any of the naturally occurring L-amino acids
  SITE (102): Xaa equals any of the naturally occurring L-amino acids
MWSVIRSLCPSRLQSLHVCFCPRLCLAVPCVFHLSSPWFHVRXXFFSGXPGCIWGICFVGLLLGAXRPRSGCLCSPSXCLWSLVVCESICLPRXGPNQAPPXPLFLSLNLPFLFQPLQMRWLSAVGWREAM

SEQ ID NO: 953 - protein, 62 aa, Homo sapiens
MVAVTGGVGVAAALCLCSLLLWPTRLRRSRGGEHRTPSEGEGISTAPPPCWNETQPQGGAKL

SEQ ID NO: 954 - protein, 49 aa, Homo sapiens
MRLCSFTKVPMNLFLNVILLKFYNFLFSLILGKSCLASLGLCKNNKCLS

SEQ ID NO: 955 - protein, 218 aa, Homo sapiens
MGSAALEILGLVLCLVGWGGLILACGLPMWQVTAFLDHNIVTAQTTWKGLWMSCVVQSTGHMQCKVYDSVLALSTEVQAARALTVSAVLLAFVALFVTLAGAQCTTCVAPGPAKARVALTGGVLYLFCGLLALVPLCWFANIVVREFYDPSVPVSQKYELGAALYIGWAATALLMVGGCLLCCGAWVCTGRPDLSFPVKYSAPRRPTATGDYDKKNYV

SEQ ID NO: 956 - protein, 44 aa, Homo sapiens
  SITE (34): Xaa equals any of the naturally occurring L-amino acids
MTKLLSLSHLLVTFFNIIAIKCKKQHLRHSKCNXDTTFKNKMLN

SEQ ID NO: 957 - protein, 30 aa, Homo sapiens
MALSVLVLLLLAVLYEGIKVGKASCSTRYW

SEQ ID NO: 958 - protein, 44 aa, Homo sapiens
MQCDTFSKATCCKILLLSCCVLYLVFSRLRGLDQRSKRYSLPDH

SEQ ID NO: 959 - protein, 91 aa, Homo sapiens
MVLRGWGLAWSLSPVVCGYSGDMKGVCWGRSDHSLLPSEILLPPAPCPSSAVLHNPPPTPHLPSPVLVRIQEAPTWAQRSSLGASPLHKGD

SEQ ID NO: 960 - protein, 49 aa, Homo sapiens
GRKGGLSGTSFFTWFMVIALLGVWTSVPVVWFDLVVDEQITSQSKGLPL

SEQ ID NO: 961 - protein, 300 aa, Homo sapiens
MKFLLDILLLLPLLIVCSLESFVKLFIPKRRKSVTGEIVLITGAGHGIGRLTAYEFAKLKSKLVLWDINKHGLEETAAKCKGLGAKVHTFVVDCSNREDIYSSAKKVKAEIGDVSILVNNAGVVYTSDLFATQDPQIEKTFEVNVLAHFWTTKAFLPAMTKNNHGHIVTVASAAGHVSVPFLLAYCSSKFAAVGFHKTLTDELAALQITGVKTTCLCPNFVNTGFIKNPSTSLGPTLEPEEVVNRLMHGILTEQKMIFIPSSIAFLTTLERILPERFLAVLKRKISVKFDAVIGYKMKAQ

SEQ ID NO: 962 - protein, 93 aa, Homo sapiens
MPRATLWGHLSPAWVLVPWTPRACGQAAPGRGHVASDHKSGLPWPKHCSCLHPRASQPCLFSLNSNRTVFTAIQRVALGWTFWVQANLVPRCT

SEQ ID NO: 963 - protein, 43 aa, Homo sapiens
MEHLIRSGVKILFLNLLLTSCTTLNEWLNFLVTLNCSRYKMTG

SEQ ID NO: 964 - protein, 91 aa, Homo sapiens
MRLCVTGPPVFFFFLNFFFFLCVGACLGDLKISRLVYLCKACLRLEYLGKESDSMLSEFLKGQKKNWRLLKCRFEVIFLKYYFGFCDIVKN

SEQ ID NO: 965 - protein, 198 aa, Homo sapiens
  SITE (29): Xaa equals any of the naturally occurring L-amino acids
MKKSLENLNRLQVMLLHLTAAFLQRAQHXFDYKDESGFPKPPSYNVATTLPSYDEAERTKAEATIPLVPGRDEDFVGRDDFDDADQLRIGNDGIFMLTFFMAFLFNWIGFFLSFCLTTSAAGRYGAISGFGLSLIKWILIVRFSTYFPGYFDGQYWLWWVFLVLGFLLFLRGFINYAKVRKMPETFSNLPRTRVLFIY

SEQ ID NO: 966 - protein, 50 aa, Homo sapiens
MLTYLPRWCFLSLPPPCCGAASCTMMHIQIILNTHILIERFLGFLLNQVY

SEQ ID NO: 967 - protein, 181 aa, Homo sapiens
MTSRRSSTLSMTSSLLSLGCALTSAFPASTMSWVPLLQMLDQSPRRVMRKSVSQLCPLLRPHPPLSSKHPLVLPLQLPPTFLHLLPGPGCPGQTVAYWLLEFLSRATLKLYPGDRPLWLQPTRLNFKDHWTIFSVASAALFCVHRMATDRHASFPTHWKAHRQGERGHRRCQHCRYSKDLK

SEQ ID NO: 968 - protein, 66 aa, Homo sapiens
  SITE (12): Xaa equals any of the naturally occurring L-amino acids
MNLSIILPNSFXHLCNFSLFLLPLPVPSQPLICSGNYQSSFCHYRLICIFKEIYIHGTIHHLCFVV

SEQ ID NO: 969 - protein, 317 aa, Homo sapiens
  SITE (207): Xaa equals any of the naturally occurring L-amino acids
MPGLGRPRQARWTLMLLLSTAMYGAHAPLLALCHVDGRVPFRPSSAVLLTELTKLLLCAFSLLVGWQAWPQGPPPWRQAAPFALSALLYGANNNLVIYLQRYMDPSTYQVLSNLKIGSTAVLYCLCLRHRLSVRQGLALLLLMAAGACYAAGGLQVPGNTLPSPPPAAAASPMPLHITPLGLLLLILYCLISGLSSVYTELLMKRQXLPLALQNLFLYTFGVLLNLGLHAGGGSGPGLLEGFSGWAALVVLSQALNGLLMSAVMKHGSSITRLFVVSCSLVVNAVLSAVLLRLQLTAAFFLATLLIGLAMRLYYGSR

SEQ ID NO: 970 - protein, 446 aa, Homo sapiens [sequence omitted]

SEQ ID NO: 971 - protein, 140 aa, Homo sapiens
  SITE (129): Xaa equals any of the naturally occurring L-amino acids
  SITE (132): Xaa equals any of the naturally occurring L-amino acids
  SITE (134): Xaa equals any of the naturally occurring L-amino acids
MFFSLPGLWQIASFTHNLIFHLWVWGSESGEHLQSHNDPDTRQGGHIPIRLLGESSASVPGSSEGHTGGPAPPRVGGSAGIIRTHVVFLVSWPLLQREQHRLSWKLPSVMWGDSREPHLARLDQSKWPXATXAXQYLGRG

SEQ ID NO: 972 - protein, 94 aa, Homo sapiens [sequence omitted]

SEQ ID NO: 973 - protein, 53 aa, Homo sapiens
MVQFEVIFLLFGLCFSSSSSRLVGSQVENFSPTPCIFQAFRCSSLAIISMSLS

SEQ ID NO: 974 - protein, 607 aa, Homo sapiens
  SITE (242): Xaa equals any of the naturally occurring L-amino acids
MRTPQLALLQVFFLVFPDGVRPQPSSSPSGAVPTSLELQRGTDGGTLQSPSEATATRPAVPGLPTVVPTLVTPSAPGNRTVDLFPVLPICVCDLTPGACDINCCCDRDCYLLHPRTVFSFCLPGSVRSSSWVCVDNSVIFRSNSPFPSRVFMDSNGIRQFCVHVNNSNLNYFQKLQKVNATNFQALAAEFGGESFTSTFQTQSPPSFYRAGDPILTYFPKWSVISLLRQPAGVGAGGLCAEXNPAGFLESKSTTCTRFFKNLASSCTLDSALNAASYYNFTVLKVPRSMTDPQNMEFQVPVILTSQANAPLLAGNTCQNVVSQVTYEIETNGTFGIQKVSVSLGQTNLTVEPGASLQQHFILRFRAFQQSTAASLTSPRSGNPGYIVGKPLLALTDDISYSMTLLQSQGNGSCSVKRHEVQFGVNAISGCKLRLKKADCSHLQQEIYQTLHGRPRPEYVAIFGNADPAQKGGWTRILNRHCSISAINCTSCCLIPVSLEIQVLWAYVGLLSNPQAHVSGVRFLYQCQSIQDSQQVTEVSLTTLVNFVDITQKPQPPRGQPKMDWKWPFDFFPFKVAFSRGVFSQKCSVSPILILCLLLLGVLNLETM

SEQ ID NO: 975 - protein, 79 aa, Homo sapiens [sequence omitted]

SEQ ID NO: 976 - protein, 55 aa, Homo sapiens [sequence omitted]

SEQ ID NO: 977 - protein, 52 aa, Homo sapiens
MDSCLFLRDFCWKMRMLTILPLGTLFPLLTLLLLPLEVPSVSCGVPFAVWDL

SEQ ID NO: 978 - protein, 41 aa, Homo sapiens
MATLQITTAMKITMMITMVMIITTIVEAMKIPTTAMMMAMQ

SEQ ID NO: 979 - protein, 129 aa, Homo sapiens
MHVLPLLLSLLLLLLLLSASFVTFSTPTSSRNSSCPDCESLNTGLPSLMMFGGSLLKWVQNTHGVESLLSSAKVRLLPPALGVLFPRLHPGTLTLVFLLIPFLTVSSSTSDVLSSLESPKLSVTIFHYC

SEQ ID NO: 980 - protein, 50 aa, Homo sapiens
MYIFELSLYLEGTSFVVVLLFLLISVSLDSPPTTKGWDSVLHIWVPLIVQ

SEQ ID NO: 981 - protein, 264 aa, Homo sapiens
MLRCGGRGLLLGLAVAAAAVMAARLMGWWGPRAGFRLFIPEELSRYRGGPGDPGLYLALLGRVYDVSSGRRHYEPGSHYSGFAGRDASRAFVTGDCSEAGLVDDVSDLSAAEMLTLHNWLSFYEKNYVCVGRVTGRFYGEDGLPTPALTQVEAAITRGLEANKLQLQEKQTFPPCNAEWSSARGSRLWCSQKSGGVSRDWIGVPRKLYKPGAKEPRCVCVRTTGPPSGQMPDNPPHRNRGDLDHPNLAEYTGCPPLAITCSFPL

SEQ ID NO: 982 - protein, 72 aa, Homo sapiens
MTSYILISFVLLIGVGCIEKDQSCPVFGGRKRLHLLFVGGQLRQVRMLRGELSCACYRPHVQALQLGGCTCF

SEQ ID NO: 983 - protein, 140 aa, Homo sapiens [sequence omitted]

SEQ ID NO: 984 - protein, 110 aa, Homo sapiens
MVLLCLLLVPLLLSLFVLGLFLWFLKRERQEEYIEEKKRVDICRETPNICPHSGENTEYDTIPHTNRTILKEDPANTVYSTVEIPKKMENPHSLLTMPDTPRLFAYENVI

SEQ ID NO: 985 - protein, 53 aa, Homo sapiens
MAGQHLACLASCVMSLIWFFFFCSCFICSAPAPPQQLVAYGFFKRKVDFMLYI

SEQ ID NO: 986 - protein, 248 aa, Homo sapiens
MGPVRLGILLFLFLAVHEAWAGMLKEEDDDTERLPSKCEVCKLLSTELQAELSRTGRSREVLELGQVLDTGKRKRHVPYSVSETRLEEALENLCERILDYSVHAERKGSLRYAKGQSQTMATLKGLVQKGVKVDLGIPLELWDEPSVEVTYLKKQCETMLEEFEDIVGDWYFHHQEQPLQNFLCEGHVLPAAETACLQETWTGKEITDGEEKTEGEEEQEEEEEEEEEEGGDKMTKTGSHPKLDREDL

SEQ ID NO: 987 - protein, 64 aa, Homo sapiens
MPLFLFVAHLISLLLAFRRPPASQITPRAWTTEIASCESVEMVKALSSLRSRAQVNADFPGHLC

SEQ ID NO: 988 - protein, 56 aa, Homo sapiens
MLVAPFNLLFEMAPFNIFLFPQWGLLWLMLYLLYVFQASLRTPELTWERVRSQVDQ

SEQ ID NO: 989 - protein, 182 aa, Homo sapiens
MMVCSIMMYFLLGITLLRSYMQSVWTEESQCTLLNASITETFNCSFSCGPDCWKLSQYPCLQVYVNLTSSGEKLLLYHTEETIKINQKCSYIPKCGKNFEESMSLVNVVMENFRKYQHFSCYSDPEGNQKSVILTKLYSSNVLFHSLFWPTCMMAGGVAIVAMVKLTQYLSLLCERIQRINR

SEQ ID NO: 990 - protein, 53 aa, Homo sapiens
MLVFLLLFSTVTVLCLKVVFSLKAVAYIVKNEGLCLKFIALQRVVSLKSCTIK

SEQ ID NO: 991 - protein, 110 aa, Homo sapiens
MTVSYFWWLRVGAWAEDVEALASLPEDRLRWNLLALPASPCAVTALVARHRRAGLQRSIQCLLGRQGGGGCNCELTKPQVGSKWVGHRKKSDLQSGDLGSGLCLMTGSVM

SEQ ID NO: 992 - protein, 258 aa, Homo sapiens [sequence omitted]

SEQ ID NO: 993 - protein, 48 aa, Homo sapiens
MVVNDRLVSTCILCTLHIPLFFLIFLVYEVHLVFQIVANLQKIFQYIY

SEQ ID NO: 994 - protein, 202 aa, Homo sapiens
MSLLVDGDMNLSIIMTISSTLLALVLMPLCLWIYSWAWINTPIVQLLPLGTVTLTLCSTLIPIGLGVFIRYKYSRVADYIVKVSLWSLLVTLVVLFIMTGTMLGPELLASIPAAVYVIAIFMPLAGYASGYGLATLFHLPPNCKRTVCLETGSQNVQLCTAILKLAFPPQFIGSMYMFPLLYALFQSAEAGIFVLIYKMYGR

SEQ ID NO: 995 - protein, 80 aa, Homo sapiens
MALGSMYLVLTLIVAKVLRGAEPCCGPLKNRVLRPCPLPVHCPLPIPSPAEGIPWVAYLPIRWFISCCPGHCIQIPMCTS

SEQ ID NO: 996 - protein, 185 aa, Homo sapiens
MSPSGRLCLLTIVGLILPTRGQTLKDTTSSSSADSTIMDIQVPTRAPDAVYTELQPTSPTPTWPADETPQPQTQTQQLEGTDGPLVTDPETHKSTKAAHPTDDTTTLSERPSPSTDVQTDPQTLKPSGFHEDDPFFYDEHTLRKRGLLVAAVLFITGIIILTSGKCRQLSRYAGIIGGESIRNRS

SEQ ID NO: 997 - protein, 23 aa, Homo sapiens
ELLFLLIIILGESLSDVILLICF

SEQ ID NO: 998 - protein, 197 aa, Homo sapiens
MAGPWTFTLLCGLLAATLIQATLSPTAVLILGPKVIKEKLTQELKDHNATSILQQLPLLSAMREKPAGGIPVLGSLVNTVLKHIIWLKVITANILQLQVKPSANDQELLVKIPLDMVAGFNTPLVKTIVEFHMTTEAQATIRMDTSASGPTRLVLSDCATSHGSLRIQLLHKLSFLVNALAKQVMNLLVPSMPRWPN

SEQ ID NO: 999 - protein, 146 aa, Homo sapiens
MLMPVHFLLLLLLLLGGPRTGLPHKFYKAKPIFSCLNTALSEAEKGQWEDASLLSKRSFHYLRSRDASSGEEEEGKEKKTFPISGARGGARGTRYRYVSQAQPRGKPRQDTAKSPHRTKFTLSLDVPTNIMNLLFNIAKAKNLRAQ

SEQ ID NO: 1000 - protein, 174 aa, Homo sapiens [sequence omitted]

SEQ ID NO: 1001 - protein, 40 aa, Homo sapiens
MPFSSSVKCLFGVLLRFCFVVFSVVVFTFFLSIPKRTLGY

SEQ ID NO: 1002 - protein, 40 aa, Homo sapiens
MIACQYISLAIMLAFVRWAAFLLFPFLCGDNGGNIQQKYV

SEQ ID NO: 1003 - protein, 46 aa, Homo sapiens
MEMLSSKWSKRVAASLAHLISLFIGLLFLLLGSSVYPGTETLFPKS

SEQ ID NO: 1004 - protein, 244 aa, Homo sapiens [sequence omitted]

SEQ ID NO: 1005 - protein, 74 aa, Homo sapiens [sequence omitted]

SEQ ID NO: 1006 - protein, 245 aa, Homo sapiens
MEGPRGWLVLCVLAISLASMVTEDLCRAPDGKKGEAGRPGRRGRPGLKGEQGEPGAPGIRTGIQGLKGDQGEPGPSGNPGKVGYPGPSGPLGARGIPGIKGTKGSPGNIKDQPRPAFSAIRRNPPMGGNVVIFDTVITNQEEPYQNHSGRFVCTVPGYYYFTFQVLSQWEICLSIVSSSRGQVRRSLGFCDTTNKGLFQVVSGGMVLQLQQGDQVWVEKDPKKGHIYQGSEADSVFSGFLIFPSA

SEQ ID NO: 1007 - protein, 83 aa, Homo sapiens [sequence omitted]

SEQ ID NO: 1008 - protein, 61 aa, Homo sapiens
MYLFLKTLLSFSTLMMTTALSFMVITVLWVLLLHLLANICIPRKCSFACFYINGILLHAVF

SEQ ID NO: 1009 - protein, 250 aa, Homo sapiens
MRGTPKTHLLAFSLLCLLSKVRTQLCPTPCTCPWPPPRCPLGVPLVLDGCGCCRVCARRLGEPCDQLHVCDASQGLVCQPGAGPGGRGALCLLAEDDSSCEVNGRLYREGETFQPHCSIRCRCEDGGFTCVPLCSEDVRLPSWDCPHPRRVEVLGKCCPEWVCGQGGGLGTQPLPAQGPQFSGLVSSLPPGVPCPEWSTAWGPCSTTCGLGMATRVSNQNRFCRLETQRRLCLSRPCPPSRGRSPQNSAF

SEQ ID NO: 1010 - protein, 54 aa, Homo sapiens
MVLSPWACLFVVFFPYIQSSLRSDKHLQLSNILPTPSHHIHLPASICIQLRAGN

SEQ ID NO: 1011 - protein, 57 aa, Homo sapiens
MAVSVIFCQKLKTGSVKLWIQMLLWLQFSVACLRLRKGGKWSPWGLMLKEVIWKDCR

SEQ ID NO: 1012 - protein, 83 aa, Homo sapiens
MLSLFFCFWKPSFLVSRLVIWLGLVCGGRSLSWVALGEDYLGTPILIPNIHQTCPHPPLWELVPEHPCRLVLIFSLCEHTHIR

SEQ ID NO: 1013 - protein, 81 aa, Homo sapiens
MSILTMISSWPFSRVVRFWFLHQMVLDLCLGQGVPQQNLENPRERKSFLLFVRNLIIDSSLKILSQEPSNLWQRIPKMMTT

SEQ ID NO: 1014 - protein, 56 aa, Homo sapiens
MFKRMCFFFQVFLPLACTELLWKGAPCRHIFQTGPDLLVTQRCVHSLLLGYLISIF

SEQ ID NO: 1015 - protein, 88 aa, Homo sapiens
MWAVLPAWFPFPGTCHCLPVSLRGHFWEVRPWPPGPLFRSEAPTCLGSGSSGVRPCPPQDIPSKPAMSGDGPLPGKVLFLLVTEKNLP

SEQ ID NO: 1016 - protein, 319 aa, Homo sapiens
MSWCCLWLCLSSVGRTGSAGPSLPFSELCSLGLLRLRPVFSPLHSGPGKPAQFLAGEAEEVNAFALGFLSTSSGVSGEDEVEPLHDGVEEAEKKMEEEGVSVSEMEATGAQGPSRVEEAEGHTEVTEAEGSQGTAEADGPGASSGDEDASGRAASPESASSTPESLQARRHHQFLEPAPAPGAAVLSSEPAEPLLVRHPPRPRTTGPRPRQDPHKAGLSHYVKLFSFYAKMPMERKALEMVEKCLDKYFQHLCDDLEVFAAHAGRKTVKPEDLELLMRRQGLVTDQVSLHVLVERHLPLEYRQLLIPCAYSGNSVFPAQ

SEQ ID NO: 1017 - protein, 89 aa, Homo sapiens
MFKDYPPAIKPSYDVLLLLLLLVLLLQAGLNTGTAIQCVRFKVSARLQGASWDTQNGPQERLAGEVARSPLKEFDKEKAWRAVVVQMAQ

SEQ ID NO: 1018 - protein, 31 aa, Homo sapiens
MFSSKSLLVLPFCFRSAAHLELSVWCVCGVR

SEQ ID NO: 1019 - protein, 187 aa, Homo sapiens
MACKGLLQQVQGPRLPWTRLLLLLLVFAVGFLCHDLPVTQLLPGWLGETLPLWGSHLLTVVRPSLQLAWAHTNATVSFLSAHCASHLAWFGDSLTSLSQRLQIQLPDSVNQLLRYLRELPLLFHQNVLLPLWHLLLEALAWAQEHCHEACRGEVTWDCMKTQLSEAVHWTWLCYRTLQWLSWTGHLP

SEQ ID NO: 1020 - protein, 52 aa, Homo sapiens
MYLMSFSIHFVKIICMCTILVLSPPVLLKYQDSTPRPLWSQCKIPINYLKGK

SEQ ID NO: 1021 - protein, 106 aa, Homo sapiens
MPGVLGALLGVLVAGLATHEAYGDGLESVFPLIAEGQRSATSQAMHQLFGLFVTLMFASVGGGLGGIILVLCLLDPCALWHWVAPSSMVGGREASQILPYHHQGSC

SEQ ID NO: 1022 - protein, 51 aa, Homo sapiens
  SITE (23): Xaa equals any of the naturally occurring L-amino acids
MAQHHLLSILLAILSCSSQPRQXRGSGALPCEVCSAVLLTCLRKISGSLCV

SEQ ID NO: 1023 - protein, 97 aa, Homo sapiens [sequence omitted]

SEQ ID NO: 1024 - protein, 58 aa, Homo sapiens
MSSFPGPQCVQLINLLHLICPVSGLVCSAITIALRQKSIPHQQGREAVIKTPPPGSLP

SEQ ID NO: 1025 - protein, 43 aa, Homo sapiens
  SITE (26): Xaa equals any of the naturally occurring L-amino acids
MSNTLLSQWLLLLTLFKCIILPLNLXPIIRTIPDWSPELGTNT

SEQ ID NO: 1026 - protein, 63 aa, Homo sapiens
MLRGWALSTFLVCILQWVRSLTIRLASALSVRGPSSIPASLAIIYTLFIFSFKFLKIVKSIYI

SEQ ID NO: 1027 - protein, 169 aa, Homo sapiens
MLAGAGRPGLPQGRHLCWLLCAFTLKLCQAEAPVQEEKLSASTSNLPCWLVEEFVVAEECSPCSNFRAKTTPECGPTGYVEKITCSSSKRNEFKSLPLSFDGTTLILEVRRGCRVCGPDLRLSCHHSSATIGQKGSGKGPEANRVHIATFHPCILGLRDPISDSESEMD

SEQ ID NO: 1028 - protein, 88 aa, Homo sapiens [sequence omitted]

SEQ ID NO: 1029 - protein, 47 aa, Homo sapiens
MPTLGDALILYLHLVLGVAGVLQPPGPRPSQALGPTGDRAPGKWNRS

SEQ ID NO: 1030 - protein, 123 aa, Homo sapiens
  SITE (71): Xaa equals any of the naturally occurring L-amino acids
MTHWSGCAALYLIFLSLKLAFQAGAGRGAQVGSVLPPSGGAVVVDQILLPPVCTNIFLSSSPSEVYWNMSXTIMMVVKMMMMWVILATLLGPSSPQFVAQSTLHTFSLVLIKPPFRVGFSVLF

SEQ ID NO: 1031 - protein, 43 aa, Homo sapiens
MSALSFTSYFLLLLRVKPVEVSGSIPHPEQPNVLCLVLPTFGY

SEQ ID NO: 1032 - protein, 46 aa, Homo sapiens
MDLLQVCFFLFFSHLWSWTEGKLPCNFPGPVGRVFLSPFQMLGFKQ

SEQ ID NO: 1033 - protein, 215 aa, Homo sapiens
  SITE (83): Xaa equals any of the naturally occurring L-amino acids
  SITE (141): Xaa equals any of the naturally occurring L-amino acids
MYGKSSTRAVLLLLGIQLTALWPIAAVEIYTSRVLEAVNGTDARLKCTFSSFAPVGDALTVTWNFRPLDGGPEQFVFYYHIDXFQPMSGRFKDRVSWDGNPERYDASILLWKLQFDDNGTYTCQVKNPPDVDGVIGDIRLXVVHTVRFSEIHFLALAIGSACALMIIIVIVVVLFQHYRKKRWAERAHKVVEIKSKEEERLNQEKKVSVYLEDTD

SEQ ID NO: 1034 - protein, 158 aa, Homo sapiens [sequence omitted]

SEQ ID NO: 1035 - protein, 38 aa, Homo sapiens
MHLFLFIWAFGLPLHISRDLAFFFLLYFLFFYLLCVLL

SEQ ID NO: 1036 - protein, 60 aa, Homo sapiens [sequence omitted]

SEQ ID NO: 1037 - protein, 64 aa, Homo sapiens [sequence omitted]

SEQ ID NO: 1038 - protein, 79 aa, Homo sapiens [sequence omitted]

SEQ ID NO: 1039 - protein, 47 aa, Homo sapiens
MFYPPCPFFPQLCFCIFFLGKCKLSLSFMTCEISVSLEFVRRRGNHA

SEQ ID NO: 1040 - protein, 343 aa, Homo sapiens
MRAPFNTLFGRLFGLLLVAIVLAHVLAFFWFHHYGPPPPPRAAFVEQPDGSLTPLRKAPRPWFGGPVVPLTFQFISLIIAAWYGAKLLSRPIQRLSAAAERLSVDLDSPPLVETGPREARQAASTFNLMQKRIREQVSQRARMLGAVSHDLRTPLSRLKLRLEQIEDPKLQGQMRQDLDDMIGMLDATLSYLHEQRTSETRHWLDVQALVESLSENAQDQGRDVQFAGTCTPLQVQPMALRSCLNNLIDNALRYAGTARVELADSRGALVIRVIDHGPGIAADKREAVFEPFFRLEGSRNRNSGGVGLGMTIAREAVERLGGHLSLEDTPGGGLTAVMWLPRV

SEQ ID NO: 1041 - protein, 10 aa, Homo sapiens
MGLFLFLVSS

SEQ ID NO: 1042 - protein, 40 aa, Homo sapiens
MIILHIVVCLFTISIIEEQKEEILCSTKSQAEKTVTHIEQ

SEQ ID NO: 1043 - protein, 65 aa, Homo sapiens [sequence omitted]

SEQ ID NO: 1044 - protein, 45 aa, Homo sapiens
MQKKKLVCYLMLRQYFFLVVVSLPWPCVLFQMHYPRTVTPTLTEY

SEQ ID NO: 1045 - protein, 274 aa, Homo sapiens
MFYIIGGVATLLLILVIIVFKEKPKYPPSRAQSLSYALTSPDASYLGSIARLFKNLNFVLLVITYGLNAGAFYALSTLLNRMVIWHYPGEEVNAGRIGLTIVIAGMLGAVISGIWLDRSKTYKETTLVVYIMTLVGMVVYTFTLNLGHLWVVFITAGTMGFFMTGYLPLGFEFAVELTYPESEGISSGLLNISAQVFGIIFTISQGQIIDNYGTKPGNIFLCVFLTLGAALTAFIKADLRRQKANKETLENKLQEEEEESNTSKVPTAVSEDHL

SEQ ID NO: 1046 - protein, 146 aa, Homo sapiens
MWKLWRAEEGAAALGGALFLLLFALGVRQLLKQRRPMGFPPGPPGLPFIGNIYSLAASSELPHVYMRKQSQVYGEVQPRRAPGREGRQAGPGWPGPSWLDLWPPLGRLVGTSPCAGCPLRDTRFPGLEGRSPRRRAPLQGEPRPCR

SEQ ID NO: 1047 - protein, 108 aa, Homo sapiens
  SITE (62): Xaa equals any of the naturally occurring L-amino acids
  SITE (63): Xaa equals any of the naturally occurring L-amino acids
MGAAKVWGEVGRWLVIALIQLAKAVLRMLLLLWFKAGLQTSPPIVPLDRETRHSPRMVTTAXXTMSSPTWGSGQTGWCEPSRTRRPCTPGTGELPSSGRDGSSSITRS

SEQ ID NO: 1048 - protein, 168 aa, Homo sapiens
  SITE (60): Xaa equals any of the naturally occurring L-amino acids
  SITE (64): Xaa equals any of the naturally occurring L-amino acids
  SITE (132): Xaa equals any of the naturally occurring L-amino acids
MVTFASSTLWIAAFSYMMVWMVTIIGYTLGIPDVIMGITFLAAGTSVPDCMASLIVARQXMGDXAVSNSIGSNVFDILIGLGLPWALQTLAVDYGSYIRLNSRGLIYSVGLLLASVFVTVFGVHLNKWQLDXKLGCGCLLLYGVFLCFSIMTEFNVFTFVNLPMCGDH

SEQ ID NO: 1049 - protein, 315 aa, Homo sapiens
MESLYDLWEFYLPYLYSCISLMGCLLLLLCTPVGLSRMFTVMGQLLVKPTILEDLDEQIYIITLEEEALQRRLNGLSSSVEYNIMELEQELENVKTLKTKLDPWSSFSVLQSPVWHFAAQTPADIVSPDSHFMLSTQGMSWAQLVFLLPASRPGNSQDKRRKKASAWERNLVYPAVMVLLLIETSISVLLVACNILCLLVDETAMPKGTRGPGIGNASLSTFGFVGAALEIILIFYLMVSSVVGFYSLRFFGNFTPKKDDTTMTKIIGNCVSILVLSSALPVMSRTLGLHKLHLPNTSRDSETAKPSVNGHQKAL

SEQ ID NO: 1050 - protein, 81 aa, Homo sapiens
MNQLMFQDLLCCLCLFVIGLISLLRKTYSCVNLCKVMLPVKKYSTVSTVLCRNMKLNGKNVLMFVVMLLGQWMGKLPKLSP

SEQ ID NO: 1051 - protein, 76 aa, Homo sapiens
MVVDLFFYLLCIFLVLWVLEAMIKHLMYSDMSALIASFSSFLNCIHYFQNRYRYSVPPFELLACSCFPLSPKQGFF

SEQ ID NO: 1052 - protein, 316 aa, Homo sapiens
MTQGKLSVANKAPGTEGQQQVHGEKKEAPAVPSAPPSYEEATSGEGMKAGAFPPAPTAVPLHPSWAYVDPSSSSSYDNGFPTGDHELFTTFSWDDQKVRRVFVRKVYTILLIQLLVTLAVVALFTFCDPVKDYVQANPGWYWASYAVFFATYLTLACCSGPRRHFPWNLILLTVFTLSMAYLTGMLSSYYNTTSVLLCLGITALVCLSVTVFSFQTKFDFTSCQGVLFVLLMTLFFSGLILAILLPFQYVPWLHAVYAALGAGVFTLFLALDTQLLMGNRRHSLSPEEYIFGALNIYLDIIYIFTFFLQLFGTNRE

SEQ ID NO: 1053 - protein, 612 aa, Homo sapiens
MAAAGRLPSSWALFSPLLAGLALLGVGPVPARALHNVTAELFGAEAWGTLAAFGDLNSDKQTDLFVLRERNDLIVFLADQNAPYFKPKVKVSFKNHSALITSVVPGDYDGDSQMDVLLTYLPKNYAKSELGAVIFWGQNQTLDPNNMTILNRTFQDEPLIMDFNGDLIPDIFGITNESNQPQILLGGNLSWHPALTTTSKMRIPHSHAFIDLTEDFTADLFLTTLNATTSTFQFEIWENLDGNFSVSTILEKPQNMMVVGQSAFADFDGDGHMDHLLPGCEDKNCQKSTIYLVRSGMKQWVPVLQDFSNKGTLWGFVPFVDEQQPTEIPIPITLHIGDYNMDGYPDALVILKNTSGSNQQAFLLENVPCNNASCEEARRMFKVYWELTDLNQIKDAMVATFFDIYEDGILDIVVLSKGYTKNDFAIHTLKNNFEADAYFVKVIVLSGLCSNDCPRKITPFGVNQPGPYIMYTTVDANGYLKNGSAGQLSQSAHLALQLPYNVLGLGRSANFLDHLYVGIPRPSGEKSIRKQEWTAIIPNSQLIVIPYPHNVPRSWSAKLYLTPSNIVLLTAIALIGVCVFILAIIGILHWQEKKADDREKRQEAHRFHFDAM

SEQ ID NO: 1054 - protein, 51 aa, Homo sapiens
MSHSVFAHYIFNILLLLLLLLLIGFLYSMPFIYKDTKKTHVCNFNNIFPIL

SEQ ID NO: 1055 - protein, 53 aa, Homo sapiens
MLVLMTTCILAAVCVHTAQCAPDSRMDNDCPSHQAQIHFRASEVRRGWTFNHD

SEQ ID NO: 1056 - protein, 578 aa, Homo sapiens
  SITE (326): Xaa equals any of the naturally occurring L-amino acids
  SITE (342): Xaa equals any of the naturally occurring L-amino acids
  SITE (444): Xaa equals any of the naturally occurring L-amino acids
MPFRLLIPLGLLCALLPQHHGAPGPDGSAPDPAHYRERVKAMFYHAYDSYLENAFPFDELRPLTCDGHDTWGSFSLTLIDALDTLLILGNVSEFQRVVEVLQDSVDFDIDVNASVFETNIRVVGGLLSAHLLSKKAGVEVEAGWPCSGPLLRMAEEAARKLLPAFQTPTGMPYGTVNLLHGVNPGETPVTCTAGIGTFIVEFATLSSLTGDPVFEDVARVALMRLWESRSDIGLVGNHIDVLTGKWVAQDAGIGAGVDSYFEYLVKGAILLQDKKLMAMFLEYNKAIRNYTRFDDWYLWVQMYKGTVSMPVFQSLEAYWPGLQSLXGDIDNAMRTFLNYYTXWKQFGGLPEFYNIPQGYTVEKREGYPLRPELIESAMYLYRATGDPTLLELGRDAVESIEKISKVECGFATIKDLRDHKLDNRMESFFLAETVKYLYLLFDPXNFIHNNGSTFDAVITPYGECILGAGGYIFNTEAHPIDPAALHCCQRLKEEQWEVEDLMREFYSLKRSRSKFQKNTVSSGPWEPPARPGTLFSPENHDQARERKPAKQKVPLLSCPSQPFTSKLALLGQVFLDSS

SEQ ID NO: 1057 - protein, 152 aa, Homo sapiens
MGVHVGAALGALWFCLTGALEVQVPEDPVVALVGTDATLCCSFSPEPGFSLAQLNLIWQLTDTKQLVHSFAEGQDQGSAYANRTALFLDLLAQGNASLRLQSVRVADEGQLHLLREHPGFRQRCRQPAGGRSLLEAQHDPGAQQGPAARGTW

SEQ ID NO: 1058 - protein, 196 aa, Homo sapiens [sequence omitted]

SEQ ID NO: 1059 - protein, 52 aa, Homo sapiens [sequence omitted]

SEQ ID NO: 1060 - protein, 72 aa, Homo sapiens
MARGCVCSLCASVCIFLSSLFPLLPSVHSVNIISCLLLSKCFEGLELMCEHLYQLSQLHVLHHIFSYLLCTP

SEQ ID NO: 1061 - protein, 74 aa, Homo sapiens
MGVRWYLIVLVCISLIISDVQYFFTCLLVICISSLEKYLFNSFAHFKIRLFGFLLLMLSCRSSLYILDIHPSYI

SEQ ID NO: 1062 - protein, 40 aa, Homo sapiens
MGPSQREVTVQWHRALFLLPLLLLSTRTETKNFGFKWLKD

SEQ ID NO: 1063 - protein, 57 aa, Homo sapiens
MHPWRLSMCPACVLAALPALCSCLCSPDARPPHGWMSMPFTPHPLVSRAMPTCHPCS

SEQ ID NO: 1064 - protein, 937 aa, Homo sapiens
MQNSGKTKFKRTSIDRLMNTLVLWIFGFLICLGIILAIGNSIWESQTGDQFRTFLFWNEGEKSSVFSGFLTFWSYIIILNTVVPISLYVSVEVIRLGHSYFINWDRKMYYSRKAIPAVARTTTLNEELGQIEYIFSDKTGTLTQNIMTFKRCSINGRIYGEVHDDLDQKTEITQEKEPVDFSVKSQADREFQFFDHNLMESIKMGDPKVHEFLRLLALCHTVMSEENSAGELIYQVQSPDEGALVTAARNFGFIFKSRTPETITIEELGTLVTYQLLAFLDFNNTRKRMSVIVRNPEGQIKLYSKGADTILFEKLHPSNEVLLSLTSDHLSEFAGEGLRTLAIAYRDLDDKYFKEWHKMLEDANVATEERDERIAGLYEEIERDLMLLGATAVEDKLQEGVIETVTSLSLANIKIWVLTGDKQETAINIGYACNMLTDDMNDVFVIAGNNAVEVREELRKAKQNLFGQNRNFSNGHVVCEKKQQLELDSIVEETITGDYALIINGHSLAHALESDVKNDLLELACMCKTVICCRVTPLQKAQVVELVKKYRNAVTLAIGDGANDVSMIKSAHIGVGISGQEGLQAVLASDYSFAQFRYLQRLLLVHGRWSYFRMCKFLCYFFYKNFAFTLVHFWFGFFCGFSAQTVYDQWFITLFNIVYTSLPVLAMGIFDQDVSDQNSVDCPQLYKPGQLNLLFNKRKFFICVMHGIYTSLVLFFIPYGAFYNVAGEDGQHIADYQSFAVTMATSLVIVVSVQIALDTSYWTFINHVFIWGSIAIYFSILFTMHSNGIFGIFPNQFPFVGNARHSLTQKCIWLVILLTTVASVMPVVAFRFLKVDLYPTLSDQIRRWQKAQKKARPPSSRRPRTRRSSSRRSGYAFAHQEGYGELITSGKNMRAKNPPPTSGLEKTHYNSTSWIENLCKKTTDTVSSFSQDKTVKL

SEQ ID NO: 1065 - protein, 94 aa, Homo sapiens
MLLSFYCLPMVSIHIFFPCAHCVYLLHISCSLGEESFNRDTCKKDFCFSIQNVNSTFLLSLAVFRFSERFSDSNFLFTTPPICSEKNGLLYHWI

SEQ ID NO: 1066 - protein, 484 aa, Homo sapiens
  SITE (322): Xaa equals any of the naturally occurring L-amino acids
  SITE (345): Xaa equals any of the naturally occurring L-amino acids
  SITE (374): Xaa equals any of the naturally occurring L-amino acids
MVATVCGLLVFLSLGLVPPVRCLFALSVPTLGMEQGRRLLLSYSTATLAIAVVPNVLANVGAAGQVLRCVTEGSLESLLNTTHQLHAASRALGPTGQAGSRGLTFEAQDNGSAFYLHMLTVTQQVLEDFSGLESLARAAALGTQRVVTGLFMLGLLVESAWYLHCYLTDLRFDNIYATQQLTQRLAQAQATHLLAPPPTWLLQAAQLRLSQEELLSCLLRLGLLALLLVATAVAVATDHVAFLLAQATVDWAQKLPTVPITLTVKYDVAYTVLGFIPFLFNQLAPESPFLSVHSSYQWELRLTSARCPLLPARRPRAAAPLXAGGLQLLAGSTVLLEGYARRLRXAIAASFFTAQEARRIRHLHARLQRRHDRXQGQQLPLGDPSCVPTPRPACKPPAWIAYRLDALRTESSEGEGKELWSCRDLSCHLGPVPPPCVTLGKSLHLSEPRFLHLHNDSIFTIDVTYFPRRDVVRMEGNTGHDRPG

SEQ ID NO: 1067 - protein, 151 aa, Homo sapiens
MFLMLGCALPIYNKYWPLFVLFFYILSPIPYCIARRLVDDTDAMSNACKELAIFLTTGIVVSAFGLPIVFARAHLMGRLPFFSKMGTAESEGRETLTQQLPLPAAAMRRLLPASRVSTQPVLRLADSAESLLGRPALWALGFLLCPPSQAQ

SEQ ID NO: 1068 - protein, 242 aa, Homo sapiens
  SITE (88): Xaa equals any of the naturally occurring L-amino acids
  SITE (139): Xaa equals any of the naturally occurring L-amino acids
MEQARKSSTVSLLITVLFAVAFSVLLLSCKDHVGYIFTTDRDIINLVAQVVPIYAVSHLFEALACTSGGVLRGSGNQKVGAIVNTIGXYVVGLPIGIALMFATTLGVMGLWSGIIICTVFQAVCFLGFIIQLNWKKACXQAQVHANLKVNNVPRSGNSALPQDPLHPGCPENLEGILTNDVGKTGEPQSDQQMRQEEPLPEHPQDGAKLSRKQLVLRRGLLLLGVFLILLVGILVRFYVRIQ

SEQ ID NO: 1069 - protein, 567 aa, Homo sapiens
MAPLALHLLVLVPILLSLVASQDWKAERSQDPFEKCMQDPDYEQLLKVVTWGLNRTLKPQRVIVVGAGVAGLVAAKVLSDAGHKVTILEADNRIGGRIFTYRDQNTGWIGELGAMRMPSSHRILHKLCQGLGLNLTKFTQYDKNTWTEVHEVKLRNYVVEKVPEKLGYALRPQEKGHSPEDIYQMALNQALKDLKALGCRKAMKKFERHTLLEYLLGEGNLSRPAVQLLGDVMSEDGFFYLSFAEALRAHSCLSDRLQYSRIVGGWDLLPRALLSSLSGLVLLNAPVVAMTQGPHDVHVQIETSPPARNLKVLKADVVLLTASGPAVKRITFSPPLPRHMQEALRRLHYVPATKVFLSFRRPFWREEHIEGGHSNTDRPSRMIFYPPPREGALLLASYTWSDAAAAFAGLSREEALRLALDDVAALHGPVVRQLWDGTGVVKRWAEDQHSQGGFVVQPPALWQTEKDDWTVPYGRIYFAGEHTAYPHGWVETAVKSALRAAIKINSRKGPASDTASPEGHASDMEGQGHVHGVASSPSHDLAKEEGSHPPVQGQLSLQNTTHTRTSH

SEQ ID NO: 1070 - protein, 48 aa, Homo sapiens [sequence omitted]

SEQ ID NO: 1071 - protein, 200 aa, Homo sapiens
  SITE (144): Xaa equals any of the naturally occurring L-amino acids
  SITE (149): Xaa equals any of the naturally occurring L-amino acids
  SITE (160): Xaa equals any of the naturally occurring L-amino acids
  SITE (173): Xaa equals any of the naturally occurring L-amino acids
  SITE (177): Xaa equals any of the naturally occurring L-amino acids
  SITE (189): Xaa equals any of the naturally occurring L-amino acids
MFFLLCLVALEIKGFTFSARGARDRFLNKSGPQPGKKMKTTHCKQPLFSKPGQVRGALRKARGRQEEREAVGMWGGRGHSYPEYIKTSEVTEVRDSPKHPQVQPFLTTRVTCRVPGHLQVLEALCGAWGSMFKHALVVVQVPRXRGRAXLGSEWQVGQLXLILLHGTQHWAAXLVPXLPQESILPAQSXRVTNTPGTEET

SEQ ID NO: 1072 - protein, 369 aa, Homo sapiens
MLGAFVWPSLLLLAAACICLLTFINCAYVKWGTLVQDIFTYAKVLALIAVIVAGIVRLGQGASTHFENSFEGSSFAVGDIALALYSALFSYSGWDTLNYVTEEIKNPERNLPLSIGISMPIVTIIYILTNVAYYTVLDMRDILASDAVAVTFADQIFGIFNWIIPLSVALSCFGGLNASIVAASRLFFVGSREGHLPDAICMIHVERFTPVPSLLFNGIMALIYLCVEDIFQLINYYSFSYWFFVGLSIVGQLYLRWKEPDRPRPLKLSVFFPIVFCLCTIFLVAVPLYSDTINSLIGIAIALSGLPFYFLIIRVPEHKRPLYLRRSWGLPQGTSRSCVCQLLQKWIWKMEERCPSNGIPSLTKHHLES

SEQ ID NO: 1073 - protein, 526 aa, Homo sapiens
  SITE (466): Xaa equals any of the naturally occurring L-amino acids
MAALTIATGTGNWFSALALGVTLLKCLLIPTYHSTDFEVHRNWLAITHSLPISQWYYEATSEWTLDYPPFFAWFEYILSHVAKYFDQEMLNVHNLNYSSSRTLLFQRFSVIFMDVLFVYAVRECCKCIDGKKVGKELTEKPKFILSVLLLWNFGLLIVDHIHFQYNGFLFGLMLLSIARLFQKRHMEGAFLFAVLLHFKHIYLYVAPAYGVYLLRSYCFTANKPDGSIRWKSFSFVRVISLGLVVFLVSALSLGPFLALNQLPQVFSRLFPFKRGLCHAYWAPNFWALYNALDKVLSVIGLKLKFLDPNNIPKASMTSGLVQQFQHTVLPSVTPLATLICTLIAILPSIFCLWFKPQGPRGFLRCLTLCALSSFMFGWHVHEKAILLAILPMSLLSVGKAGDASIFLILTTTGHYSLFPLLFTAPELPIKILLMLLFTIYSISSLKTLFRKEKPLFNWMETFYLLXLGPLEVCCEFVFPFTSWKVKYPFIPLLLTSVYCAVGITYAWFKLYVSVLIDSAIGKTKKQ

SEQ ID NO: 1074 - protein, 549 aa, Homo sapiens [sequence omitted]

SEQ ID NO: 1075 - protein, 467 aa, Homo sapiens
MLLLLLLPLLWGRERVEGQKSNRKDYSLTMQSSVTVQEGMCVHVRCSFSYPVDSQTDSDPVHGYWFRAGNDISWKAPVATNNPAWAVQEETRDRFHLLGDPQTKNCTLSIRDARMSDAGRYFFRMEKGNIKWNYKYDQLSVNVTALTHRPNILIPGTLESGCFQNLTCSVPWACEQGTPPMISWMGTSVSPLHPSTTRSSVLTLIPQPQHHGTSLTCQVTLPGAGVTTNRTIQLNVSYPPQNLTVTVFQGEGTASTALGNSSSLSVLEGQSLRLVCAVDSNPPARLSWTWRSLTLYPSQPSNPLVLELQVHLGDEGEFTCRAQNSLGSQHVSLNLSLQQEYTGKMRPVSGVLLGAVGGAGATALVFLSFCVIFIVVRSCRKKSARPAADVGDIGMKDANTIRGSASQGNLTESWADDNPRHHGLAAHSSGEEREIQYAPLSFHKGEPQDLSGQEATNNEYSEIKIPK

SEQ ID NO: 1076 - protein, 51 aa, Homo sapiens [sequence omitted]

SEQ ID NO: 1077 - protein, 455 aa, Homo sapiens
MAALLLLPLLLLLPLLLLKLHLWPQLRWLPADLAFAVRALCCKRALRARALAAAAADPEGPEGPCILAWRLAELAQQRARNFLLRSRALATQRRSARVTGLTRLPTCARLGLGTRRRRQRRGERWRRRAGSAGSRRCSGRKRRGVCRRGRCRQRWRSRAPLSPGATVALLLPAGPEFLWLWIGLAKAGLRTAFVPTALRRGPLLHCLRSCGARALVLAPEFLESLEPDLPALRAMGLHLWAAGPGTHPAGISDLLAEVSAEVDGPVPGYLSSPQSITDTCLYIFTSGTTGLPKAARISHLKILQCQGFYQLCGVHQEDVIYLALPLYHMSGSLLGIVGCMGIGATVVLKSKFSAGQFWEDCQQHRVTVFQYIGELCRYLVNQPPSKAERGHKVRLAVGSGLRPDTWERFVRRFGPLQVLETYGLTEGNVPPSTTQDSGALWGVLPGFTSISSPSP

SEQ ID NO: 1078 - protein, 802 aa, Homo sapiens [sequence omitted]

SEQ ID NO: 1079 - protein, 325 aa, Homo sapiens
MGSQVSSMLKLALQNCCPQLWQRHSARDRQCARVLADERSPQPGASPQEDIANFQVLVKILPVMVTLVPYWMVYFQMQSTYVLQGLHLHIPNIFPANPANISVALRAQGSSYTIPEAWLLLANVVVVLILVPLKDRLIDPLLLRCKLLPSALQKMALGMFFGFTSVIVAGVLEMERLHYIHHNETVSQQIGEVLYNAAPLSIWWQIPQYLLIGISEIFASIPGLEFAYSEAPRSMQGAIMGIFFCLSGVGSLLGSSLVALLSLPGGWLHCPKDFGNINNCRMDLYFFLLAGIQAVTALLFVWIAGRYERASQGPASHSRFSRDRG

SEQ ID NO: 1080 - protein, 331 aa, Homo sapiens
MLTGIAVGALLALALVGVLILFMFRRLRQFRQAQPTPQYRFRKRDKVMFYGRKIMRKVTTLPNTLVENTALPRQRARKRTKVLSLAKRILRFKKEYPALQPKEPPPSLLEADLTEFDVKNSHLPSEVLYMLKNVRVLGHFEKPLFLELCKHIVFVQLQEGEHVFQPREPDPSICVVQDGRLEVCIQDTDGTEVVVKEVLAGDSVHSLLSILDIITGHAAPYKTVSVRAAIPSSILRLPAAAFHGVFEKYPETLVRVVQIIMVRLQRVTFLALHNYLGLTTELFNAESQAIPLVSVASVAAGKAKKQVFYGEEERLKKPPRLQESCDSDHGG

SEQ ID NO: 1081 - protein, 365 aa, Homo sapiens
MFVGLMAFLLSFYLIFTNEGRALKTATSLAEGLSLVVSPDSIHSVAPENEGRLVHIIGALRTSKLLSDPNYGVHLPAVKLRRHVEMYQWVETEESREYTEDGQVKKETRYSYNTEWRSEIINSKNFDREIGHKNPSAMAVESFMATAPFVQIGRFFLSSGLIDKVDNFKSLSLSKLEDPHVDIIRRGDFFYHSENPKYPEVGDLRVSFSYAGLSGDDPDLGPAHVVTVIARQRGDQLVPFSTKSGDTLLLLHHGDFSAEEVFHRELRSNSMKTWGLRAAGWMAMFMGLNLMTRILYTLVDWFPVFRDLVNIGLKAFAFCVATSLTLLTVAAGWLFYRPLWALLIAGLALVPILVARTRVPAKKLE

SEQ ID NO: 1082 - protein, 219 aa, Homo sapiens
MKLLLWACIVCVAFARKRRFPFIGEDDNDDGHPLHPSLNIPYGIRNLPPPLYYRPVNTVPSYPGNTYTDTGLPSYPWILTSPGFPYVYHIRGFPLATQLNVPPLPPRGFPFVPPSRFFSAAAAPAAPPIAAEPAAAAPLTATPVAAEPAAGAPVAAEPAAEAPVGAEPAAEAPVAAEPAAEAPVGVEPAAEEPSPAEPATAKPAAPEPHPSPSLEQANQ

SEQ ID NO: 1083 - protein, 56 aa, Homo sapiens
MFYKLTLILCELSVAGVTQAASQRPLQRLPRHICSQRSSSWEMPPQGPAPDHVGRA

SEQ ID NO: 1084 - protein, 83 aa, Homo sapiens
GHVLAYSSWPSLAPGLSVQYFVSRVEVPNPGCTLEAPGKLSEFLRPEPHPKPISSESLGGTEPGFCQLKPAMVTSVSSYTENS

SEQ ID NO: 1085 - protein, 85 aa, Homo sapiens
MKKVLLLITAILAVAVGFPVSQDQEREKRSISDSDELASGFFVFPYPYPFRPLPPIPFPRFPWFRRNFPIPIPESAPTTPLPSEK

SEQ ID NO: 1086 - protein, 29 aa, Homo sapiens
MYVWVSGALVLVLSPHPASRTLCLMAQAV

SEQ ID NO: 1087 - protein, 49 aa, Homo sapiens
MSRAPCASSILVLTLIVTLLVLLCSVKICNWLRITVGVHSYSTKSPQVF

SEQ ID NO: 1088 - protein, 297 aa, Homo sapiens
MTISKKIEQNEGKRGSVLAHSCDQPAVCGVPSWPGLGTCSFLWLLPGQATLQGCFSTHPFACLPVPGVVKGFWVRVGTPFSKAPCKAGLSLVGLTASFSPCQAAQAPEVTYEAEEGSLWTLLLTSLDGHLLEPDAEYLHWLLTNIPGNRVAEGQVTCPYLPPFPARGSGIHRLAFLLFKQDQPIDFSEDARPSPCYQLAQRTFRTFDFYKKHQETMTPAGLSFFQCRWDDSVTYIFHQLLDMREPVFEFVRPPLTTPSRSASPTGSPCATWTGTGTVMSPPMASTKEPECAHFRAWD

SEQ ID NO: 1089 - protein, 51 aa, Homo sapiens
MELLQAKKLLLLLGLFVSCCSNIRKTEPCFGLDSITFRDPKKKCLCNLKSC

SEQ ID NO: 1090 - protein, 58 aa, Homo sapiens
MCSGSFKELYLVPISLFSTCVLGFYFHNFLLLIILFSILLRKITGKLFFTYYHFSCGV

SEQ ID NO: 1091 - protein, 19 aa, Homo sapiens
MAAHSVLSFLLWTPYALKS

SEQ ID NO: 1092 - protein, 50 aa, Homo sapiens
MYSLVLTFLVSFCALSKTFLDHWFQMFIYYILFKDSEIGFCHPLLYVLFH

SEQ ID NO: 1093 - protein, 42 aa, Homo sapiens
  SITE (28): Xaa equals any of the naturally occurring L-amino acids
MHCFFLWLLLFGLLGISGFLGYISVAGXSIYVMWKVEKEMNT

SEQ ID NO: 1094 - protein, 99 aa, Homo sapiens
MLFFLSLFLSLLLTLSLPSFLPFSFFFFSLFPHLSACLLPSLPSPPFPLPPSLPSFLPSFLPSFLPSLLSPSFPAFFPSFCQLARRSPRKSTQMLQSTS

SEQ ID NO: 1095 - protein, 171 aa, Homo sapiens
MKKCLLPVLITCMQTAICKDRMMMIMILLVNYRPDEFIECEDPVDHVGNATASQELGYGCLKFGGQAYSDVEHTSVQCHALDGIECASPRTFLRENKPCIKYTGHYFITTLLYSFFLGCFGVDRFCLGHTGTAVGKLLTLGGLGIWWFVDLILLITGGLMPSDGSNWCTVY

SEQ ID NO: 1096 - protein, 83 aa, Homo sapiens [sequence omitted]

SEQ ID NO: 1097 - protein, 34 aa, Homo sapiens
MQMFTVSLLLSLLLRSTDQNHLQLLVGREDHYGG

SEQ ID NO: 1098 - protein, 72 aa, Homo sapiens
MRHTCIVNIAASLLVANTWFIVVAAIQDNRYILCKTACVAATFFIHFFYLSVFFWMLTLGPHAVLSPGFHSA

SEQ ID NO: 1099 - protein, 116 aa, Homo sapiens [sequence omitted]

SEQ ID NO: 1100 - protein, 80 aa, Homo sapiens
  SITE (11): Xaa equals any of the naturally occurring L-amino acids
MTHCLLHGMGXAGAASLTPKPMSLISAYCGGLWLAAVAVMVQMAALCGAQDIQDKFSSILSRGQEAYERLLWNGEFGEPK

SEQ ID NO: 1101 - protein, 309 aa, Homo sapiens
  SITE (129): Xaa equals any of the naturally occurring L-amino acids
  SITE (178): Xaa equals any of the naturally occurring L-amino acids
  SITE (187): Xaa equals any of the naturally occurring L-amino acids
  SITE (262): Xaa equals any of the naturally occurring L-amino acids
  SITE (308): Xaa equals any of the naturally occurring L-amino acids
MFTIKLLLFIVPLVISSRIDQDNSSFDSLSPEPKSRFAMLDDVKILANGLLQLGHGLKDFVHKTKGQINDIFQKLNIFDQSFYDLSLQTSEIKEEEKELRRTTYKLQVKNEEVKNMSLELNSKLESLLXEKILLQQKVKYLEEQLTNLIQNQPETPEHPEVTSLKTFVEKQDNSIKDXLQTVEDQYXQLNQQHSQIKEIENQLRRTSIQEPTEISLSSKPRAPRTTPFLQLNEIRNVKHDGIPAECTTIYNRGEHTSGMYAXRPSNSQVFHVYCDVISGSPWTLIQHRIDGSQNFNETWENYKYGFGXA

SEQ ID NO: 1102 - protein, 41 aa, Homo sapiens
MINFWPVTHVCIWLLWLQALEARGQGSNIDCTRNSKTVFTS

SEQ ID NO: 1103 - protein, 201 aa, Homo sapiens
MTLRPSLLPLHLLLLLLLSAAVCRAEAGLETESPVRTLQVETLVEPPEPCAEPAAFGDTLHIHYTGSLVDGRIIDTSLTRDPLVIELGQKQVIPGLEQSLLDMCVGEKRRAIIPSHLAYGKRGFPPSVPADAVVQYDVELIALIRANYWLKLVKGILPLVGMAMVPALLGLIGYHLYRKANRPKVSKKKLKEEKRNKSKKK

SEQ ID NO: 1104 - protein, 41 aa, Homo sapiens
MPPKQIPLTSLSLLALLLFFFFKIFCLLFLFYPLPDESEHF

SEQ ID NO: 1105 - protein, 53 aa, Homo sapiens
MNLLHCLYMINIIIYIFCIKLIWLHLSCILSHISFISSMDMSRSLYWSPVCAV

SEQ ID NO: 1106 - protein, 355 aa, Homo sapiens
  SITE (331): Xaa equals any of the naturally occurring L-amino acids
  SITE (338): Xaa equals any of the naturally occurring L-amino acids
  SITE (345): Xaa equals any of the naturally occurring L-amino acids
MAQLEGYYFSAALSCTFLVSCLLFSAFSRALREPYMDEIFHLPQAQRYCEGHFSLSQWDPMITTLPGLYLVSIGVIKPAIWIFGWSEHVVCSIGMLRFVNLLFSVGNFYLLYLLFCKVQPRNKAASSIQRVLSTLTLAVFPTLYFFNFLYYTEAGSMFFTLFAYLMCLYGNHKTSAFLGFCGFMFRQTNIIWAVFCAGNVIAQKLTEAWKTELQKKEDRLPPIKGPFAEFRKILQFLLAYSMSFKNLSMLLLLTWPYILLGFLFCAFVVVNGGIVIGDRSSHEACLHFPQLFYFFSFTLFFSFPHLLSPSKIKTFPFLSLGNVEFCFLVVXLVLCGFXVWEIPIXGSRNTCLADQ

SEQ ID NO: 1107 - protein, 354 aa, Homo sapiens
MAPAKATNVVRLLLGSTALWLSQLGSGTVAASKSVTAHLAAKWPETPLLLEASEFMAEESNEKFWQFLETVQELAIYKQTESDYSYYNLILKKAGQFLDNLHINLLKFAFSIRAYSPAIQMFQQIAADEPPPDGCNAFVVIHKKHTCKINEIKKLLKKAASRTRPYLFKGDHKFPTNKENLPVVILYAEMGTRTFSAFHKVLSEKAQNEEILYVLRHYIQKPSSRKMYLSGYGVELAIKSTEYKALDDTQVKTVTNTTVEDETETNEVQGFLFGKLKEIYSDLRDNLTAFQKYLIESNKQMMPLKVWELQDLSFQAASQIMSAPVYDAIKLMKDISQNFPIKARVQMIGNVLIG

SEQ ID NO: 1108 - protein, 42 aa, Homo sapiens
MINCVCVHACVRACGLLHSLVLLLSLSLSSALFIPWDTEIFK

SEQ ID NO: 1109 - protein, 42 aa, Homo sapiens
MRIHPIFRLGNVYSLLSFLILGRVSTKNSIEEKQYNIKIKKI

SEQ ID NO: 1110 - protein, 53 aa, Homo sapiens [sequence omitted]

SEQ ID NO: 1111 - protein, 68 aa, Homo sapiens
MALAIFIPVLIISLLLGGAYIYITRCRYYSNLRLPLMYSHPYSQITVETEFDNPIYETGETREYEVSI

SEQ ID NO: 1112 - protein, 139 aa, Homo sapiens
MEAVVFVFSLLDCCALIFLSVYFIITLSDLECDYINARSCCSKLNKWVIPELIGHTIVTVLLLMSLHWFIFLLNLPVATWNIYRYIMVPSGNMGVFDPTEIHNRGQLKSHMKEAMIKLGFHLLCFFMYLYSMILALIND

SEQ ID NO: 1113 - protein, 46 aa, Homo sapiens [sequence omitted]

SEQ ID NO: 1114 - protein, 125 aa, Homo sapiens
  SITE (101): Xaa equals any of the naturally occurring L-amino acids
MLSQPRMESLDTPAAYSLGLALLGLGVVLVLSSFFALGFAGTFLGDYFGILKEARVTVFPFNILDNPMYWGSTANYLGWAIMHASPTGLLLTVLVALTYIXALLYEEPFTAEIYRQKASGSHKRS

SEQ ID NO: 1115 - protein, 147 aa, Homo sapiens
MLGLPWKGGLSWALLLLLLGSQILLIYAWHFHEQRDCDEHNVMARYLPATVEFAVHTFNQQSKDYYAYRLGHILNSWKEQVESKTVFSMELLLGRTRCGKFEDDIDNCHFQESTELNNTFTCFFTISTRPWMTQFSLLNKTCLEGFH

SEQ ID NO: 1116 - protein, 159 aa, Homo sapiens [sequence omitted]

SEQ ID NO: 1117 - protein, 111 aa, Homo sapiens
MKSLLFTLAVFMLLAQLVSGNWYVKKCLNDVGICKKKCKPEEMHVKNGWAMCGKQRDCCVPADRRANYPVFCVQTKTTRISTVTATTATTTLMMTTASMSSMAPTPVSPTG

SEQ ID NO: 1118 - protein, 121 aa, Homo sapiens
MMLPQWLLLLFLLFFFLFLLTRGSLSPTKYNLLELKESCIRNQDCETGCCQRAPDNCESHCAEKGSEGSLCQTQVFFGQYRACPCLRNLTCIYSKNEKWLSIAYGRCQKIGRQKLAKKMFF

SEQ ID NO: 1119 - protein, 161 aa, Homo sapiens [sequence omitted]

SEQ ID NO: 1120 - protein, 344 aa, Homo sapiens
  SITE (53): Xaa equals any of the naturally occurring L-amino acids
MDFLVLFLFYLASVLMGLVLICVCSKTHSLKGLARGGAQIFSCIIPECLQRAXHGLLHYLFHTRNHTFIVLHLVLQGMVYTEYTWEVFGYCQELELSLHYLLLPYLLLGVNLFFFTLTCGTNPGIITKANELLFLHVYEFDEVMFPKNVRCSTCDLRKPARSKHCSVCNWCVHRFDHHCVWVNNCIGAWNIRYFLIYVLTLTASAATVAIVSTTFLVHLVVMSDLYQETYIDDLGHLHVMDTVFLIQYLFLTFPRIVFMLGFVVVLSFLLGGYLLFVLYLAATNQTTNEWYRGDWAWCQRCPLVAWPPSAEPQVHRNIHSHGLRSNLQEIFLPAFPCHERKKQE

SEQ ID NO: 1121 - protein, 79 aa, Homo sapiens
MLRLTQTFFFISQTLLDWFLAAALALPNLCSPLASNFKSRQISSVPIQPSQGTSRVALQIWCGSCRMRMSSSTIHILAL

SEQ ID NO: 1122 - protein, 291 aa, Homo sapiens [sequence omitted]

SEQ ID NO: 1123 - protein, 190 aa, Homo sapiens
  SITE (29): Xaa equals any of the naturally occurring L-amino acids
  SITE (31): Xaa equals any of the naturally occurring L-amino acids
MKASQCCCCLSHLLASVLLLLLLPELSGXLXVLLQAAEAAPGLGPPDPRPRTLPPLPPGPTPAQQPGRGLAEAAGPRGSEGGNGSNPVAGLETDDHGGKAGEGSVGGGLAVSPNPGDKPMTQRALTVLMVVSGAVLVYFVVRTVRMRRRNRKTRRYGVLDTNIENMELTPLEQDDEDDDNTLFDANHPRR

SEQ ID NO: 1124 - protein, 123 aa, Homo sapiens
MKLLLLALPMLVLLPQVIPAYSGEKKCWNRSGHCRKQCKDGEAVKDTCKNLRACCIPSNEDHRRVPATSPTPLSDSTPGIIDDILTVRFTTDYFEVSSKKDMVEESEAGRGTETSLPNVHHSS

SEQ ID NO: 1125 - protein, 121 aa, Homo sapiens
MHRSEPFLKMSLLILLFLGLAEACTPREVNLLKGIIGLMSRLSPDEILGLLSLQVLHEETSGCKEEVKPFSGTTPSRKPLPKRKNTWNFLKCAYMVMTYLFVSYNKGDWFTFSSQVLLPLL

SEQ ID NO: 1126 - protein, 44 aa, Homo sapiens
  SITE (41): Xaa equals any of the naturally occurring L-amino acids
MILFDLTFFLFAPRILASGACSCSIYPKITLPTKYFAFIIXTSF

SEQ ID NO: 1127 - protein, 45 aa, Homo sapiens
MVSFHFQCTSYFVRLFFQLQLFVGLVIVLALLISHSLTYSFHKHL

SEQ ID NO: 1128 - protein, 71 aa, Homo sapiens
  SITE (19): Xaa equals any of the naturally occurring L-amino acids
  SITE (22): Xaa equals any of the naturally occurring L-amino acids
  SITE (57): Xaa equals any of the naturally occurring L-amino acids
  SITE (70): Xaa equals any of the naturally occurring L-amino acids
MSLLLPPLALLLLLAALVXPAXAATAYRPDWNRLSGLTRARVETCGGMTAEPPKGEXRLSSRRTFHSITXW

SEQ ID NO: 1129 - protein, 179 aa, Homo sapiens
MACKGLLQQVQGPRLPWTRLLLLLLVFAVGFLCHDLRSHSSFQASLTGRLLRSSGFLPASQQACAKLYSYSLQGYSWLGETLPLWGSHLLTVVRPSLQLAWAHTNATVSFLSAHCASHLAWFGDSLTSLSQRLQIQLPDSVNQLLRYLRELPLLFHQNVLLPLWHLLLEALAWAQGALP

SEQ ID NO: 1130 - protein, 64 aa, Homo sapiens
  SITE (61): Xaa equals any of the naturally occurring L-amino acids
MAVLLITILLFLCLGYYRVITEISRKTPACRMFTSSLSSWYIMRKLYDTPGEVFLSHAIVXFLK

SEQ ID NO: 1131 - protein, 229 aa, Homo sapiens
  SITE (206): Xaa equals any of the naturally occurring L-amino acids
MYKLLLFDLLTVLAVALLIQFPRKLLCGLCPGALGRLAGTQEFQVPDEVLGLIYAQTVVWVGSFFCPLLPLLNTVKFLLLFYLKKLTLFSTCSPAARTFRASAANFFFPLVLLLGLAISSVPLLYSIFLIPPSKLCGPFRGQSSIWAQIPESISSLPETTQNFLFFLGTQAFAVPLLLISSILMAYTVALANSYGRLISELKRQRXTEAQNKVFLARRAVALTSTKPAL

SEQ ID NO: 1132 - protein, 87 aa, Homo sapiens
MTAWILLPVSLSAFSITGIWTVYAMAVMNHHVCPVENWSYNESCPPDPAEQGGPKTCCTLDDVPLISGPDLPPALRAAPGAESALLG

SEQ ID NO: 1133 - protein, 60 aa, Homo sapiens
MAAVMLVLTVVLGLYNSYNSCAEQADGPLGRSTCSAAPGTPGGAQDSSMSSLQSSRKPHT

SEQ ID NO: 1134 - protein, 61 aa, Homo sapiens
MFCWILVCLAYLKVPLLFFFFFFLSALFCRTCSNMENKSRRLSSDCYLCPKPPQTFMLMFY

SEQ ID NO: 1135 - protein, 352 aa, Homo sapiens
MLCRLCWLVSYSLAVLLLGCLLFLRKAAKPAETPRPTSLSGAPPTPRHSRCPPNHTVSSASLSLPSRHRLFLTYRHCRNFSILLEPSGCSKDTFLLLAIKSQPGHVERRAAIRSTWGRWGDGLGPALKLVFLLGVAGSAPPAQLLAYESREFDDILQWDFTEDFFNLTLKELHLQRWVVAACPQAHFMLKGDDDVFVHVPNVLEFLDGWDPAQDLLVGDVIRQALPNRNTKVKYFIPPSMYRATHYPPYAGGGGYVMSRATVRRLQAIMEDAELFPIDDVFVGMCLRRLGLSPMHHAGFKTFGIRRPLDPLDPCLYRGLLLVHRLSPLEMWTMWALVTDEGLKCAAGPIPQR

SEQ ID NO: 1136 - protein, 209 aa, Homo sapiens
  SITE (181): Xaa equals any of the naturally occurring L-amino acids
  SITE (200): Xaa equals any of the naturally occurring L-amino acids
  SITE (207): Xaa equals any of the naturally occurring L-amino acids
MYFLFFFAFFFFPLFCYCFNYNKRARGSQALARSWRPMGVLGRGRGEVSGGQRWRVKNEKVGELGLAQEPCVPAHSPPSLPLPTSLPLHGFSPPLPESYGTGPCSSGIQLLPAHSSSWATSPPTFDVSPPVATLQLAFQAPSRGRPLPRPLTHVAIPTWLPVMSLLSKPSCPLFLPPRHAXTKWWKPPLSPSLPCAEFSXVLNEGEXDK

SEQ ID NO: 1137 - protein, 45 aa, Homo sapiens
MVKWIILSCLILKGKRTLNSSTFYAANKSSTINRNLSWQALPFTH

SEQ ID NO: 1138 - protein, 56 aa, Homo sapiens
MRSYFPFSVCPFPFCSPVFFFVFTDVYLCFFFVFAVGRHLSDPFPILFFTHKCPDV

SEQ ID NO: 1139 - protein, 38 aa, Homo sapiens
MLKLATILLTLLLKNLDAGLTDKLSRSNFITDFILTKY

SEQ ID NO: 1140 - protein, 47 aa, Homo sapiens
MSLLLPPLALLLLLAALVAPATAATAYRPDWNRLSGLTRARVETCGG

SEQ ID NO: 1141 - protein, 74 aa, Homo sapiens [sequence omitted]

SEQ ID NO: 1142 - protein, 53 aa, Homo sapiens
MAALLLAGICILLNGVIPQDQSIVRTSLAVLGKGCLAASFNCIFLYTGNCIPQ

SEQ ID NO: 1143 - protein, 54 aa, Homo sapiens
MSPCAHICLYVLVFLCNVTRCKCVRAFTTWDTEKVKYFMAHWSKLKRVRGTRVE

SEQ ID NO: 1144 - protein, 88 aa, Homo sapiens [sequence omitted]

SEQ ID NO: 1145 - protein, 131 aa, Homo sapiens
MLWTLTFFLLQRSLTSPWLFGLLFLGSSNTAVCCFLGQLIMGPKGERGFPGPPGRCLCGPTMNVNNPSYGESVYGPSSPRVPVVRLSGRSLGWLSVRTSHLILMGLCKILSVKLTFFHDSEYTLIIGNWKI

SEQ ID NO: 1146 - protein, 549 aa, Homo sapiens [sequence omitted]

SEQ ID NO: 1147 - protein, 46 aa, Homo sapiens
MLSPLNHLYFPFRFLCMLCSLPRVVFQLTPIKEAFPSQELTFPCTH

SEQ ID NO: 1148 - protein, 54 aa, Homo sapiens
MLLGFLCLWYQVYVCMYVCTYLFIYLLFSLFSLPHMICKKSVKFIMSSPKPPSG

SEQ ID NO: 1149 - protein, 222 aa, Homo sapiens
  SITE (86): Xaa equals any of the naturally occurring L-amino acids
MHFQRQKLMAVTEYIPPKPAIHPSCLPSPPSPPQEEIGLIRLLRREIAAVFQDNRMIAVCQNVALSAEDKLLMRHQLRKHKILMKXFPNQVLKPFLEDSKYQNLLPLFVGHNMLLVSEEPKVKEMVRILRTVPFLPLLGGCIDDTILSRQGFINYSKLPSLPLVQGELVGGLTCLTAQTHSLLQHQPLQLTTLLDQYIREQREKDSVMSANGKPDPDTVPDS

SEQ ID NO: 1150 - protein, 519 aa, Homo sapiens
  SITE (205): Xaa equals any of the naturally occurring L-amino acids
  SITE (207): Xaa equals any of the naturally occurring L-amino acids
  SITE (213): Xaa equals any of the naturally occurring L-amino acids
  SITE (225): Xaa equals any of the naturally occurring L-amino acids
MQGGQRPHLLLLLLAVCLGAQSRNQEERLLADLMRNYDPHLRPAERDSDVVNVSLKLTLTNLISLNEREEALTTNVWIEMQWCDYRLRWDPKDYEGLWILRVPSTMVWRPDIVLENNVDGVFEVALYCNVLVSPDGCIYWLPPAIFRSSCSISVTYFPFDWQNCSLIFQSQTYSTSEINLQLSQEDGQAIEWIFIDPEAFTENGXWXIRHRPXKMLLDSVAPAEXAGHQKVVFYLLIQRKPLFYVINIIAPCVLISSVAILIYFLPAKAGGQKCTVATNVLLAQTVFLFLVAKKVPETSQAVPLISKYLTFLMVVTILIVVNSVVVLNVSLRSPHTHSMARGVRKVFLRLLPQLLRMHVRPLAPAAVQDARFRLQNGSSSGWPIMAREEGDLCLPRSELLFRQRQRNGLVQAVLEKLENGPEVRQSQEFCGSLKQASPAIQACVDACNLMARARRQQSHFDSGNEEWLLVGRVLDRVCFLAMLSLFICGTAGIFLMAHYNQVPDLPFPGDPRPYLPLPD

SEQ ID NO: 1151 - protein, 68 aa, Homo sapiens
MVHNCLLLLKFLLLFCFPLISYQLMNGSLQSLQRLRMIQNVQCIVLNKQEAEFLMGISFQIYDWSLGF

SEQ ID NO: 1152 - protein, 194 aa, Homo sapiens
MKLASGFLVLWLSLGGGLAQSDTSPDTEESYSDWGLRHLRGSFESVNSYFDSFLELLGGKNGVCQYRCRYGKAPMPRPGYKPQEPNGCGSYFLGLKVPESMDLGIPAMTKCCNQLDVCYDTCGANKYRCDAKFRWCLHSICSDLKRSLGFVSKVEACDSLVDTVFNTVWTLGCRPFMNSQRAACICAEEEKEEL

SEQ ID NO: 1153 - protein, 79 aa, Homo sapiens
  SITE (23): Xaa equals any of the naturally occurring L-amino acids
  SITE (45): Xaa equals any of the naturally occurring L-amino acids
MGCCSKKYWQLLLGAAPWGVIPXLLLWMGTRAPHFKDSVSQGLPXKAEESRANFNQFLVLLMPKEMIVLTIVHPIVRRA

SEQ ID NO: 1154 - protein, 56 aa, Homo sapiens [sequence omitted]

SEQ ID NO: 1155 - protein, 79 aa, Homo sapiens
MMSSCLVVVITLRAYFSWLQAIRSQVVWSRMKRLQSASRQSGLSIPRSEMSALHRLQDWSDKSHILFFIFLPRVCRFPL

SEQ ID NO: 1156 - protein, 41 aa, Homo sapiens
MVKVGAWRAVQILMLFANPGHAEGACISPGPAGKREPLKLG

SEQ ID NO: 1157 - protein, 53 aa, Homo sapiens
MILLISQCPLSIFAAPFALPPKGHCGSFSDFHSQVTLHKNSKLIFRSHKSILL

SEQ ID NO: 1158 - protein, 85 aa, Homo sapiens
MGFWCGCPFCLLVVLLTDRTLSCRSVGVPCNVRCQCAPAGGCLPVRLLAGQGSGTHLRRQSARSQISSCMLGEPLLSSKLSDRDI

SEQ ID NO: 1159 - protein, 64 aa, Homo sapiens
MEKLLTLYLLLYVSYWSVSPTGQGAGLFIAQSSAPGLRQTHSRHLGNAWERKEGRREEGLHGHV

SEQ ID NO: 1160 - protein, 128 aa, Homo sapiens
MYECFLSLSLLKSCKAVSGLMCLLLPRLGLLLLLPSERCFCWIPVYSLITCLAECSVVLRDPGFAGAFQVHRRQACFSTLRWSCLLLWWVSRVSAGRPLIGSPHMMAPSTFCPTVRGPGTCASSDPDG

SEQ ID NO: 1161 - protein, 67 aa, Homo sapiens
MQPACLAPCLDALTSFCLGLLKLTFCLAFFPSGVLEGECSFFTMSRSLSHPRTLHRYTTERPAHSRH

SEQ ID NO: 1162 - protein, 41 aa, Homo sapiens
MSYKWNSRVCFLWSRTFHLMLLRLICLVAYISTEVISFIAE

SEQ ID NO: 1163 - protein, 79 aa, Homo sapiens
MTLMCLCLSVTVLHPLRSKERLSGTFCGYSSSWCSPASESSSPGSLLTCAASGSHPDCPLSQRLLGVQLAALGRPQGLF

SEQ ID NO: 1164 - protein, 58 aa, Homo sapiens
MTAMSIHLFCTALSCGSSGQCNKAIKRNKISNDWKDVNVSSFIENMIHRYTYTNALNS

SEQ ID NO: 1165 - protein, 49 aa, Homo sapiens
  SITE (27): Xaa equals any of the naturally occurring L-amino acids
MRPGSFSFIAFLATEVSSCFPGRPDCXTGMWLLQLQKKQRTLLAMAPRR

SEQ ID NO: 1166 - protein, 68 aa, Homo sapiens [sequence omitted]

SEQ ID NO: 1167 - protein, 377 aa, Homo sapiens
  SITE (164): Xaa equals any of the naturally occurring L-amino acids
  SITE (213): Xaa equals any of the naturally occurring L-amino acids
MATAMDWLPWSLLLFSLMCETSAFYVPGVAPINFHQNDPVEIKAVKLTSSRTQLPYEYYSLPFCQPSKITYKAENLGEVLRGDRIVNTPFQVLMNSEKKCEVLCSQSNKPVTLTVEQSRLVAERITEDYYVHLIADNLPVATRLELYSNRDSDDKKKESDIKWXSRWDTYLTMSDVQIHWFSIINSVVVVFFLSGILSMIIIRTLRKDIANYXKEDDIEDTMEESGWKLVHGDVFRPPPVPHDPQLPAGLRHSAVLYDPHRHLCSHAWDAVALQPGSSHDHSLLPLHVHGGVWRIFCWPSVPHFKRPSVEERSLLYGNSVPWCGFWHLLRIELLHLGKALIRSGALSHHGGSAVHVVRDLPAPRLLGLLLRLPKAAI

SEQ ID NO: 1168 - protein, 26 aa, Homo sapiens
MFHSSLLVFLSLLSQEIFTEYDCMHK

SEQ ID NO: 1169 - protein, 55 aa, Homo sapiens
MWFLHWTLLGYGPAQILGMWAVAPLKHQWAEDESWYPPGTPPSALHFTCDPGTSY

SEQ ID NO: 1170 - protein, 166 aa, Homo sapiens [sequence omitted]

SEQ ID NO: 1171 - protein, 79 aa, Homo sapiens
MLSLDFLDDVRRMNKRQVSLSVLFFSWLFLSLRGCCCGARRTPGFWCEGLSWSDTRVIRFLWRLWPEAALSASLFLTPN

SEQ ID NO: 1172 - protein, 76 aa, Homo sapiens
  SITE (22): Xaa equals any of the naturally occurring L-amino acids
MNRGQRLCLAFVSLFPPCNSLXPPPTLFPSPLLPLSLTSPTPHSLSSLAVSCVCVGVCVFGCVNVGSSTTGFCNLG

SEQ ID NO: 1173 - protein, 84 aa, Homo sapiens [sequence omitted]

SEQ ID NO: 1174 - protein, 74 aa, Homo sapiens
MGFHHVSQAALVLLLLLLLLLLFDTESRSSLATERDSISKKKNKKTKKKNRKETKNVVLILINSNSFMWLAAAL

SEQ ID NO: 1175 - protein, 58 aa, Homo sapiens
MVLPFVLLFRPNFISVLHPLFYSHCLFLYLISPVHSSSIIYYKPDHCHYTPFIPGLLQ

SEQ ID NO: 1176 - protein, 27 aa, Homo sapiens
MLTQNGLFVFFFFFGFQSSCKHAKKKK

SEQ ID NO: 1177 - protein, 82 aa, Homo sapiens
MNRSTRSYRCWATWPRLGWALPCCMNSLRKGRKFSQITTSLMASVSSASMVSRRRRPLPKHPVTTTSTATALLGTSSTWSKS

SEQ ID NO: 1178 - protein, 36 aa, Homo sapiens
MVFLLLLLFGFFFDGSLRSPLLLIIHLGPAPTFLQI

SEQ ID NO: 1179 - protein, 163 aa, Homo sapiens
MGSTWGSPGWVRLALCLTGLVLSLYALHVKAARARDRDYRALCDVGTAISCSRVFSSRWGRGFGLVEHVLGQDSILNQSNSIFGCIFYTLQLLLGCLRTRWASVLMLLSSLVSLAGSVYLAWILFFVLYDFCIVCITTYAINVSLMWLSFRKVQEPQGKAKRH

SEQ ID NO: 1180 - protein, 64 aa, Homo sapiens
MFMWTISIVTFSIPLTLPLPLRGENKTLNGSNSYVFYFVSEVSKLLLLASFSLGQMDVSYFPVS

SEQ ID NO: 1181 - protein, 184 aa, Homo sapiens
MKALGAVLLALLLCGRPGRGQTQQEEEEEDEDHGPDDYDEEDEDEVEEEETNRLPGGRSRVLLRCYTCKSLPRDERCNLTQNCSHGQTCTTLIAHGNTESGLLTTHSTWCTDSCQPITKTVEGTQVTMTCCQSSLCNVPPWQSSRVQDPTGKGAGGPRGSSETVGAALLLNLLAGLGAMGARRP

SEQ ID NO: 1182 - protein, 106 aa, Homo sapiens [sequence omitted]

SEQ ID NO: 1183 - protein, 390 aa, Homo sapiens
MISLPGPLVTNLLRFLFLGLSALAPPSRAQLQLHLPANRLQAVEGGEVVLPAWYTLHGEVSSSQPWEVPFVMWFFKQKEKEDQVLSYINGVTTSKPGVSLVYSMPSRNLSLRLEGLQEKDSGPYSCSVNVQDKQGKSRGHSIKTLELNVLVPPAPPSCRLQGVPHVGANVTLSCQSPRSKPAVQYQWDRQLPSFQTFFAPALDVIRGSLSLTNLSSSMAGVYVCKAHNEVGTAQCNVTLEVSTGPGAAVVAGAVVGTLVGLGLLAGLVLLYHRRGKALEEPANDIKEDAIAPRTLPWPKSSDTISKNGTLSSVTSARALRPPHGPPRPGALTPTPSLSSQALPSPRLPTTDGAHPQPISPIPGGVSSSGLSRMGAVPVMVPAQSQAGSLV

SEQ ID NO: 1184 - protein, 112 aa, Homo sapiens
  SITE (69): Xaa equals any of the naturally occurring L-amino acids
MPVLPGRTTALLSLTLAFAVPCSGVEAGPCVPRSHGCSSWEASVCVTSSTPGGSWRARALFPSAAWHRXAAWDSPWTQTGDFARGAMGGAGALPGGCVCISGRPRAQKLPAL

SEQ ID NO: 1185 - protein, 235 aa, Homo sapiens
MSPRYPGGPRPPLRIPNQALGGVPGSQPLLPSGMDPTRQQGHPNMGGPMQRMTPPRGMVPLGPQNYGGAMRPPLNALGGPGMPGMNMGPGGGRPWPNPTNANSIPYSSASPGNYVGPPGGGGPPGTPIMPSPADSTNSGDNMYTLMNAVPPGPNRPNFPMGPGSDGPMGGLGGMESHHMNGSLGSGDMDSISKNSPNNMSLSNQPGTPRDDGEMGGNFLNPFQSESYSPSMTMSV

SEQ ID NO: 1186 - protein, 82 aa, Homo sapiens
MRTWASLALGLTRALGGMGSFLLRILGWSWAMGSRSRARWPRGRLGFTSMLSCMRQCSVCRMIMSLVEVLVATSQVVKLWSR

SEQ ID NO: 1187 - protein, 49 aa, Homo sapiens
MIDICHSLRREHFLLWSFLGLFYWAVNGKSVCVSLLHPKHLGKNESLLI

SEQ ID NO: 1188 - protein, 89 aa, Homo sapiens
  SITE (12): Xaa equals any of the naturally occurring L-amino acids
  SITE (13): Xaa equals any of the naturally occurring L-amino acids
  SITE (72): Xaa equals any of the naturally occurring L-amino acids
MSGGLSFLLLVXXGTQSPLHLAGSCPGQTHLSFPLGQDRGQQLQQKQQDLEQEGLEATQGLLAGEWAPPLWXLGSLFQAFVKRESQAYA

SEQ ID NO: 1189 - protein, 51 aa, Homo sapiens
MERLVLSLWSLTCRASPANTHPRTTSRTRTLDVKTKCPVEAVKLSEMLPPV

SEQ ID NO: 1190 - protein, 52 aa, Homo sapiens
MLYDSNLCSVWHLYLILHLCKTFVYCGCVHSSYLISGTVNTQYFIVQTVLLF

SEQ ID NO: 1191 - protein, 44 aa, Homo sapiens
MLFFCLLMKMLGPSRLPFLALTLCRFILYFQFCYLISDSSPDHS

SEQ ID NO: 1192 - protein, 66 aa, Homo sapiens
MLLISAVQVFILLSPSFYLILYLLRPGGTGRGLEPICPAAEWGGWRDGYLWLQYQEPTVSLDNWGN

SEQ ID NO: 1193 - protein, 295 aa, Homo sapiens
MSWPHGALLFLWLFSPPLGAGGGGVAVTSAAGGGSPPATSCPVACSCSNQASRVICTRRDLAEVPASIPVNTRYLNLQENGIQVIRTDTFKHLRHLEILQLSKNLVRKIEVGAFNGLPSLNTLELFDNRLTTVPTQAFEYLSKLRELWLRNNPIESIPSYAFNRVPSLRRLDLGELKRLEYISEAAFEGLVNLRYLNLGMCNLKDIPNLTALVRLEELELSGNRLDLIRPGSFQGLTSLRKLWLMHAQVATIERNAFDDLKSLEELNLSHNNLMSLPHDLFTPLHRLEGGPGTQF

SEQ ID NO: 1194 - protein, 48 aa, Homo sapiens
  SITE (17): Xaa equals any of the naturally occurring L-amino acids
  SITE (18): Xaa equals any of the naturally occurring L-amino acids
MLPLMTYIIQYIYTYIXXVRVLAILFLRRVLSQTLLHAVYGVSCVLIF

SEQ ID NO: 1195 - protein, 56 aa, Homo sapiens
MCFTQFSRIFFLTSSLTLAACANHILAAYSSSLADRCVGEKSLIVIVPERSFQTHF

SEQ ID NO: 1196 - protein, 44 aa, Homo sapiens
MRKTAWLCFFFQLCGLGQVTSLQYRNCNVEIKPSLVRGTHRSIP

SEQ ID NO: 1197 - protein, 108 aa, Homo sapiens
MKALCLLLLPVLGLLVSSKTLCSMEEAINERIQEVAGSLIFRAISSIGLECQSVTSRGDLATCPRGFAVTGCTCGSACGSWDVRAETTCHCQCAGMDWTGARCCRVQP

SEQ ID NO: 1198 - protein, 44 aa, Homo sapiens
MRLRNGTVATALAFITSFLTLSWYTTWQNGKGKENDSENVHEMY

SEQ ID NO: 1199 - protein, 176 aa, Homo sapiens
MSRGDNCTDLLALGIPSITQAWGLWVLLGAVTLLFLISLAAHLSQWTRGRSRSHPGQGRSGESVEEVPLYGNLHYLQTGRLSQDPEPDQQDPTLGGPARAAEEVMCYTSLQLRPPQGRIPGPGTPVKYSEVVLDSEPKSQASGPEPELYASVCAQTRRARASFPDQAYANSQPAAS

SEQ ID NO: 1200 - protein, 327 aa, Homo sapiens [sequence omitted]

SEQ ID NO: 1201 - protein, 80 aa, Homo sapiens
  SITE (34): Xaa equals any of the naturally occurring L-amino acids
MNVTSVILVLILWNVIGVATWVHQNTFLYKRQMXELKRLKDRVFCFFVLIWLLGIKIRPRSLKISNRGRPLIDLKSVNSL

SEQ ID NO: 1202 - protein, 112 aa, Homo sapiens
  SITE (41): Xaa equals any of the naturally occurring L-amino acids
  SITE (109): Xaa equals any of the naturally occurring L-amino acids
MAALLLLPWLMLLTGRVSLAQFALAFVTDTCVAGALLCGAXLLFHGMLLLRGQTTWEWARGQHSYDLGPCHNLQAALGPRWALVWLWPFLASPLPGDGITFQTTADVGXTAS

SEQ ID NO: 1203 - protein, 42 aa, Homo sapiens
MFLVFWLLGIYFCHLLVITVLTKWILAPPYLMAQTTTPQSLY

SEQ ID NO: 1204 - protein, 42 aa, Homo sapiens
MGSWFYLFLAPLFKGLAGSLPFGCLSLLQPTEKTALQSGGSS

SEQ ID NO: 1205 - protein, 91 aa, Homo sapiens
MGDKLGMARAPSVALAQLWLICLCPESLASFVQAVPWKVLQPSSNRSTDCSPHMRPTCETLGSRKAQDLVLDTMCLSTDDCQGLICRGHRS

SEQ ID NO: 1206 - protein, 223 aa, Homo sapiens
AWYLLRVQVLQLVAAYLSLPSNNLSHSLWEQLCAQGWQTPEIALIDSHKLLRSIILLLMGSDILSTQKAAVETSFLDYGENLVQKWQVLSEVLSCSEKLVCHLGRLGSVSEAKAFCLEALKLTTKLQIPRQCALFLVLKGELELARNDIDLCQSDLQQVLFLLESCTEFGGVTQHLDSVKKVHLQKGKQQAQVPCPPQLPEEELFLRGPALELVPLWPRSLAP

SEQ ID NO: 1207 - protein, 136 aa, Homo sapiens
  SITE (84): Xaa equals any of the naturally occurring L-amino acids
MLFSLRELVQWLGFATFEIFVHLLALLVFSVLLALRVDGLVPGLSWWNVFVPFFAADGLSTYFTTIVSVRLFQDGEKRLAVLRXFWVLTVLSLKFVFEMLLCQKLAEQTRELWFGLITSPLFILLQLLMIRACRVN

SEQ ID NO: 1208 - protein, 293 aa, Homo sapiens
MATARPPWMWVLCALITALLLGVTEHVLANNDVSCDHPSNTVPSGSNQDLGAGAGEDARSDDSSSRIINGSDCDMHTQPWQAALLLRPNQLYCGAVLVHPQWLLTAAHCRKKVFRVRLGHYSLSPVYESGQQMFQGVKSIPHPGYSHPGHSNDLMLIKLNRRIRPTKDVRPINVSSHCPSAGTKCLVSGWGTTKSPQVHFPKVLQCLNISVLSQKRCEDAYPRQIDDTMFCAGDKAGRDSCQGDSGGPVVCNGSLQGLVSWGDYPCARPNRPGVYTNLCKFTKWIQETIQANS

SEQ ID NO: 1209 - protein, 196 aa, Homo sapiens [sequence omitted]

SEQ ID NO: 1210 - protein, 47 aa, Homo sapiens
MGVLLLFSFFFPNGSFSPVVLPSYFPNSSSYFVFCTSFWRPLSFQKG

SEQ ID NO: 1211 - protein, 243 aa, Homo sapiens
MGTLPWLLAFFILGLQAWDTPTIVSRKEWGARPLACRALLTLPVAYIITDQLPGMQCQQQSVCSQMLRGLQSHSVYTIGWCDVAYNFLVGDDGRVYEGVGWNIQGLHTQGYNNISLGIAFFGNKISSSPSPAALSAAEGLISYAIQKGHLSPRYIQPLLLKEETCLDPQHPVMPRKVCPNIIKRSAWEARETHCPKMNLPAKYVIIIHTAGTSCTVSTDCQTVVRNIQSFHMDTRNFCDIGYQ

SEQ ID NO: 1212 - protein, 80 aa, Homo sapiens
MKLSGMFLLLSLALFCFLTGVFSQGGQVDCGEFQDTKVYCTRESNPHCGSDGQTYGNKCAFCKAIVKSGGKISLKHPGKC

SEQ ID NO: 1213 - protein, 301 aa, Homo sapiens
MARHGLPLLPLLSLLVGAWLKLGNGQATSMVQLQGGRFLMGTNSPDSRDGEGPVREATVKPFAIDIFPVTNKDFRDFVREKKYRTEAEMFGWSFVFEDFVSDELRNKATQPMKSVLWWLPVEKAFWRQPAGPGSGIRERLEHPVLHVSWNDARAYCAWRGKRLPTEEEWEFAARGGLKGQVYPWGNWFQPNRTNLWQGKFPKGDKAEDGFHGVSPVNAFPAQNNYGLYDLLGNVWEWTASPYQAAEQDMRVLRGASWIDTADGSANHRARVTTRMGNTPDSASDNLGFRCAADAGRPPGEL

SEQ ID NO: 1214 - protein, 44 aa, Homo sapiens
MASGSWTSAPGIGVILVMTVCLSHCYTHEWGLWGGGGTQGLTDS

SEQ ID NO: 1215 - protein, 692 aa, Homo sapiens
MGTVSSRRSWWPLPLLLLLLLLLGPAGARAQEDEDGDYEELVLALRSEEDGLAEAPEHGTTATFHRCAKDPWRLPGTYVVVLKEETHLSQSERTARRLQAQAARRGYLTKILHVFHGLLPGFLVKMSGDLLELALKLPHVDYIEEDSSVFAQSIPWNLERITPPRYRADEYQPPDGGSLVEVYLLDTSIQSDHREIEGRVMVTDFENVPEEDGTRFHRQASKCDSHGTHLAGVVSGRDAGVAKGASMRSLRVLNCQGKGTVSGTLIGLEFIRKSQLVQPVGPLVVLLPLAGGYSRVLNAACQRLARAGVVLVTAAGNFRDDACLYSPASAPEVITVGATNAQDQPVTLGTLGTNFGRCVDLFAPGEDIIGASSDCSTCFVSQSGTSQAAAHVAGIAAMMLSAEPELTLAELRQRLIHFSAKDVINEAWFPEDQRVLTPNLVAALPPSTHGAGWQLFCRTVWSAHSGPTRMATAIARCAPDEELLSCSSFSRSGKRRGERMEAQGGKLVCRAHNAFGGEGVYAIARCCLLPQANCSVHTAPPAEASMGTRVHCHQQGHVLTGCSSHWEVEDLGTHKPPVLRPRGQPNQCVGHREASIHASCCHAPGLECKVKEHGIPAPQEQVTVACEEGWTLTGCSALPGTSHVLGAYAVDNTCVVRSRDVSTTGSTSEEAVTAVAICCRSRHLAQASQELQ

SEQ ID NO: 1216 - protein, 79 aa, Homo sapiens
MCRPLLPLLFPWGHCLSIPLCKWPQIMSQPPRLHRLLASGPSTKKHSKLQTHSWENSNGLTLPFEPARSHGLWRAAFES

SEQ ID NO: 1217 - protein, 438 aa, Homo sapiens
MPCTCTWRNWRQWIRPLVAVIYLVSIVVAVPLCVWELQKLEVGIHTKAWFIAGIFLLLTIPISLWVILQHLVHYTQPELQKPIIRILWMVPIYSLDSWIALKYPGIAIYVDTCRECYEAYVIYNFMGFLTNYLTNRYPNLVLILEAKDQQKHFPPLCCCPPWAMGEVLLFRCKLGVLQYTVVRPFTTIVALICELLGIYDEGNFSFSNAWTYLVIINNMSQLFAMYCLLLFYKVLKEELSPIQPVGKFLCVKLVVFVSFWQAVVIALLVKVGVISEKHTWEWQTVEAVATGLQDFIICIEMFLAAIAHHYTFSYKPYVQEAEEGSCFDSFLAMWDVSDIRDDISEQVRHVGRTVRGHPRKKLFPEDQDQNEHTSLLSSSSQDAISIASSMPPSPMGHYQGFGHTVTPQTTPTTAKISDEILSDTIGEKKEPSDKSVDS

SEQ ID NO: 1218 - protein, 43 aa, Homo sapiens
MLTCIDMDWKVLTWLRYTLWIPLYPLGMFGGSCLSDSVHSNIQ

SEQ ID NO: 1219 - protein, 107 aa, Homo sapiens
MVRYTYSMLSVIGISYAVLTWLSQTLWMPIYPLCVLAEAFAIYQSLPYFESFGTYSTKLPFDLSIYFPYVLKIYLMMLFIGMYFTYSHLYSERRDILGIFPIKKKKM

SEQ ID NO: 1220 - protein, 222 aa, Homo sapiens
MLWLLFFLVTAIHAELCQPGAENAFKVRLSIRTALGDKAYAWDTNEEYLFKAMVAFSMRKVPNREATEISHVLLCNVTQRVSFWFVVTDPSKNHTLPAVEVQSAIRMNKNRINNAFFLNDQTLEFLKIPSTLAPPMDPSVPIWIIIFGVIFCIIIVAIALLILSGIWQRRRKNKEPSEVDDAEDKCENMITIENGIPSDPLDMKGGHINDAFMTEDERLTPL

SEQ ID NO: 1221 - protein, 99 aa, Homo sapiens
MLSPQLHPLQVPLPCLLLLFTLWLVVPGSSTDISEDWEKDFDLDMTEEEVQMALSKVDASGEVSGPGGSEGSEPNGPGCESSPQPAQLSPQEGPCSCLR

SEQ ID NO: 1222 - protein, 93 aa, Homo sapiens
  SITE (59): Xaa equals any of the naturally occurring L-amino acids
  SITE (61): Xaa equals any of the naturally occurring L-amino acids
  SITE (84): Xaa equals any of the naturally occurring L-amino acids
MGHLPHILSLGLFLTLLMFCITKSDGQNKIYRCFKKASPQVIVTHTKMRIAAIICSYWXGXANLGTRIKLQLNSAVYKIFVSLXRKRKRTLSW

SEQ ID NO: 1223 - protein, 95 aa, Homo sapiens
MHLCICAVWVLVALLRMHGASPAQTSGTRSGNGGCRRHGAGQGRGAATQPLRPPRGTASGQLMALLSALLPRLSGSSTPMMAHGRPAPPQWSRVS

SEQ ID NO: 1224 - protein, 69 aa, Homo sapiens
MLLSKEHTSLGWLVIFLTLASQLISYGSRTGNSRCPPCLYRTLHTVSTSHVLSSLFVSTFSGDELVWTT

SEQ ID NO: 1225 - protein, 130 aa, Homo sapiens
METLGALLVLEFLLLSPVEAQQATEHRLKPWLVGLAAVVGFLFIVYLVLLANRLWCSKARAEDEEETTFRMESNLYQDQSEDKREKKEAKEKEEKRKKEKKTAKEGESNLGLDLEEKEPGDHERAKSTVM

SEQ ID NO: 1226 - protein, 80 aa, Homo sapiens
MSLIWRDVYLYGCGCICHGRCCAGFPQHSRHVWRTNAGLILPGNRVPFCELEGCTRRSSYWNHLVILGGHWGLHLPCTSL

SEQ ID NO: 1227 - protein, 49 aa, Homo sapiens
MFPWCVCVIACISAVTPLIQGFTFCSFSYPQYSTVRYFERETTLTLLLL

SEQ ID NO: 1228 - protein, 50 aa, Homo sapiens [sequence omitted]

SEQ ID NO: 1229 - protein, 280 aa, Homo sapiens
MAPSGSLAVPLAVLVLLLWGAPWTHGRRSNVRVITDENWRELLEGDWMIEFYAPWCPACQNLQPEWESFAEWGEDLEVNIAKVDVTEQPGLSGRFIITALPTIYHCKDGEFRRYQGPRTKKDFINFISDKEWKSIEPVSSWFGPGSVLMSSMSALFQLSMWIRTCHNYFIEDLGLPVWGSYTVFALATLFSGLLLGLCMIFVADCLCPSKRRRPQPYPYPSKKLLSESAQPLKKVEEEQEADEEDVSEEEAESKEGTNKDFPQNAIRQRSLGPSLATDKS

SEQ ID NO: 1230 - protein, 80 aa, Homo sapiens
MLTGSHPQTHTCWLGTRLWVVLSCLASLTVSDCPEHQVSSCISSWPGEHSVSFQPFPPFPHSLGGTEVGVEESQMAGVGI

SEQ ID NO: 1231 - protein, 110 aa, Homo sapiens
MYVTLVFRVKGSRLVKPSLCLALLCPAFLVGVVRVAEYRNHWSDVLAGFLTGAAIATFLVTCVVHNFQSRPPSGRRLSPQSAYPRLPGPQFPHLHNGGDHPCPAGCQERL

SEQ ID NO: 1232 - protein, 318 aa, Homo sapiens
MAKRTFSNLETFLIFLLVMMSAITVALLSLLFITSGTIENHKDLGGHFFSTTQSPPATQGSTAAQRSTATQHSTATQSSTATQTSPVPLTPESPLFQNFSGYHIGVGRADCTGQVADINLMGYGKSGQNAQGILTRLYSRAFIMAEPDGSNRTVFVSIDIGMVSQRLRLEVLNRLQSKYGSLYRRDNVILSGTHTHSGPAGYFQYTVFVIASEGFSNQTFQHMVTGILKSIDIPHTNMKPGKIFINKGNVDGVQINRSPYSYLQNPQSERARYSSNTDKEMIVLKMVDLNGDDLGLISFSFSKSALGTYYEPRNTSLE

SEQ ID NO: 1233 - protein, 55 aa, Homo sapiens
MPGGRDGLLYLYHGYSALLLWPVAFLHLLFLILLGMCFACCIPTSSAPLHTPWLA

SEQ ID NO: 1234 - protein, 163 aa, Homo sapiens; identical to SEQ ID NO: 1179

SEQ ID NO: 1235 - protein, 113 aa, Homo sapiens
  SITE (38): Xaa equals any of the naturally occurring L-amino acids
MRPLLLGGYWVLCLSVLGHAALYHFWLREEGKGPPQVXSVLALALPAGSCAPGLPFPGPLIPTQLLFALEWGTPTPLRDHPPHSMHSAPQNPPVFLGTHTCPPSWYFRLIPQA

SEQ ID NO: 1236 - protein, 275 aa, Homo sapiens
MTITSFYAVCFYLLMLVMVEGFGGKEAVLRTLRDTPMMVHTGPCCCCCPCCPRLLLTRKKLQLLMLGPFQYAFLKITLTLVGLFLIPDGIYDPADISEGSTALWINTFLGVSTLLALWTLGIISRQARLHLGEQNMGAKFALFQVLLILTALQPSIFSVLANGGQIACSPPYSSKTRSQVMNCHLLILETFLMTVLTRMYYRRKDHKVGYETFSSPDLDLNSKPKVDGLDNERMLYSLEYKIPLLSLNLDQMGSIPPCQHKLADTFDSTDEGEQC

SEQ ID NO: 1237 - protein, 87 aa, Homo sapiens
MDLTVEGFQSWMWRGLTFLLPFLFFGHFWQLFNALTLFNLAQDPQCKEWQVLMCGFPFLLLFLGNFFTTLRVVHHKFHSQRHGSKKD

SEQ ID NO: 1238 - protein, 161 aa, Homo sapiens
MALSLTLCFVMFWTPNVSEKILIDIIGVDFAFAELCVVPLRIFSFFPVPVTVRAHLTGWLMTLKKTFVLAPSSVLRIIVLIASLVVLPYLGVHGATLGVGSLLAGFVGESTMVAIAACYVYRKQKKKMENESATEGEDSAMTDMPPTEEVTDIVEMREENE

SEQ ID NO: 1239 - protein, 348 aa, Homo sapiens
MNMTQARVLVAAVVGLVAVLLYASIHKIEEGHLAVYYRGGALLTSPSGPGYHIMLPFITTFRSVQTTLQTDEVKNVPCGTSGGVMIYIDRIEVVNMLAPYAVFDIVRNYTADYDKTLIFNKIHHELNQFCSAHTLQEVYIELFDQIDENLKQALQKDLNLMAPGLTIQAVRVTKPKIPEAIRRNFELMEAEKTKLLIAAQKQKVVEKEAETERKKAVIEAEKIAQVAKIRFQQKVMEKETEKRISEIEDAAFLAREKAKADAEYYAAHKYATSNKHKLTPEYLELKKYQAIASNSKIYFGSNIPNMFVDSSCALKYSDIRTGRESSLPSKEALEPSGENVIQNKESTG

SEQ ID NO: 1240 - protein, 151 aa, Homo sapiens
MRRLLLVTSLVVVLLWEAGAVPAPKVPIKMQVKHWPSEQDPEKAWGARVVEPPEKDDQLVVLFPVQKPKLLTTEEKPRGQGRGPILPGTKAWMETEDTLGRVLSPEPDHDSLYHPPPEEDQGEERPRLWVMPNHQVLLGPEEDQDHIYHPQ

SEQ ID NO: 1241 - protein, 41 aa, Homo sapiens
MQVACVMKVSAQWVCFFVVFSPLCSSVKCASSGQNRGRGDQ

SEQ ID NO: 1242 - protein, 116 aa, Homo sapiens
MTPLLTLILVVLMGLPLAQALDCHVCAYNGDNCFNPMRCPAMVAYCMTTRTYYTPTRMKVSKSCVPRCFETVYDGYSKHASTTSCCQYDLCNGTGLATPATLALAPILLATLWGLL

SEQ ID NO: 1243 - protein, 21 aa, Homo sapiens
DLHIKLLEHYCLTSCKKVLQL

SEQ ID NO: 1244 - protein, 50 aa, Homo sapiens
MPGILAGIPVKDLCLSLLQGFRLLLLCVCPGWLSGWMGGQKGSPRIVDIG

SEQ ID NO: 1245 - protein, 206 aa, Homo sapiens
  SITE (143): Xaa equals any of the naturally occurring L-amino acids
MASHGLCPCLLMGTGWGLWTLLPDLEVMAGKGRMPFAGISVTSGFLRSLKRAPLPHTGSPDPRPSGIWSGVRTTSEEAGATSTQISTAAPRFHSRRKGPKRNLAPQLRVLVHRTVPPGQLVYAPQTVDSLRGTLLRPPAWLLXQVPCFYSGQPLLVSASVLCRDLMQFLFLLKSYLLPFLEVCRIGWEQIQRILGAGLWRQKEGNG

SEQ ID NO: 1246 - protein, 107 aa, Homo sapiens
  SITE (7): Xaa equals any of the naturally occurring L-amino acids
  SITE (9): Xaa equals any of the naturally occurring L-amino acids
  SITE (13): Xaa equals any of the naturally occurring L-amino acids
  SITE (95): Xaa equals any of the naturally occurring L-amino acids
MAVVLSXKXHRGXYCGRTSLLLSLLSCLLLLLLLLLLLLWSLSEIKTLKLICILSARDADGSRAKSHGFQIRYSAHSFQGHRFLKGPGFEEMANXEPSENLIWKTCM

SEQ ID NO: 1247 - protein, 181 aa, Homo sapiens [sequence omitted]

SEQ ID NO: 1248 - protein, 190 aa, Homo sapiens
MPVPTLCLLWALAMVTRPASAAPMGGPELAQHEELTLLFHGTLQLGQALNGVYRTTEGRLTKARNSLGLYGRTIELLGQEVSRGRDAAQELRASLLETQMEEDILQLQAEATAEVLGEVAQAQKVLRDSVQRLEVQLRSAWLGPAYREFEVLKAHADKQSHILWALTGHVQRQRREMVAQQHRLRQIQER

SEQ ID NO: 1249 - protein, 62 aa, Homo sapiens
MKSQSPLRSMLLVGGLVSVLAEHLQHPQSRQPPLSHLSSHLTWDAQVELDRIFLSIRPPEVP

SEQ ID NO: 1250 - protein, 28 aa, Homo sapiens
  SITE (3): Xaa equals any of the naturally occurring L-amino acids
MLXQFFLFVCFHFITYGFLCHTTRNFEK

SEQ ID NO: 1251 - protein, 42 aa, Homo sapiens
  SITE (7): Xaa equals any of the naturally occurring L-amino acids
  SITE (13): Xaa equals any of the naturally occurring L-amino acids
  SITE (22): Xaa equals any of the naturally occurring L-amino acids
MILFPQXALRLGXWPRTWSILXKYSVNFFSAYSPMGAVGTEF

SEQ ID NO: 1252 - protein, 55 aa, Homo sapiens
MLPSNWSGTWALIQLSIPFTLAFHQPNKNQLTQKKRKAPQGSFDPDIYIDAIGVP

SEQ ID NO: 1253 - protein, 43 aa, Homo sapiens
MFCFYLHFIFHVLSYKLNPLLFFSCSCFCFILVFLFPDYHLGM

SEQ ID NO: 1254 - protein, 319 aa, Homo sapiens
  SITE (264): Xaa equals any of the naturally occurring L-amino acids
  SITE (303): Xaa equals any of the naturally occurring L-amino acids
MNTDHLRLTVPNGIGALKLREMEHYFSQGLSVQLFNDGSKGKLNHLCGADFVKSHQKPPQGMEIKSNERCCSFDGDADRIVYYYHDADGHFHLIDGDKIATLISSFLKELLVEIGESLNIGVVQTAYANGSSTRYLEEVMKVPVYCTKTGVKHLHHKAQEFDIGVYFEANGHGTALFSTAVEMKIKQSAEQLEDKKRKAAKMLENIIDLFNQAAGDAISDMLVIEAILALKGLTVQQWDALYTDLPNRQLKVQVADRRVISTTXAERQAVTPPGLQEAINDLVKKYKLSRAFVRPSGTEDVVXSICRSRLTRKCRSPCT

SEQ ID NO: 1255 - protein, 187 aa, Homo sapiens
  SITE (167): Xaa equals any of the naturally occurring L-amino acids
MGFFLVLVMEQITLAYKEQSGPSPLEETRALLGTVNGGPQHWHDGPGVPQASGAPATPSALRACVLVFSLALHSVFEGLAVGLQRDRARAMELCLALLLHKGILAVSLSLRLLQSHLRAQVVAGCGILFSCMTPLGIGLGAALAESAGPLHQLAQSVLEGMAAGTFXYITFLEILLFHPKFKGVSRR

SEQ ID NO: 1256 - protein, 113 aa, Homo sapiens
MILSLLFSLGGPLGWGLLGAWAQASSTSLSDLQSSRTPGVWKAEAEDTSKDPVGRNWCPYPMSKLVTLLALCKTEKFLIHSQQPCPQELQTARKSKSCTAWPTSQCTRSSRRC

SEQ ID NO: 1257 - protein, 140 aa, Homo sapiens
  SITE (36): Xaa equals any of the naturally occurring L-amino acids
MFLFGGFLMTLFGLFVSLVFLGQAFTIMLVYVWSRXNPYVRMNFFGLLNFQAPFLPWVLMGFSLLLGNSIIVDLLGIAVGHIYFFLEDVFPNQPGGIRILKTPSILKAIFDTPDEDPNYNPLPEERPGGFAWGEGQRLGG

SEQ ID NO: 1258 - protein, 278 aa, Homo sapiens
MQWLRVRESPGEATGHRVTMGTAALGPVWAALLLFLLMCEIPMVELTFDRAVASDCQRCCDSEDPLDPAHVSSASSSGRPHALPEIRPYINITILKGDKGDPGPMGLPGYMGREGPQGEPGPQGSKGDKGEMGSPGAPCQKRFFAFSVGRKTALHSGEDFQTLLFERVFVNLDGCFDMATGQFAAPLRGIYFFSLNVHSWNYKETYVHIMHNQKEAVILYAQPSERSIMQSQSVMLDLAYGDRVWVRLFKRQRENAIYSNDFDTYITFSGHLIKAEDD

SEQ ID NO: 1259 - protein, 354 aa, Homo sapiens
MWRLWPGSPLVPLSWLWPARAAFLSGPWTLPPCLPDPLLAVPKCCLTLGIHLLPAWPGPPVGGGCSQLHRGCCYPGMGCLNRDLCPPSLVSRRWGDQLLWSPDGSKILATTPSAVFRVWEAQMWTCERWPTLSGRCQTGCWSPDGSRLLFTVLGEPLIYSLSFPERCGEGKGCVGGAKSATIVADLSETTIQTPDGEERLGGEAHSMVWDPSGERLAVLMKGKPRVQDGKPVILLFRTRNSPVFELLPCGIIQGEPGAQPQLITFHLPSTKGPCSVWAGPQAELPTSRCTLSMPSFHVLAQCLGGPRNPLLGVEALFMTCPSLLRHPQPLPLGTLSQGHHLFCPTPHIPTSKNK

SEQ ID NO: 1260 - protein, 338 aa, Homo sapiens
MRKPAAGFLPSLLKVLLLPLAPAAAQDSTQASTPGSPLSPTEYERFFALLTPTWKAETTCRLRATHGCRNPTLVQLDQYENHGLVPDGAVCSNLPYASWFESFCQFTHYRCSNHVYYAKRVLCSQPVSILSPNTLKEIEASAEVSPTTMTSPISPHFTVTERQTFQPWPERLSNNVEELLQSSLSLGSQEQAPEHKQEQGVEHRQEPTQEHKQEEGQKQEEQEEEQEEEGKQEEGQGTKEGREAVSQLQTDSEPKFHSESLSSNPSSFAPRVREVESTPMIMENIQELIRSAQEIDEMNEIYDENSYWRNQNPGSLLQLPHTEPCWCCAIRSWRIPAS

SEQ ID NO: 1261 - protein, 60 aa, Homo sapiens
MIRIQFLHLFLWVGFIFRQPPSSYPQDGRDSPWSFPCRDRSPGNNTSIPSHETVLNFILT

SEQ ID NO: 1262 - protein, 63 aa, Homo sapiens [sequence omitted]

SEQ ID NO: 1263 - protein, 298 aa, Homo sapiens
  SITE (87): Xaa equals any of the naturally occurring L-amino acids
MFFFFDSVQVVFTICTAVLATIAFAFLLLPMCQYLTRPCSPQNKISFGCCGRFTAAELLSFSLSVMLVLIWVLTGHWLLMDALAMGXCVAMIAFVRLPSLKVSCLLLSGLLIYDVFWVFFSAYIFNSNVMVKVATQPADNPLDVLSRKLHLGPNVGRDVPRLSLPGKLVFPSSTGSHFSMLGIGDIVMPGLLLCFVLRYDNYKKQASGDSCGAPGPANISGRMQKVSYFHCTLIGYFVGLLTATVASRIHRAAQPALLYLVPFTLLPLLTMAYLKGDLRRMWSEPFHSKSSSSRFLEV

SEQ ID NO: 1264 - protein, 232 aa, Homo sapiens
  SITE (36): Xaa equals any of the naturally occurring L-amino acids
  SITE (67): Xaa equals any of the naturally occurring L-amino acids
  SITE (70): Xaa equals any of the naturally occurring L-amino acids
  SITE (71): Xaa equals any of the naturally occurring L-amino acids
  SITE (82): Xaa equals any of the naturally occurring L-amino acids
  SITE (92): Xaa equals any of the naturally occurring L-amino acids
MAISIPNRIFPITALTLLALVYSLVLLLPFYNCTEXTKYRRFPDWLDHWMLCRKQLGLVALGFAFLXVLXXLVIPIRYYVRXRLGNLTVTQXILKKENPFSTSSAWLSDSYVALGILGFFLFVLLGITSLPSVSNAVNWREFRFVQSKLGYLTLILCTAHTLVYGGKRFLSPSNLRWYLPAAYVLGLIIPCTVLVIKFVLIMPCVDNTLTRIRRAGKGTQNTRKSIEWKINI

SEQ ID NO: 1265 - protein, 58 aa, Homo sapiens
MEPWSWFFFFFFFFPQRTCGCALCVLFLFSIWGPHGKELLNSFLYELPLCSYKGPFLS

SEQ ID NO: 1266 - protein, 46 aa, Homo sapiens
MTLSLQLAELVHFVCAFQSQWTGVYPMMPPLKPTEPLCFACVPCRV

SEQ ID NO: 1267 - protein, 47 aa, Homo sapiens
MQSGRSWALKMVLLCNSCLGLGVGSVGPSMSSLFGAVLSETPGSSVY

SEQ ID NO: 1268 - protein, 77 aa, Homo sapiens
MSVWPRSTLLFCLLSLSTGLFLDKLGIIIPILLCGWKVKCDNDVCEMPAQCLEVLKNYLLPFLFLPTTYPLPPGATC

SEQ ID NO: 1269 - protein, 83 aa, Homo sapiens
MASPGWHLSCRPTGLVSIFLLCAPAYLHSFVMTSITLISTKICSPTKLRHRTHFLYGSIMELYPTLTFPMTTDVENLNLDSSR

SEQ ID NO: 1270 - protein, 222 aa, Homo sapiens [sequence omitted]

SEQ ID NO: 1271 - protein, 70 aa, Homo sapiens
MFSRLHFLTHSLSLLHLPSQVFGEVHSSCVSSLPCPDTPALPYCPSFLRYDDHIEAQPLKHINTNDHISI

SEQ ID NO: 1272 - protein, 73 aa, Homo sapiens
  SITE (24): Xaa equals any of the naturally occurring L-amino acids
MGFWCGCPFCLLVFLLTVRTRSFXSVGVCWRSTPDPLCLGISSRSCRTADIGEQQMLLPDRSSGSFVSEYPAM

SEQ ID NO: 1273 - protein, 88 aa, Homo sapiens
MVAGFVFYLGVFVVCHQLSSSLNATYRSLVAREKVFWDLAATRAVFGVQSTAAAVGSAGGPCAACRQGAWPAELVLVSHHDSNGILLL

SEQ ID NO: 1274 - protein, 713 aa, Homo sapiens
MLLATLLLLLLGGALAHPDRIIFPNHACEDPPAVLLEVQGTLQRPLVRDSRTSPANCTWLILGSKEQTVTIRFQKLHLACGSERLTLRSPLQPLISLCEAPPSPLQLPGGNVTITYSYAGARAPMGQGFLLSYSQDWLMCLQEEFQCLNHRCVSAVQRCDGVDACGDGSDEAGCSSDPFPGLTPRPVPSLPCNVTLEDFYGVFSSPGYTHLASVSHPQSCHWLLDPHDGRRLAVRFTALDLGFGDAVHVYDGPGPPESSRLLRSLTHFSNGKAVTVETLSGQAVVSYHTVAWSNGRGFNATYHVRGYCLPWDRPCGLGSGLGAGEGLGERCYSEAQRCDGSWDCADGTDEEDCPGCPPGHFPCGAAGTSGATACYLPADRCNYQTFCADGADERRCRHCQPGNFRCRDEKCVYETWVCDGQPDCADGSDEWDCSYVLPRKVITAAVIGSLVCGLLLVIALGCTCKLYAIRTQEYSIFAPLSRMEAEIVQQQAPPSYGQLIAQGAIPPVEDFPTENPNDNSVLGNLRSLLQILRQDMTPGGGPGARRRQRGRLMRRLVRRLRRWGLLPRTNTPARASEARSQVTPSAAPLEALDGGTGPAREGGAVGGQDGEQAPPLPIKAPLPSASTSPAPTTVPEAPGPLPSLPLEPSLLSGVVQALRGRLLPSLGPPGPTRSPPGPHTAVLALEDEDDVLLVPLAEPGVWVAEAEDEPLLT

SEQ ID NO: 1275 - protein, 340 aa, Homo sapiens
MALRLLRRAARGAAAAALLRLKASLAADIPRLGYSSSSHHKYIPRRAVLYVPGNDEKKIKKIPSLNVDCAVLDCEDGVAANKKNEARLRIVKTLEDIDLGPTEKCVRVNSVSSGLAEEDLETLLQSRVLPSSLMLPKVESPEEIQWFADKFSFHLKGRKLEQPMNLIPFVETAMGLLNFKAVCEETLKVGPQVGLFLDAVVFGGEDFRASIGATSSKETLDILYARQKIVVIAKAFGLQAVDLVYIDFRDGAGLLRQSREGAAMGFTGKQVIHPNQIAVVQEQFSPSPEKIKWAEELIAAFKEHQQLGKGAFTFQGSMIDMPLLKQAQNTVTLATSIKEK

SEQ ID NO: 1276 - protein, 77 aa, Homo sapiens
MGLWFPMLILTQRFVSCDSHPDPKHTHTHAHINTHTHRHVHTQTHMHTHIHTPWFEEKRDGNRHSTHAYSAPLCIGN

SEQ ID NO: 1277 - protein, 20 aa, Homo sapiens
MACCNPYKYYFYLSCSVCFL

SEQ ID NO: 1278 - protein, 82 aa, Homo sapiens
MKKVARLSSLGHVVWRLYARVLALITCIFWVLALIICIFTPQIFFKHLLHARPCSRYRRYNSKNTDLALMKLKLLRQADSDK

SEQ ID NO: 1279 - protein, 88 aa, Homo sapiens
  SITE (71): Xaa equals any of the naturally occurring L-amino acids
MSGSSLPRALALSLLLVSGSLLPGPGAAQNVKSTIWTGSEVENEVVKRKGKDRRKAAVVQGEKQDARLKEXNLCLRSIPENYKLFRKG

SEQ ID NO: 1280 - protein, 54 aa, Homo sapiens
MYRFFLCVDLSFQLLWVIPRSTVTGTYGKDIFSLAGNHHTVFQSSCTILHTHQH

SEQ ID NO: 1281 - protein, 266 aa, Homo sapiens
MWWFQQGLSFLPSALVIWTSAAFIFSYITAVTLHHIDPALPYISDTGTVAPEKCLFGAMLNIAAVLCIATIYVRYKQVHALSPEENVIIKLNKAGLVLGILSCLGLSIVANFQKTTLFAAHVSGAVLTFGMGSLYMFVQTILSYQMQPKIHGKQVFWIRLLLVIWCGVSALSMLTCSSVLHSGNFGTDLEQKLHWNPEDKGYVLHMITTAAEWSMSFSFFGFFLTYIRDFQKISLRVEANLHGLTLYDTAPCPINNERTRLLSRDI

SEQ ID NO: 1282 - protein, 97 aa, Homo sapiens
MILLLSLFQGVRGSLGSPGNRENKEKKVFISLVGSRGLGCSISSGPIQKPGIFISHVKPGSLSAEVGLEIGDQIVEVNGVDFSNLDHKELQLAGSCS

SEQ ID NO: 1283 - protein, 334 aa, Homo sapiens
MGIFPGIILIFLRVKFATAAVIVSGVSKHLHCISHQKSTTVSHEMSGLNWKPFVYGGLASIVAEFGTFPVDLTKTRLQVQGQSIDARFKEIKYRGMFHALFRICKEEGVLALYSGIAPALLRQASYGTIKIGIYQSLKRLFVERLEDETLLINMICGVVSGVISSTIANPTDVLKIRMQAQGSLFQGSMIGSFIDIYQQEGTRGLWRGVVPTAQRAAIVVGVELPVYDITKKHLILSGMMGDTILTHFVSSFTCGLAGALASNPVDVVRTRMMNQRAIVGHVDLYKGTVDGILKMWKHEGFFALYKGFWPNWLRLGPWNIIFFITYEQLKRLQI

SEQ ID NO: 1284 - protein, 49 aa, Homo sapiens
MNVFVGPLSVAIVIFCWITMYWVSIVMGQGRGQYTWRTILSTSTPSVCS

SEQ ID NO: 1285 - protein, 50 aa, Homo sapiens
MVCCGFFLLWSRVRSYMKLSGHRWSSSCPHHCYSKCGLHTSNGKSSVHTV

SEQ ID NO: 1286 - protein, 142 aa, Homo sapiens
MPGPCLSQQHPFLSLSLFPFCLWICLARVPGVRNICKTQPAPSQPSLLGLGLSHPAAGTTDAGTQSLPRSQHKCTSALWGLCPAQRPLLLPAHIHSSGHGAPQELQSHLSHRLPASASLSMMSPFSEAWTHPSLSLGPAPSH

SEQ ID NO: 1287 - protein, 57 aa, Homo sapiens [sequence omitted]

SEQ ID NO: 1288 - protein, 37 aa, Homo sapiens
MSSFTLGLLFLFIFTTAENYLILFQRKYCLVIFWGEF

SEQ ID NO: 1289 - protein, 77 aa, Homo sapiens
MQLCVIWFTVIFLSQSSRLVKEKISNTSGEKGRWPAIDVVALCPSRTAGISFPRHFLYVSCIVGCTNIICSFGFPGQ

SEQ ID NO: 1290 - protein, 92 aa, Homo sapiens [sequence omitted]

SEQ ID NO: 1291 - protein, 45 aa, Homo sapiens
  SITE (43): Xaa equals any of the naturally occurring L-amino acids
MSDKLSPSTVPLLLPVLFKVTILLQRVCPEDSPSSSVLPESVXRE

SEQ ID NO: 1292 - protein, 103 aa, Homo sapiens
MAFLLERSGTLLICSMWWHHGYSNITGTEGERRNLKRNKTNFRRFQDGRIGTAPVYSSQCERCRRWVISAFPTEQTAHQKIISHAWLGGSHAHGASLIASTAV

SEQ ID NO: 1293 - protein, 77 aa, Homo sapiens
MMLQIIHLNTLIKFFQCLKLFLHGTAGSGQKCLAYKFSQFPSIIPAAHKKVHHLLSPKCLPTECSQADNSSWDSAVW

SEQ ID NO: 1294 - protein, 49 aa, Homo sapiens
MAPRNQGSFSFGNFMLFLVLIERRYLPFLSPILFCCSTHNRSAVTATNL

SEQ ID NO: 1295 - protein, 73 aa, Homo sapiens
MHAYACVCACMLVCVCVCVCRALVIPTEQRHRRVAHGRTSDSTLPCTVKIWPSERGDGRGERGERRRGTDWRG

SEQ ID NO: 1296 - protein, 957 aa, Homo sapiens [sequence omitted]

SEQ ID NO: 1297 - protein, 221 aa, Homo sapiens
  SITE (51): Xaa equals any of the naturally occurring L-amino acids
MALALAALAAVEPACGSRYQQLQNEEESGEPEQAAGDAPPPYSSISAESAXYFDYKDESGFPKPPSYNVATTLPSYDEAERTKAEATIPLVPGRDEDFVGRDDFDDADQLRIGNDGIFMLTFFMAFLFNWIGFFLSFCLTTSAAGRYGAISGFGLSLIKWILIVRFSTYFPGYFDGQYWLWWVFLVLGFLLFLRGFINYAKVRKMPETFSNLPRTRVLFIY

SEQ ID NO: 1298 - protein, 48 aa, Homo sapiens
MCHFSALSFTFCVLPLAFSFLQKHCYFTHKFGQNVQYSHFRVSFQWKK

SEQ ID NO: 1299 - protein, 91 aa, Homo sapiens
  SITE (89): Xaa equals any of the naturally occurring L-amino acids
MMDFLRCVTAALIYFAISITAIAKYSDGASKAAGGSVPDTRAVCPSRSEMGRELGAAASREQGVSPVMHPIHPVHRCLASLLPSCLQLXST

SEQ ID NO: 1300 - protein, 68 aa, Homo sapiens [sequence omitted]

SEQ ID NO: 1301 - protein, 490 aa, Homo sapiens
MRPAFALCLLWQALWPGPGGGEHPTADRAGCSASGACYSLHHATMKRQAAEEACILRGGALSTVRAGAELRAVLALLRAGPGPGGGSKDLLFWVALERRRSHCTLENEPLRGFSWLSSDPGGLESDTLQWVEEPQRSCTARRCAVLQATGGVEPAGWKEMRCHLRANGYLCKYQFEVLCPAPRPGAASNLSYRAPFQLHSAALDFSPPGTEVSALCRGQLPISVTCIADEIGARWDKLSGDVLCPCPGRYLRAGKCAELPNCLDDLGGFACECATGFELGKDGRSCVTSGEGQPTLGGTGVPTRRPPATATSPVPQRTWPIRVDEKLGETPLVPEQDNSVTSIPEIPRWGSQSTMSTLQMSLQAESKATITPSGSVISKFNSTTSSATPQAFDSSSAVVFIFVSTAVVVLVILTMTVLGLVKLCFHESPSSQPRKESMGPPGLESDPEPAALGSSSAHCTNNGVKVGDCDLRDRAEGALLAESPLGSSDA

SEQ ID NO: 1302 - protein, 105 aa, Homo sapiens
MTHRRHCGLARWILMKIFCWRVSTVTSTAGALTNPHSCYTSVLKVGATGVGQSLSVWTMPGLLLEQFSTGVELLLSSSRFSNSMEYKNRLSSVEDRSSVVTCLKA

SEQ ID NO: 1303 - protein, 57 aa, Homo sapiens [sequence omitted]

SEQ ID NO: 1304 - protein, 68 aa, Homo sapiens [sequence omitted]

SEQ ID NO: 1305 - protein, 79 aa, Homo sapiens
  SITE (36): Xaa equals any of the naturally occurring L-amino acids
MRVFALLPPFHKSTVLSFLLFFLSFFFFRQGLAVSXRLECSGAIIAHCSLDLLDSSNPPALTSQLLRRPRQEDHLSPGG

SEQ ID NO: 1306 - protein, 66 aa, Homo sapiens [sequence omitted]

SEQ ID NO: 1307 - protein, 67 aa, Homo sapiens
MPLEGFCLVLDIGFLLVMLISLASECFTTCLDSFSTTEPGCKFYKLLHSVSLLNINFNVKSLLCSHI

SEQ ID NO: 1308 - protein, 40 aa, Homo sapiens
MSVYVNIMHIVIYIYLCVYMCVAQSHTHTQICIQMLPGLQ

SEQ ID NO: 1309 - protein, 33 aa, Homo sapiens
  SITE (21): Xaa equals any of the naturally occurring L-amino acids
MCLLAHLFCHHLLILLPVIEXLLCTRHWARGIL

SEQ ID NO: 1310 - protein, 249 aa, Homo sapiens
  SITE (147): Xaa equals any of the naturally occurring L-amino acids
  SITE (150): Xaa equals any of the naturally occurring L-amino acids
  SITE (196): Xaa equals any of the naturally occurring L-amino acids
  SITE (222): Xaa equals any of the naturally occurring L-amino acids
MVCVFMCIVGVCVACCACVYCGCLLSRAVERTSGKQPQHQGQARSAECMEAGQVGAWDEGSTEMQGCQGPWNQEPMIKATVHTALEAKDIFISQGLKSMGQGWAPGQDWGYRVDQSPSLPPGAYPHPFTSQVSPPQPLGELLLIPQXVAXVTLLPEASPHPLKHPLPAAHLQHSQRAPWPVSTGLSLLGGAGAEQXPGLGVPAPRSTPSPTASLFNLRQAVXLLSLTFPLCKMREGTAPSKPSFSLKPL

SEQ ID NO: 1311 - protein, 104 aa, Homo sapiens
MPLQLSGQYWISLLVFLSLQPFPQAAIPCALTDVGGSCVICHILLNCLCILFTLTAPSLSHVLLIKMSLSVCYEPGADLSDRAATGNKKLTRSTCLLMHSNKLC

SEQ ID NO: 1312 - protein, 127 aa, Homo sapiens
MQGSDAGHGGTHIYRALVQWPLAWVFYLSHAKTHWGEELRFSFRRKNLRLREAMRHETCQVTQLVAGKADSNLCLRDSETWFWPPLWAACSSLQATACRLSSPSKGLGASRECPWLASGRAALVSFL

SEQ ID NO: 1313 - protein, 113 aa, Homo sapiens
MGSWCICTLLLLLTDGQQGFYPQPFQAAPGRQQLWGGTNPWAVLIPESFLPYTLTVNYSPSCNFEFYLPKMRLAYICMSHSHCPYLGRDIIITLLNYCSSFLAELLAHLVYIA

SEQ ID NO: 1314 - protein, 51 aa, Homo sapiens [sequence omitted]

SEQ ID NO: 1315 - protein, 44 aa, Homo sapiens
MTKRRKPRYRFIFALYALRLVFLFRAVTNTDASRLRAKRGECPY

SEQ ID NO: 1316 - protein, 82 aa, Homo sapiens
  SITE (51): Xaa equals any of the naturally occurring L-amino acids
MLIALFCILFQILFSIPTRIFYIFLINKRVHIFTTYLMSEQKNHDWVRRTXKLHRVWLISGKMLLVADIKALIRWLWGPNPE

SEQ ID NO: 1317 - protein, 41 aa, Homo sapiens
MVCVRCVWYVWHVFGVYGNILWIRTCGLFKDLSFCALKSEM

SEQ ID NO: 1318 - protein, 40 aa, Homo sapiens [sequence omitted]

SEQ ID NO: 1319 - protein, 36 aa, Homo sapiens
MGCTALLLLFHLCVPCEPYGTHEKELVPGLYFLVYR

SEQ ID NO: 1320 - protein, 70 aa, Homo sapiens
  SITE (67): Xaa equals any of the naturally occurring L-amino acids
MVSFVGICLLLGSFFSPSLQGTIWHHPAKPDGSGHGLPSFAVIMGKQVVPTVYWRMPYPRRGGPGTXFAL

SEQ ID NO: 1321 - protein, 46 aa, Homo sapiens
MCIPEALGKNSLFLSSTFLWLLAFFGLWSHHSYLEGQHLQICFFFT

SEQ ID NO: 1322 - protein, 52 aa, Homo sapiens
MIFKLLIFRIFFHELALALCISNLVSLPWLSYFWCPEMQNLFLLDTHIWVLM

SEQ ID NO: 1323 - protein, 74 aa, Homo sapiens [sequence omitted]

SEQ ID NO: 1324 - protein, 34 aa, Homo sapiens
  SITE (27): Xaa equals any of the naturally occurring L-amino acids
MSVFLLITLALAILYIIRSIVFSLALXQNGSLQG

SEQ ID NO: 1325 - protein, 53 aa, Homo sapiens
MQPWAGLCPLLVLWISGHLHCISALLQERGVGVSLSSRSDACKAAHRIGTSSS

SEQ ID NO: 1326 - protein, 55 aa, Homo sapiens
MPRWLSLLALTSLTGILSGTLGFSPHGWSSPRRHLSPRPECPAASQTTCKSLGQH

SEQ ID NO: 1327 - protein, 59 aa, Homo sapiens
MTPSLLSEKLCSLFFVLLGIASAAFVSALWAWSSHTERLTAEPSSSITCLSPPWFFFPF

SEQ ID NO: 1328 - protein, 54 aa, Homo sapiens
MWPFLHLLNMPFTLTQVVASPSSCSNWKPQHPEMPPPQIHCTHVCLCMRVCARV

SEQ ID NO: 1329 - protein, 54 aa, Homo sapiens
  SITE (38): Xaa equals any of the naturally occurring L-amino acids
MPHIFVSGNFSLLALFLLSANFIVEVQSWLLLLLFFIXLGRSYNFYLLCDSIIF

SEQ ID NO: 1330 - protein, 21 aa, Homo sapiens
MQLVLFHRLIMPLFFARTLVD

SEQ ID NO: 1331 - protein, 44 aa, Homo sapiens
MCLGHAFCLLLSHSCRMHCTCYLCLFTVQVLPGKYNEGGEGQRN

SEQ ID NO: 1332 - protein, 48 aa, Homo sapiens
MFPGCILLCNLCMFFVLSFSMGIFAFYSLIRAMHVSRLDFNFATYFVA

SEQ ID NO: 1333 - protein, 46 aa, Homo sapiens [sequence omitted]

SEQ ID NO: 1334 - protein, 71 aa, Homo sapiens
  SITE (58): Xaa equals any of the naturally occurring L-amino acids
MKAIARACLLLSLLVLPHVVSEHLFWHHNPRHPVIWPFPPFHLISCSVSASTWHLGEXLLLLVPIAPSVWS

SEQ ID NO: 1335 - protein, 51 aa, Homo sapiens
MRHVAIVTMIVVLSPPVLASSLKPPLFIDTYFMFGKRCSRWDTLPAPNNSY

SEQ ID NO: 1336 - protein, 36 aa, Homo sapiens
MAGHPTLILLCKWAFHLTGAICEPYLNQTLPTQACL

SEQ ID NO: 1337 - protein, 180 aa, Homo sapiens
MYSCLLLPDLLYLTLSPLVVAMLLTPHFNVANPQNLLAGLWLENEHSFTLMAPERARTHHCQPEERKVLFCLFPIVPNSQAQVQPPQMPPFCCAAAKEKTQEEQLQEPLGSQCPDTCPNSLCPSHTQLTKANTLSLFFFFSFFLSRVSLLSPRLECNGRILAHCNLHLPGSSNSPVSASR

SEQ ID NO: 1338 - protein, 78 aa, Homo sapiens
  SITE (40): Xaa equals any of the naturally occurring L-amino acids
  SITE (46): Xaa equals any of the naturally occurring L-amino acids
  SITE (60): Xaa equals any of the naturally occurring L-amino acids
MMGNDLLHLVFLQLSLGVASGGWILWPLRRLGGAHTSKDXNKNGHXVHCLVITNEPLVSXKKIGLSSPHTCPSTLQQF

SEQ ID NO: 1339 - protein, 52 aa, Homo sapiens
MYYLGKWDIWQPVSLLYIILFAACPSLLISIPAKASGEGWRCGDIQLTVVTD

SEQ ID NO: 1340 - protein, 80 aa, Homo sapiens
MALWVTCILSLCTWFSCLYGADSLANKCLSAGATRKAFPFCVLFRDLEVGLGFEGFVTHLACKLFCYCELSDSALSLGHE

SEQ ID NO: 1341 - protein, 51 aa, Homo sapiens [sequence omitted]

SEQ ID NO: 1342 - protein, 40 aa, Homo sapiens
MRLLKNVLTQMLIISFSTCSCLFSLFCAVITECLKLGNLY

SEQ ID NO: 1343 - protein, 58 aa, Homo sapiens
MRRMRMKSLSPRRSWWTLWLGQGVLGAALKANTLWIAMRRRMMMMGGPANMTSWPQRM

SEQ ID NO: 1344 - protein, 402 aa, Homo sapiens
MYSGNRSGGHGYWDGGGAAGAEGPAPAGTLSPAPLFSPGTYERLALLLGSIGLLGVGNNLLVLVLYYKFQRLRTPTHLLLVNISLSDLLVSLFGVTFTFVSCLRNGWVWDTVGCVWDGFSGSLFGIVSIATLTVLAYERYIRVVHARVINFSWAWRAITYIWLYSLAWAGAPLLGWNRYILDVHGLGCTVDWKSKDANDSSFVLFLFLGCLVVPLGVIAHCYGHILYSIRMLRCVEDLQTIQVIKILKYEKKLAKMCFLMIFTFLVCWMPYIVICFLVVNGHGHLVTPTISIVSYLFAKSNTVYNPVIYVFMIRKFRRSLLQLLCLRLLRCQRPAKDLPAAGSEMQIRPIVMSQKDGDRPKKKVTFNSSSIIFIITSDESLSVDDSDKTNGSKVDVIQVRPL

SEQ ID NO: 1345 - protein, 218 aa, Homo sapiens
  SITE (168): Xaa equals any of the naturally occurring L-amino acids
  SITE (174): Xaa equals any of the naturally occurring L-amino acids
  SITE (198): Xaa equals any of the naturally occurring L-amino acids
  SITE (213): Xaa equals any of the naturally occurring L-amino acids
MRALLALCLLLGWLRWGPAGAQQSGEYCHGWVDVQGNYHEGFQCPEDFDTLDATICCGSCALRYCCAAADARLEQGGCTNDRRELEHPGITAQPVYVPFLIVGSIFIAFIILGSVVAIYCCTCLRPKEPSQQPIRFSLRSYQTETLPMILTSTSPRAPSRQSSTATSXSFTGGXIRRFFSAIWFPGVTPVFRLPPSAXAPTGWEELSRLSVPXDTPRP

SEQ ID NO: 1346 - protein, 76 aa, Homo sapiens [sequence omitted]

SEQ ID NO: 1347 - protein, 89 aa, Homo sapiens
MPVPLLASAAWCHLCAGALPAWLWLPWRAAAAQWHVCASHCLPLHPAFSALGPHPDPGRAGPGAAPRDCAHPELHPLCLPRWSLQLLPR

SEQ ID NO: 1348 - protein, 104 aa, Homo sapiens
MLFCILLYTLGSARCHHLSFFLWGWSNPPEKTPLASWRGVKARLPGPGCQLLGAAGAEAGSCQAFSQQDALSTHLGFRIPLPHLQMGQMSPKPAAPFCFTLSTE

SEQ ID NO: 1349 - protein, 40 aa, Homo sapiens
METQICLTQIVALFFLRLVLGKLTCFLYGKLVLVEAFILA

SEQ ID NO: 1350 - protein, 87 aa, Homo sapiens
MMTFFGSHILLFLFCPLKAGHRHLVSSSFLTVAVSISKGPFFHSTAQKRKSRKQLPRPAFLVPLSSQNTQTRTKHHFSFLHLIVLQP

SEQ ID NO: 1351 - protein, 41 aa, Homo sapiens
MAVPLFLYIFTLLPLLPFLLSLCFSPLTVKRSSSSESKSSL

SEQ ID NO: 1352 - protein, 20 aa, Homo sapiens
MFIVALLILHWALGGTVMSK

SEQ ID NO: 1353 - protein, 35 aa, Homo sapiens
IYSSGYFQIYNMLLLTILILLCNRTPELIPGFYIR

SEQ ID NO: 1354 - protein, 106 aa, Homo sapiens
MVHIAIKTPLHPATPIPHRAFVPALAFLPFSFSSPLSSLKAVSCFQCDNTMMSFGRICQDRLILSPGCRMCMRQCCQAILFEALCCHNYHQVHTVGKRLTPDFRKC

SEQ ID NO: 1355 - protein, 40 aa, Homo sapiens
MVCFYALLLCFLSSVEIGPLSWLLCLSHIKCHFTALPFEA

SEQ ID NO: 1356 - protein, 43 aa, Homo sapiens
MHMPAAPVTVLKLLPFPCVCGLGWVPIGCVSIPSHLKGNLCCS

SEQ ID NO: 1357 - protein, 159 aa, Homo sapiens [sequence omitted]

SEQ ID NO: 1358 - protein, 59 aa, Homo sapiens
MLQQKTQFYSILWLCSIPWCVCTTFSLYSPPLMGTRVDFMSLNMCCNEKKHIFYKMIEV

SEQ ID NO: 1359 - protein, 165 aa, Homo sapiens
  SITE (56): Xaa equals any of the naturally occurring L-amino acids
MKIAVLFCFFLLIIFQTDFGKNEEIPRKQRRKIYHRRLRKSSTSHKHRSNRQLGIXQTTVFTPVARLPIVNFDYSMEEKFESFSSFPGVESSYNVLPGKKGHCLVKGITMYNKAVWSPEPCTTCLCSDGRVLCDETMCHPQRCPQTVIPEGECCPVCPLLVQSFS

SEQ ID NO: 1360 - protein, 333 aa, Homo sapiens
MSPWSWFLLQTLCLLPTGAASRRGAPGTANCELKPQQSELNSFLWTIKRDPPSYFFGTIHVPYTRVWDFIPDNSKEAFLQSSIVYFELDLTDPYTISALTSCQMLPQGENLQDVLPRDIYCRLKRHLEYVKLMMPLWMTPDQRGKGLYADYLFNAIAGNWERKRPVWVMLMVNSLTEVDIKSRGVPVLDLFLAQEAERLRKQTGAVEKVEEQCHPLNGLNFSQVIFALNQTLLQQESLRAGSLQIPYTTEDLIKHYNCGDLSSVILSHDSSQVPNFINATLPPQERITAQEIDSYLRRELIYKRNERIGKRVKALLEEFPDKGFFFAFGAASQ

SEQ ID NO: 1361 - protein, 226 aa, Homo sapiens
METVVIVAIGVLATIFLASFAALVLVCRQRYCRPRDLLQRYDSKPIVDLIGAMETQSEPSELELDDVVITNPHIEAILENEDWIEDASGLMSHCIAILKICHTLTEKLVAMTMGSGAKMKTSASVSDIIVVAKRISPRVDDVVKSMYPPLDPKLLDARTTALLLSVSHLVLVTRNACHLTGGLDWIDQSLSAAEEHLEVLREAALASEPDKGLPGPEGFLQEQSAI

SEQ ID NO: 1362 - protein, 117 aa, Homo sapiens [sequence omitted]

SEQ ID NO: 1363 - protein, 404 aa, Homo sapiens
MRLQDVYMLNVKGLARGVFQRVTGSAITDLYSPKRLFSLTGDDCFQVGKVAYDMGDYYHAIPWLEEAVSLFRGSYGEWKTEDEASLEDALDHLAFAYFRAGNVSCALSLSREFLLYSPDNKRMARNVLKYERLLAESPNHVVAEAVIQRPNIPHLQTRDTYEGLCQTLGSQPTLYQIPSLYCSYETNSNAYLLLQPIRKEVIHLEPYIALYHDFVSDSEAQKIRELAEPWLQRSVVASGEKQLQVEYRISKSAWLKDTVDLKLVTLNHRIAALTGLDVRPPYAEYLQVVNYGIGGHYEPHFDHATSPSSPLYRMKSGNRVATFMIYLSSVEAGGATAFIYANLSVPVVRNAALFWWNLHRSGEGDSDTLHAGCPVLVGDKWVANKWIHEYGQEFRRPCSSSPED

SEQ ID NO: 1364 - protein, 180 aa, Homo sapiens
MVVLFRWVPVTDAYWQILFSVLKVTRNLKELDLSGNSLSHSAVKSLCKTLRRPRCLLETLRLAGCGLTAEDCKDLAFGLRANQTLTELDLSFNVLTDAGAKHLCQRLRQPSCKLQRLQLVSCGLTSDCCQDLASVLSASPSLKELDLQQNNLDDVGVRLLCEGLSILPANSYAWGWTRQL

SEQ ID NO: 1365 - protein, 484 aa, Homo sapiens
MPRHLSGLLLLLWPLLLLLPPTPAAPGPLARPGLRRLGTRGPGGSPGRRPVSAVPTRAPYSGAGQPGGARGAGVCRSRPLDLVFIIDSSRSVRPLEFTKVKTFVSQIIDTLDIGAADTRVAVVNYASTVKIEFHLQTHSDKQSLKQAVARITPLSTGTMSGLAIQTAMDEAFTVEAGARGPTSNIPKVAIIVTDGRPQDQVNEVAARARASGIELYAVGVDRADMESLKMMASEPLDEHVFYVETYGVIEKLSSRFQETFCALDPCVLGTHRCQHVCVSDGEGKHHCECSQGYSLNADQKTCSAIDKCALNTHGCEHICVNDRTGSYHCECYEGYTLNQDRKTCSAQDQCAFGTHGCQHICVNDRDGSHHCECYEGYTLNADNKTCSVRSECAGGSHGCQHLCVDDGPAAYHCDCFPGYTLTEDRRTCAAIEEARRLVSTEDACGCEATLAFQERASSYLQRLNAKLDDILGKLQADAYGQIHR

SEQ ID NO: 1366 - protein, 410 aa, Homo sapiens
MQPPSLLLLVLGLLAAPAAALVRIPLHKFTSVRRTMSELGGPVEDLIARGPISKYAQGVPSVAGGPVPEVLRNYMDAQYYGEIGIGTPPQCFTVVFDTGSSNLWVPSIHCKLLDIACWIHHKYNSGKSSTYVKNGTSFDIHYGSGSLSGYLSQDTVSVPCKSGLSSLAGVKVERQTFGEATKQPGITFIAAKFDGILGMAYPRISVNNVLPVFDNLMQQKLVEKNIFSFYLNRDPGAQPGGELMLGGTDSKYYKGPLSYLNVTRKAYWQVHMEQVDVGSSLTLCKGGCEAIVDTGTSLIVGPVDEVRELQKAIGAVPLIQGEYMIPCEKVSTLPEVTLTLGGKPYKLSSEDYTLKVSQGGKSICLSGFMGMDIPPPGGPLWILGDVFIGRYYTVFDRDQNRVGLAEATRL

SEQ ID NO: 1367 - protein, 73 aa, Homo sapiens
  SITE (29): Xaa equals any of the naturally occurring L-amino acids
MLVLFKFLPLTSSGRFSSVTLYHRVHHQXVFSQEAKSFSPASTLNLYICSSQFQSLQKLYCGVIPVLRYASIE

SEQ ID NO: 1368 - protein, 627 aa, Homo sapiens
MEARVVHALQKRQVSLLCVFLGVSWAGAEPLRYFVAEETERGTFLANLAIDLGLGVEELSARGCRIVSDETIGFLLLNPLTGDLLLNEKLDREELCGPTEPCVLPFQLLLEKPFQIFRAELWVRDINDHSPVFLDREITLNILESTTPGATFLLESAHDSDVGINNLRNYTISSNVYFHINVHDNGEGNVYSELVLDKVLDREEVPELRLTLTGLDGGSPPRSGTTLIRILVLDINDNVPEFVESLYKVQVPENSPVGSLVVTVSARDLDTGSNGEIVYAFFYATERTLKTFRINSTSGNLHLKAELNYEAIQTYTLTIQAKDGGGLSGKCTVVVHVTDINDNPPELLMSSLTSPIPENSPETVVAVFRIRDRDSGNNAKMVCSIQDHLPFVLKPSVENFYTLVTERALDREERTEYNITITVTDLGTPRLKTQHNLTVTVSDVNDNAPTFSQTTYTLRVRENNSPALHIGSVSATDRDSGANAQVTYSLLPPHDPQLPLGSLVSINADNGQLFALRSLDFEALQAFEFRVGAADRGSPALSSQALVRVLVADANDNAPFVLYPLQNGSAPCTELVPRAAEAGYLVAKVVAVDGDSGQNAWLSYQLLKATEPGLFGVWAHNGEVRTA

SEQ ID NO: 1369 - protein, 82 aa, Homo sapiens
MLLLQSLFFPMSWGSGGGGKGRDDLPREKPTTCPVFDRLFDIFAKIPLVESQASCARIGIAASHWRLDCSVDGMQADCLSLI

SEQ ID NO: 1370 - protein, 363 aa, Homo sapiens
MKTLLLLVGLLLTWENGRVLGDQMVSDTELQEMSTEGSKYINREIKNALKGVKQIKTLIEQTNEERKSLLTNLEEAKKKKEDALNDTKDSEMKLKASQGVCNDTMMALWEECKPCLKQTCMKFYARVCRSSTGLVGHQVEEFLNQSSPFYFWINGDRIDSLLENDRQQTHALDVMQDSFDRASSIMDELFQDRFFTREAQDPFHFSPFSSFQRRPFFFNIKHRFARNIMPFPGYQPLNFHDMFQPFFDMIHQAQQAMDVNLHRLPHFPMEFTEEDNQDGAVCKEIRHNSTGCLKMKDQCEKCREILSVDCSSNNPAQVQLRQELNNSLQIAEKFTKLVRRAAAVLPGEDVQHVLPAEAAGRAV

SEQ ID NO: 1371 - protein, 129 aa, Homo sapiens
MAPSGPLLLVLLVPLAAARAGPYFRPGRGCRLPLRGDQLSGLGRRTYPRPHEYLSPSDLPKSWDWRNVNGVNYASATRNQHIPQYCGSCWAHGSTSAMAGPDQHQEKGGVALHPAVRAARPRLRQRGLL

SEQ ID NO: 1372 - protein, 55 aa, Homo sapiens
MREKTGALPRCLGLLGVGLLWRWCGRRARAGVGKAWSATRSPSDSCFPGVARVGI

SEQ ID NO: 1373 - protein, 522 aa, Homo sapiens
MAAAMPLALLVLLLLGPGGWCLAEPPRDSLREELVITPLPSGDVAATFQFRTRWDSELQREGVSHYRLFPKALGQLISKYSLRELHLSFTQGFWRTRYWGPPFLQAPSDTDHYFLRYAVLPREVVCTENLTPWKKLLPCSSKAGLSVLLKADRLFHTSYHSQAVHIRPVCRNARCTSISWELRQTLSVVFDAFITGQGKKDWSLFRMFSRTLTEPCPLASESRVYVDITTYNQDNETLEVHPPPTTTYQDVILGTRKTYAIYDLLDTAMINNSRNLNIQLKWKRPPENEAPPVPFLHAQRYVSGYGLQKGELSTLLYNTHPYRAFPVLLLDTVPWYLRLYVHTLTITSKGKENKPSYIHYQPAQDRLQPHLLEMLIQLPANSVTKVSIQFERALLKWTEYTPDPNHGFYVSPSVLSALVPSMVAAKPVDWEESPLFNSLFPVSDGSNYFVRLYTEPLLVNLPTPDFSMPYNVICLTCTVVAVCYGSFYNLLTRTFHIEEPRTGGLAKRLANLIRRARGVPPL

SEQ ID NO: 1374 - protein, 246 aa, Homo sapiens
  SITE (222): Xaa equals any of the naturally occurring L-amino acids
  SITE (223): Xaa equals any of the naturally occurring L-amino acids
  SITE (236): Xaa equals any of the naturally occurring L-amino acids
  SITE (242): Xaa equals any of the naturally occurring L-amino acids
  SITE (244): Xaa equals any of the naturally occurring L-amino acids
MGAAVFFGCTFVAFGPAFALFLITVAGDPLRVIILVAGAFFWLVSLLLASVVWFILVHVTDRSDARLQYGLLIFGAAVSVLLQEVFRFAYYKLLKKADEGLASLSEDGRSPISIRQMAYVSGLSFGIISGVFSVINILADALGPGVVGIHGDSPYYFLTSAFLTAAIILLHTFWGVVFFDACERRRYWALGLVVGSHLLTSGLTFLNPWYEASLLPSMQSLXXWGSGPSSQLEGPXKYSAQXLXKD

SEQ ID NO: 1375 - protein, 453 aa, Homo sapiens
MRMASIMVWVMIIMVILVLGYGIFHCYMEYSRLRGEAGSDVSLVDLGFQTDFRVYLHLRQTWLAFMIILSILEVIIILLLIFLRKRILIAIALIKEASRAVGYVMCSLLYPLVTFFLLCLCIAYWASTAVFLSTSNEAVYKIFDDSPCPFTAKTCNPETFPSSNESRQCPNARCQFAFYGGESGYHRALLGLQIFNAFMFFWLANFVLALGQVTLAGAFASYYWALRKPDDLPAFPLFSAFGRALRYHTGSLAFGALILAIVQIIRVILEYLDQRLKAAENKFAKCLMTCLKCCFWCLEKFIKFLNRNAYIMIAIYGTNFCTSARNAFFLLMRNIIRVAVLDKVTDFLFLLGKLLIVGSVGILAFFFFTHRIRIVQDTAPPLNYYWVPILTVIVGSYLIAHGFFSVYGMCVDTLFLCFLEDLERNDGSAERPYFMSSTLKKLLNKTNKKAAES

SEQ ID NO: 1376 - protein, 48 aa, Homo sapiens
MYVFFFLFSLVLHLNCPQSAPHQPCVTPSTHKTEQKTPSLSWSPLGMG

SEQ ID NO: 1377 - protein, 128 aa, Homo sapiens
  SITE (106): Xaa equals any of the naturally occurring L-amino acids
MGAAGRQDFLFKAMLTISWLTLTCFPGATSTVAAGCPDQSPELQPWNPGHDQDHHVHIGQGKTLLLTSSATVYSIHISEGGKLVIKDHDEPIVLRTRHILIDNGGXLHAGECPLPFPGQFHHHFVWKG

SEQ ID NO: 1378 - protein, 199 aa, Homo sapiens
  SITE (118): Xaa equals any of the naturally occurring L-amino acids
  SITE (120): Xaa equals any of the naturally occurring L-amino acids
MTSCGQQSLNVLAVLFSLLFSAVLSAHFRVCEPYTDHKGRYHFGFHCPRLSDNKTFILCCHHNNTVFKYCCNETEFQAVMQANLTASSEGYMHNNYTALLGVWIYGFFVLMLLVLDLXYXSAMNYDICKVYLARWGIQGRWMKQDPRRWGNPARAPRPGQRAPQPQPPPGPLPQAPQAVHTLRGDAHSPPLMTFQSSSA

SEQ ID NO: 1379 - protein, 184 aa, Homo sapiens
MSRTAYTVGALLLLLGTLLPAAEGKKKGSQGAIPPPDKAQHNDSEQTQSPQQPGSRNRGRGQGRGTAMPGEEVLESSQEALHVTERKYLKRDWCKTQPLKQTIHEEGCNSRTIINRFCYGQCNSFYIPRHIRKEEGSFQSCSFCKPKKFTTMMVTLNCPELQPPTKKKRVTRVKQCRCISIDLD

SEQ ID NO: 1380 - protein, 48 aa, Homo sapiens
MRPVLRRTFLLTLFSVIALTKIKHDFFIMCSHMQCIPRVFLKHEFNNI

SEQ ID NO: 1381 - protein, 494 aa, Homo sapiens
MRPPGFRNFLLLASSLLFAGLSAVPQSFSPSLRSWPGAACRLSRAESERRCRAPGQPPGAALCHGRGRCDCGVCICHVTEPGMFFGPLCECHEWVCETYDGSTCAGHGKCDCGKCKCDQGWYGDACQYPTNCDLTKKKSNQMCKNSQDIICSNAGTCHCGRCKCDNSDGSGLVYGKFCECDDRECIDDETEEICGGHGKCYCGNCYCKAGWHGDKCEFQCDITPWESKRRCTSPDGKICSNRGTCVCGECTCHDVDPTGDWGDIHGDTCECDERDCRAVYDRYSDDFCSGHGQCNCGRCDCKAGWYGKKCEHPQSCTLSAEESIRKCQGSSDLPCSGRGKCECGKCTCYPPGDRRVYGKTCECDDRRCEDLDGVVCGGHGTCSCGRCVCERGWFGKLCQHPRKCNMTEEQSKNLCESADGILCSGKGSCHCGKCICSAEEWYISGEFCDCDDRDCDKHDGLICTGNGICSCGNCECWDGWNGNACEIWLGSEYP

SEQ ID NO: 1382 - protein, 211 aa, Homo sapiens
MRLFLWNAVLTLFVTSLIGALIPEPEVKIEVLQKPFICHRKTKGGDLMLVHYEGYLEKDGSLFHSTHKHNNGQPIWFTLGILEALKGWDQGLKGMCVGEKRKLIIPPALGYGKEGKGKIPPESTLIFNIDLLEIRNGPRSHESFQEMDLNDDWKLSKDEVKAYLKKEFEKHGAVVNESHHDALVEDIFDKEDEDKDGFISAREFTYKHDEL

SEQ ID NO: 1383 - protein, 40 aa, Homo sapiens
MVAMVFLKISVLPLMCRGQTKHKVLRDHAYPRVSQKRGHI

SEQ ID NO: 1384 - protein, 102 aa, Homo sapiens
MWSSIRLLSPVLSLILLLIALELVNIHAVCGKNAHEYQQYLKFVKSILQYTENLVAYTSYEKNKWNETINLTHTALLKMWTFSEKKQMLIHLAKKSTSKVLL

SEQ ID NO: 1385 - protein, 624 aa, Homo sapiens
MEIPGSLCKKVKLSNNAQNWGMQRATNVTYQAHHVSRNKRGQVVGTRGGFRGCTVWLTGLSGAGKTTVSMALEEYLVCHGIPCYTLDGDNIRQGLNKNLGFSPEDREENVRRIAEVAKLFADAGLVCITSFISPYTQDRNNARQIHEGASLPFFEVFVDAPLHVCEQRDVKGLYKKARAGEIKGFTGIDSEYEKPEAPELVLKTDSCDVNDCVQQVVELLQERDIVPVDASYEVKELYVPENKLHLAKTDAETLPALKINKVDMQWVQVLAEGWATPLNGFMREREYLQCLHFDCLLDGGVINLSVPIVLTATHEDKERLDGCTAFALMYEGRRVAILRNPEFFEHRKEERCARQWGTTCKNHPYIKMVMEQGDWLIGGDLQVLDRVYWNDGLDQYRLTPTELKQKFKDMNADAVFAFQLRNPVHNGHALLMQDTHKQLLERGYRRPVLLLHPLGGWTKDDDVPLMWRMKQHAAVLEEGVLNPETTVVAIFPSPMMYAGPTEVQWHCRARMVAGANFYIVGRDPAGMPHPETGKDLYEPSHGAKVLTMAPGLITLEIVPFRVAAYNKKKKRMDYYDSEHHEDFEFISGTRMRKLAREGQKPPEGFMAPKAWTVLTEYYKSLEKA

SEQ ID NO: 1386 - protein, 967 aa, Homo sapiens
  SITE (40): Xaa equals any of the naturally occurring L-amino acids
  SITE (45): Xaa equals any of the naturally occurring L-amino acids
  SITE (169): Xaa equals any of the naturally occurring L-amino acids
  SITE (293): Xaa equals any of the naturally occurring L-amino acids
  SITE (297): Xaa equals any of the naturally occurring L-amino acids
  SITE (547): Xaa equals any of the naturally occurring L-amino acids
MQRAVPEGFGRRKLGSDMGNAERAPGSRSFGPVPTLLLLXAALLXVSDALGRPSEEDEELVVPELERAPGHGTTRLRLHAFDQQLDLELRPDSSFLAPGFTLQNVGRKSGSETPLPETDLAHCFYSGTVNGDPSSAAALSLCEGVRGAFYLLGEAYFIQPLPAASERLXTAAPGEKPPAPLQFHLLRRNRQGDVGGTCGVVDDEPRPTGKAETEDEDEGTEGEDEGPQWSPQDPALQGVGQPTGTGSIRKKRFVSSHRYVETMLVADQSMAEFHGSGLKHYLLTLFSVAARLXKHPXIRNSVSLVVVKILVIHDEQKGPEVTSNAALTLRNFCNWQKQHNPPSDRDAEHYDTAILFTRQDLCGSQTCDTLGMADVGTVCDPSRSCSVIEDDGLQAAFTTAHELGHVFNMPHDDAKQCASLNGVNQDSHMMASMLSNLDHSQPWSPCSAYMITSFLDNGHGECLMDKPQNPIQLPGDLPGTSYDANRQCQFTFGEDSKHCPDAASTCSTLWCTGTSGGVLVCQTKHFPWADGTSCGEGKWCINGKCVXKTDRKHFDTPFHGSWGMWGPWGDCSRTCGGGVQYTMRECDNPVPKNGGKYCEGKRVRYRSCNLEDCPDNNGKTFREEQCEAHNEFSKASFGSGPAVEWIPKYAGVSPKDRCKLICQAKGIGYFFVLQPKVVDGTPCSPDSTSVCVQGQCVKAGCDRIIDSKKKFDKCGVCGGNGSTCKKISGSVTSAKPGYHDIITIPTGATNIEVKQRNQRGSRNNGSFLAIKAADGTYILNGDYTLSTLEQDIMYKGVVLRYSGSSAALERIRSFSPLKEPLTIQVLTVGNALRPKIKYTYFVKKKKESFNAIPTFSAWVIEEWGECSKSCELGWQRRLVECRDINGQPASECAKEVKPASTRPCADHPCPQWQLGEWSSCSKTCGKGYKKRSLKCLSHDGGVLSHESCDPLKKPKHFIDFCTMAECS

SEQ ID NO: 1387 - protein, 174 aa, Homo sapiens
MYVRFFFRLHSISSHPSGIVSLCLLFETLLQTYLPQLFYHLREIGAQPLRISFKWMVRAFSGYLATDQLLLLWDRILGYNSLEILAVLAAAVFAFRAVNLMEVTSLAAAENLAAHSEQFCTAPLFPELYRVQIPVLLNSGRKKSAVYWTPISFNRTKKLRLQGRTYNDGSWNIT

SEQ ID NO: 1388 - protein, 62 aa, Homo sapiens
  SITE (10): Xaa equals any of the naturally occurring L-amino acids
  SITE (25): Xaa equals any of the naturally occurring L-amino acids
  SITE (38): Xaa equals any of the naturally occurring L-amino acids
MQPAWLWLWXWELGWELVFGAILLXLQDGLFDSVLYCXHLYSGLFFPWIVNSLMSGSSQLMS

SEQ ID NO: 1389 - protein, 600 aa, Homo sapiens
MPLTLLILSCLAELTMAEAEGNASCTVSLGGANMAETHKAMILQLNPSENCTWTIERPENKSIRIIFSYVQLDPDGSCESENIKVFDGTSSNGPLLGQVCSKNDYVPVFESSSSTLTFQIVTDSARIQRTVFVFYYFFSPNISIPNCGGYLDTLEGSFTSPNYPKPHPELAYCVWHIQVEKDYKIKLNFKEIFLEIDKQCKFDFLAIYDGPSTNSGLIGQVCGRVTPTFESSSNSLTVVLSTDYANSYRGFSASYTSIYAENINTTSLTCSSDRMRVIISKSYLEAFNSNGNNLQLKDPTCRPKLSNVVEFSVPLNGCGTIRKVEDQSITYTNIITFSASSTSEVITRQKQLQIIVKCEMGHNSTVEIIYITEDDVIQSQNALGKYNTSMALFESNSFEKTILESPYYVDLNQTLFVQVSLHTSDPNLVVFLDTCRASPTSDFASPTYDLIKSGCSRDETCKVYPLFGHYGRFQFNAFKFLRSMSSVYLQCKVLICDSSDHQSRCNQGCVSRSKRDISSYKWKTDSIIGPIRLKRDRSASGNSGFQHETHAEETPNQPFNSVHLFSFMVLALNVVTVATITVRHFVNQRADYKYQKLQNY

SEQ ID NO: 1390 - protein, 119 aa, Homo sapiens [sequence omitted]

SEQ ID NO: 1391 - protein, 131 aa, Homo sapiens [sequence omitted]

SEQ ID NO: 1392 - protein, 49 aa, Homo sapiens
MKHSFLSSDLIWCVLSLLCLGVWFRETWTTLFGRTGLPRNQQCPRRKGL

SEQ ID NO: 1393 - protein, 97 aa, Homo sapiens
MSIMLLTFTLHFPSTLLSYLPENYVIPSLFSNLQHWICCVHSQLVTCFVFQRDNVSTEKRTLAHSNTSSATSHHLSPCTTGDGLPSSWGGQTHPLLH

SEQ ID NO: 1394 - protein, 15 aa, Homo sapiens
MSLALCLVPLVREGH

SEQ ID NO: 1395 - protein, 79 aa, Homo sapiens [sequence omitted]

SEQ ID NO: 1396 - protein, 47 aa, Homo sapiens [sequence omitted]

SEQ ID NO: 1397 - protein, 62 aa, Homo sapiens
MLLRHPLPVCFCFSFCPFPVSALSLLPIGLVREGAASPTQQLRLQRESLSSITHRVNIKEGH

SEQ ID NO: 1398 - protein, 211 aa, Homo sapiens
MVFLKFFCMSFFCHLCQGYFDGPLYPEMSNGTLHHYFVPDGDYEENDDPEKCQLLFRVSDHRRCSQGEGSQVGSLLSLTLREEFTVLGHQVEDAGRVLEGISKSISYDLDGEESYGKYLRRESHQIGDAYSNSDKSLTELESKFKQGQEQDSRQESRLNEDFLGMLVHTRSLLKETLDISVGLRDKYELLALTIRSHGTRLGRLKNDYLKV

SEQ ID NO: 1399 - protein, 51 aa, Homo sapiens [sequence omitted]

SEQ ID NO: 1400 - protein, 48 aa, Homo sapiens [sequence omitted]

SEQ ID NO: 1401 - protein, 80 aa, Homo sapiens
MFDRCRVTSCSCTCGAGAKWCTHVVALCLFRIHNASAVCLRAPVSESLSRLQRDQLQKFAQYLISELPQQVGEVGTPSCN

SEQ ID NO: 1402 - protein, 57 aa, Homo sapiens
MCWKPKCILLLSFVFQCVASSTFDPLGSERPWSQPQCPISFPLLITGCCWFSMSRVS

SEQ ID NO: 1403 - protein, 174 aa, Homo sapiens [sequence omitted]

SEQ ID NO: 1404 - protein, 59 aa, Homo sapiens
  SITE (37): Xaa equals any of the naturally occurring L-amino acids
MIGLTIIACFAVIVSAKRAVERHESLTSWNLAKKAKXREEAALAAQAKANDILSDKVFT

SEQ ID NO: 1405 - protein, 44 aa, Homo sapiens [sequence omitted]

SEQ ID NO: 1406 - protein, 48 aa, Homo sapiens
MCFPACLCSPLTCLLSVWKPGLAHAVVHCMLEPVEFARVVQYEAGHVL

SEQ ID NO: 1407 - protein, 37 aa, Homo sapiens
MNSLFWMILLPVSQDQVVEGLQGGFSQIHMRILRKHL

SEQ ID NO: 1408 - protein, 387 aa, Homo sapiens
  SITE (228): Xaa equals any of the naturally occurring L-amino acids
  SITE (359): Xaa equals any of the naturally occurring L-amino acids
MGAFLDKPKTEKHNAHGAGNGLRYGLSSMQGWRVEMEDAHTAVVGIPHGLEDWSFFAVYDGHAGSRVANYCSTHLLEHITTNEDFRAAGKSGSALELSVENVKNGIRTGFLKIDEYMRNFSDLRNGMDRSGSTAVGVMISPKHIYFINCGDSRAVLYRNGQVCFSTQDHKPCNPREKERIQNAGGSVMIQRVNGSLAVSRALGDYDYKCVDGKGPTEQLVSPEPEVYXILRAEEDEFIILACDGIWDVMSNEELCEYVKSRLEVSDDLENVCNWVVDTCLHKGSRDNMSIVLVCFSNAPKVSDEAVKKDSELDKHLESRVEEIMEKSGEEGMPDLAHVMRILSAENIPNLPPGGGLAGXRNVIEAVYSRLNPHRESDGGAGDLEDPW

SEQ ID NO: 1409 - protein, 190 aa, Homo sapiens [sequence omitted]

SEQ ID NO: 1410 - protein, 49 aa, Homo sapiens
MGVGVLRILLSCLGEAAPKSAGTSLESAKECWSAATLLVLCVLCQLQHG

SEQ ID NO: 1411 - protein, 80 aa, Homo sapiens [sequence omitted]

SEQ ID NO: 1412 - protein, 44 aa, Homo sapiens
MHLLLINFLPAVCIILLKNLQQALCFAQLFIMSINQGLGPNEMS

SEQ ID NO: 1413 - protein, 52 aa, Homo sapiens
MQRLGKAPGTWQAISKCWLLLLLSLPFSQSIIISLRAGTMSYLPLYFPQYFP

SEQ ID NO: 1414 - protein, 54 aa, Homo sapiens
MKTHLLMFLLSCMARCTGIVPKRPQPAFPLRGRRRKNSFLFLLSFSIEFLLCVW

SEQ ID NO: 1415 - protein, 47 aa, Homo sapiens
MINEWCFKLLSLWSFAYSNCKLIHKCKFVFLKKKKTGKEVSVKGSKL

SEQ ID NO: 1416 - protein, 159 aa, Homo sapiens
MLLLLIFWIAPAHGPTNIMVYISICSLLGSFTVPSTKGIGLAAQDILHNNPSSQRALCLCLVLLAVLGCSIIVQFRYINKALECFDSSVFGAIYYVVFTTLVLLASAILFREWSNVGLVDFLGMACGFTTVSVGIVLIQVFKEFNFNLGEMNKSNMKTD

SEQ ID NO: 1417 - protein, 102 aa, Homo sapiens
MTVRRLSLLCRDLWALWLLLKAGAVRGARAGPRLPGRCCGATCGDAGRGWTFWAQPCPQRLLGQKPGAGGCRGWVLGWVPPRPEEPCSLAGKVCTGLARWMV

SEQ ID NO: 1418 - protein, 53 aa, Homo sapiens
  SITE (11): Xaa equals any of the naturally occurring L-amino acids
MCKAVCKHRLXLFAVSSFSLGLGWVCVLVLMLWPVRLSLAPRPVQLQQRRSHC

SEQ ID NO: 1419 - protein, 575 aa, Homo sapiens
MRVLVVTIAPIYWALARESGEALNGHSLTGGRFRQESHVEFATGELLTMTQVARGLDPDGLLLLDVVVNGVVPESLADADLQVQDFEEHYVQTGPGQLFVGSTQRFFQGGLPSFLRCNHSIQYNAARGPQPQLVQHLRASAISSAFDPEAEALRFQLATALQAEENEVGCPEGFELDSQGAFCVDVDECAWDAHLCREGQRCVNLLGSYRCLPDCGPGFRVADGAGCEDVDECLEGLDDCHYNQLCENTPGGHRCSCPRGYRMQGPSLPCLDVNECLQLPKACAYQCHNLQGSYRCLCPPGQTLLRDGKACTSLERNGQNVTTVSHRGPLLPWLRPWASIPGTSYHAWVSLRPGPMALSSVGRAWCPPGFIRQNGVCTDLDECRVRNLCQHACRNTEGSYQCLCPAGYRLLPSGKNCQDINECEEESIECGPGQMCFNTRGSYQCVDTPCPATYRQGPSPGTCFRRCSQDCGTGGPSTLQYRLLPLPLGVRAHHDVARLTAFSEVGVPANRTELSMLEPDPRSPFALRPLRAGLGAVYTRRALTRAGLYRLTVRAAAPRHQSVFVLLIAVSPYPY

SEQ ID NO: 1420 - protein, 276 aa, Homo sapiens
  SITE (94): Xaa equals any of the naturally occurring L-amino acids
  SITE (103): Xaa equals any of the naturally occurring L-amino acids
MIHVNRNIMDFKLFLVFVAGVFLFFYARTLESKPYFLLLLGNCARCSNDIVFVLLLVKRFIRSIAPFGALMVGCWFASVYIVCQLMEDLKWLWXENRIYVSGXVLIVGFFSFVVCYKHGPLAHDRSRSLLMWMLRLLSLVLVYAGVAVPQFAYAAIILLMSSWSLHYPLRACSYMRWKMEQWFTSKELVVKYLTEDEYREQADAETNSALEELRRACRKPDFPSWLVVSRLHTPSKFADFVLGGSHLSPEEISLHEEQYGLGGAFLEEQLFNPSTA

SEQ ID NO: 1421 - protein, 83 aa, Homo sapiens
MKKVCWVWALAHLVLCERWLTAGCLLYVGVIQPCKGSPSSVCKARRCLHPKYRIKRYGYYKYSVRLIICHHHPHALKAELTDD

SEQ ID NO: 1422 - protein, 192 aa, Homo sapiens
MEALLQSLVIVLLGFKSFLSEELGSEVLNLLTNKQYELLSKNLRKTRELFVHGLPGSGKTILALRIMEKIRNVFHCEPANILYICENQPLKKLVSFSKKNICQPVTRKTFMKNNFEHIQHIIIDDAQNFRTEDGDWYGKAKFITQTARDGPGVLWIFLDYFQTYHLSCSASPLPQTSIQEKRSTEWSAMQVQ

SEQ ID NO: 1423 - protein, 58 aa, Homo sapiens [sequence omitted]

SEQ ID NO: 1424 - protein, 41 aa, Homo sapiens
MKILILFIFIPGLLVEKNGPDHVCVCMCVRVCVCAHLGLFI

SEQ ID NO: 1425 - protein, 83 aa, Homo sapiens [sequence omitted]

SEQ ID NO: 1426 - protein, 49 aa, Homo sapiens
MVRSSSHFKFFLMLFTSTLQDVGHTSHPSAQPSSRLSDSPLICLINRQV

SEQ ID NO: 1427 - protein, 100 aa, Homo sapiens
  SITE (92): Xaa equals any of the naturally occurring L-amino acids
  SITE (96): Xaa equals any of the naturally occurring L-amino acids
MFVAVFYWVLTVFFLIIYITMTYTRIPQVPWTTVGLCFNGSAFVLYLSAAVVDASSVSPEKDSHNFNSWAASSFFAFLVTICYAGNTYFSFXAWRXRTIQ

SEQ ID NO: 1428 - protein, 40 aa, Homo sapiens
MLPVCVFKLLLYLYVLIRICTIIWCFKVYINAVILNKSSR

SEQ ID NO: 1429 - protein, 142 aa, Homo sapiens [sequence omitted]

SEQ ID NO: 1430 - protein, 57 aa, Homo sapiens
MVYRAFLIIILRFILIFLFKLNYSKLCPEIPFGLKFFSFVCIKVQIKKTSRKRRPYL

SEQ ID NO: 1431 - protein, 74 aa, Homo sapiens
MTNVYSLDGILVFGLLFVCTCAYFKKVPRLKTWLLSEKKGVWGVFYKAAVIGTRLHAAVAIACVVMAFYVLFIK

SEQ ID NO: 1432 - protein, 45 aa, Homo sapiens [sequence omitted]

SEQ ID NO: 1433 - protein, 63 aa, Homo sapiens
MCYFLEISLLMVFALNIKAAYGCCNINGTEVHRAKGPVSVPFPLSRPLSGTPLLDRLRPFQTL

SEQ ID NO: 1434 - protein, 262 aa, Homo sapiens
MLFSALLLEVIWILAADGGQHWTYEGPHGQDHWPASYPECGNNAQSPIDIQTDSVTFDPDLPALQPHGYDQPGTEPLDLHNNGHTVQLSLPSTLYLGGLPRKYVAAQLHLHWGQKGSPGGSEHQINSEATFAELHIVHYDSDSYDSLSEAAERPQGLAVLGILIELEKLQGTLFSTEEEPSKLLVQNYRALQPLNQRMVFASFIQAGSSYTTGEMLSLGVGILVGCLCLLLAVYFIARKIRKKRLENRKSVVFTSAQATTEA

SEQ ID NO: 1435 - protein, 399 aa, Homo sapiens
MGILLGLLLLGHLTVDTYGRPILEVPESVTGPWKGDVNLPCTYDPLQGYTQVLVKWLVQRGSDPVTIFLRDSSGDHIQQAKYQGRLHVSHKVPGDVSLQLSTLEMDDRSHYTCEVTWQTPDGNQVVRDKITELRVQKLSVSKPTVTTGSGYGFTVPQGMRISLQCQARGSPPISYIWYKQQTNNQEPIKVATLSTLLFKPAVIADSGSYFCTAKGQVGSEQHSDIVKFVVKDSSKLLKTKTEAPTTMTYPLKATSTVKQSWDWTTDMDGYLGETSAGPGKSLPVFAIILIISLCCMVVFTMAYIMLCRKTSQQEHVYEAARAHAREANDSGETMRVAIFASGCSSDEPTSQNLGNNYSDEPCIGQEYQIIAQINGNYARLLDTVPLDYEFLATEGKSVC

SEQ ID NO: 1436 - protein, 71 aa, Homo sapiens
MPAGVPMSTYLKMFAASLLAMCAGAEVVHRYYRPDLTIPEIPPKRGELKTELLGLKERKHKPQVSQQEELK

SEQ ID NO: 1437 - protein, 122 aa, Homo sapiens
MYRAIDSFPRWRSYFYFITLIFFLAWLVKNVFIAVIIETFAEIRVQFQQMWGSRSSTTSTATTQMFHEDAAGGWQLVAVDVNKPQGRAPACLQVQYNDIFKNRPAKVFEFYFIQENPQLFKL

SEQ ID NO: 1438 - protein, 70 aa, Homo sapiens
MLFWKFGSFLFFCLPLTLFCILNERGIMHLEGGTLLNSLSHVRHYLRLRLSCFEKIPLHRSIFIFLLLLL

SEQ ID NO: 1439 - protein, 152 aa, Homo sapiens [sequence omitted]

SEQ ID NO: 1440 - protein, 52 aa, Homo sapiens
MPSLNLVLRPLICLASITSFLIFFPLLTLILCSPNSPPFPLPAHPERHTHTQ

SEQ ID NO: 1441 - protein, 217 aa, Homo sapiens
MASKMKDTGFIVFAVLLLVSCLILIFVIAPRYGQRNILIYIIICSVIGAFSVAAVKGLGITIKNFFQGLPVVRHPLPYILSLILALSLSTQVNFLNRALDIFNTSLVFPIYYVFFTTVVVTSSIILFKEWYSMSAVDIAGTLSGFVTIILGVFMLHAFKDLDISCASLPHMHKNPPPSPAPEPTVIRLEDKNVLVDNIELASTSSPEEKPKVFIIHS

SEQ ID NO: 1442 - protein, 40 aa, Homo sapiens
MSVLSGFLFIVVVCCYCCFVARLQLTKYEFKNCVVIFRDL

SEQ ID NO: 1443 - protein, 135 aa, Homo sapiens
MGLWLGMLACVFLATAAFVAYTARLDWKLAAEEAKKHSGRQQQQRAESTATRPGPEKAVLSSVATGSSPGITLTTYSRSECHVDFFRTPEEAHALSAPTSRLSVKQLVIRRGAALGAASATLMVGLTVRILATRH

SEQ ID NO: 1444 - protein, 181 aa, Homo sapiens
MTVILIILIVVMARYCRSKNKNGYEAGKKDHEDFFTPQQHDKSKKPKKDKKNKKSKQPLYSSIVTVEASKPNGQRYDSVNEKLSDSPSMGRYRSVNGGPGSPDLARHYKSSSPLPTVQLHPQSPTAGKKHQAVQDLPPANTFVGAGDNISIGSDHCSEYSCQTNNKYSKQMRLHPYITVFG

SEQ ID NO: 1445 - protein, 61 aa, Homo sapiens [sequence omitted]

SEQ ID NO: 1446 - protein, 72 aa, Homo sapiens
MATILLKLPILSAMIKKPLRNYLKTSETTMEKIIIQKLVANLKFLPLGTLQLAMMIANLIKKLFFPLVKAAK

SEQ ID NO: 1447 - protein, 257 aa, Homo sapiens
MVSWMICRLVVLVFGMLCPAYASYKAVKTKNIREYVRWMMYWIVFALFMAAEIVTDIFISWFPFYYEIKMAFVLWLLSPYTKGASLLYRKFVHPSLSRHEKEIDAYIVQAKERSYETVLSFGKRGLNIAASAAVQAATKSQGALAGRLRSFSMQDLRSISDAPAPAYHDPLYLEDQVSHRRPPIGYRAGGLQDSDTEDECWSDTEAVPRAPARPREKPLIRSQSLRVVKRKPPVREGTSRSLKVRTRKKTVPSDVDS

SEQ ID NO: 1448 - protein, 256 aa, Homo sapiens [sequence omitted]

SEQ ID NO: 1449 - protein, 58 aa, Homo sapiens
MRTFLTFVILKVILIFLSSCASFTRNLLTWPNDVSTEQFETRPFGSELLQTVINVSRT

SEQ ID NO: 1450 - protein, 59 aa, Homo sapiens
MIIANIFMNPLLCAGYLFCFAYTLIHLILLTTSEVCSITAPFFTAVLQSSACPSTHWPE

SEQ ID NO: 1451 - protein, 182 aa, Homo sapiens
MWRPSVLLLLLLLRHGAQGKPSPDAGPHGQGRVHQAAPLSDAPHDDAHGNFQYDHEAFLGREVAKEFDQLTPEESQARLGRIVDRMDRAGDGDGWVSLAELRAWIAHTQQRHIRDSVSAAWDTYDTDRDGRVGWEELRNATYGHYAPGEEFHDVEDAETYKKMLARDERRFRVADQDGDSMA

SEQ ID NO: 1452 - protein, 286 aa, Homo sapiens
MAMEGYWRFLALLGSALLVGFLSVIFALVWVLHYREGLGWDGSALEFNWHPVLMVTGFVFIQGIAIIVYRLPWTWKCSKLLMKSIHAGLNAVAAILAIISVVAVFENHNVNNIANMYSLHSWVGLIAVICYLLQLLSGFSVFLLPWAPLSLRAFLMPIHVYSGIVIFGTVIATALMGLTEKLIFSLRDPAYSTFPPEGVFVNTLGLLILVFGALIFWIVTRPQWKRPKEPNSTILHPNGGTEQGARGSMPAYSGNNMDKSDSELNSEVAARKRNLALDEAGQRSTM

SEQ ID NO: 1453 - protein, 950 aa, Homo sapiens
MTWRMGPRFTMLLAMWLVCGSEPHPHATIRGSHGGRKVPLVSPDSSRPARFLRHTGRSRGIERSTLEEPNLQPLQRRRSVPVLRLARPTEPPARSDINGAAVRPEQRPAARGSPREMIRDEGSSARSRMLRFPSGSSSPNILASFAGKNRVWVISAPHASEGYYRLMMSLLKDDVYCELAERHIQQIVLFHQAGEEGGKVRRITSEGQILEQPLDPSLIPKLMSFLKLEKGKFGMVLLKKTLQVEERYPYPVRLEAMYEVIDQGPIRRIEKIRQKGFVQKCKASGVEGQVVAEGNDGGGGAGRPSLGSEKKKEDPRRAQVPPTRESRVKVLRKLAATAPALPQPPSTPRATTLPPAPATTVTRSTSRAVTVAARPMTTTAFPTTQRPWTPSPSHRPPTTTEVITARRPSVSENLYPPSRKDQHRERPQTTRRPSKATSLESFTNAPPTTISEPSTRAAGPGRFRDNRMDRREHGHRDPNVVPGPPKPAKEKPPKKKAQDKILSNEYEEKYDLSRPTASQLEDELQVGNVPLKKAKESKKHEKLEKPEKEKKKKMKNENADKLLKSEKQMKKSEKKSKQEKEKSKKKKGGKTEQDGYQKPTNKHFTQSPKKSVADLLGSFEGKRRLLLITAPKAENNMYVQQRDEYLESFCKMATRKISVITIFGPVNNSTMKIDHFQLDNEKPMRVVDDEDLVDQRLISELRKEYGMTYNDFFMVLTDVDLRVKQYYEVPITMKSVFDLIDTFQSRIKDMEKQKKEGIVCKEDKKQSLENFLSRFRWRRRLLVISAPNDEDWAYSQQLSALSGQACNFGLRHITILKLLGVGEEVGGVLELFPINGSSVVEREDVPAHLVKDIRNYFQVSPEYFSMLLVGKDGNVKSWYPSPMWSMVIVYDLIDSMQLRRQEMAIQQSLGMRCPEDEYAGYGYHSYHQGYQDGYQDDYRHHESYHHGYPY

SEQ ID NO: 1454 - protein, 247 aa, Homo sapiens
MHLARLVGSCSLLLLLGALSGWAASDDPIEKVIEGINRGLSNAEREVGKALDGINSGITHAGREVEKVFNGLSNMGSHTGKELDKGVQGLNHGMDKVAHEINHGIGQAGKEAEKLGHGVNNAAGQAGKEADKAVQGFHTGVHQAGKEAEKLGQGVNHAADQAGKEVEKLGQGAHHAAGQAGKELQNAHNGVNQASKEANQLLNGNHQSGSSSHQGGATTTPLASGASVNTPFINLPALWRSVANIMP

SEQ ID NO: 1455 - protein, 85 aa, Homo sapiens
MGCRGNKLFVLSYCTCLTWLLGTKSQKNPFQVCMSGGWAVSRLETGFQALHDGRASSPLSAACVLDRTVARRWKPPSVPLAHHTK

SEQ ID NO: 1456 - protein, 84 aa, Homo sapiens [sequence omitted]

SEQ ID NO: 1457 - protein, 42 aa, Homo sapiens
MFTLLLSSFFLQHCLQNNLYASEREQIFSNFLQLSSLKRRIC

SEQ ID NO: 1458 - protein, 41 aa, Homo sapiens
MLVSMCMGLLFLQVGKQCIAFFYTESTRRPKHLKTMGSGYA

SEQ ID NO: 1459 - protein, 97 aa, Homo sapiens
MCKLCFYLYLCTWFPFGASGLFWDKWCLPRHLPVVSGQEQLSSSLPAALLFLGRRWRPPLRVSPGLSFRGGRAGEPQGWGDSWEMEVAPAPLDQYWL

SEQ ID NO: 1460 - protein, 218 aa, Homo sapiens
MHFLFRFIVFFYLWGLFTAQRQKKEESTEEVKIEVLHRPENCSKTSKKGDLLNAHYDGYLAKDGSKFYCSRTQNEGHPKWFVLGVGQVIKGLDIAMTDMCPGEKRKVVIPPSFAYGKEGYAEGKIPPDATLIFEIELYAVTKGPRSIETFKQIDMDNDRQLSKAEINLYLQREFEKDEKPRDKSYQDAVLEDIFKKNDHDGDGFISPKEYNVYQHDEL

SEQ ID NO: 1461 - protein, 47 aa, Homo sapiens
MLTVKILKCFLGWAVVAGGLGRSQARPSLLFNRLSPSVPQMRIQQPW

SEQ ID NO: 1462 - protein, 50 aa, Homo sapiens
MAPLWTLRPVLVWTTPTSMGEVSPWLTSTVMAKWTSSMATGMAPTASICR

SEQ ID NO: 1463 - protein, 58 aa, Homo sapiens
MRISRCNISLEIVSPSILLTFLDLIILLWALASCYRRFTSFPALNLPDVNSTLHYLQQ

SEQ ID NO: 1464 - protein, 606 aa, Homo sapiens
MTVVGNPRSWSCQWLPILILLLGTGHGPGVEGVTHYKAGDPVILYVNKVGPYHNPQETYHYYQLPVCCPEKIRHKSLSLGEVLDGDRMAESLYEIRFRENVEKRILCHMQLSSAQVEQLRQAIEELYYFEFVVDDLPIRGFVGYMEESGFLPHSHKIGLWTHLDFHLEFHGDRIIFANVSVRDVKPHSLDGLRPDEFLGLTHTYSVRWSETSVERRSDRRRGDDGGFFPRTLEIHWLSIINSMVLVFLLVGFVAVILMRVLRNDLARYNLDEETTSAGSGDDFDQGDNGWKIIHTDVFRFPPYRGLLCAVLGVGAQFLALGTGIIVMALLGMFNVHRHGAINSAAILLYALTCCISGYVSSHFYRQIGGERWVWNIILTTSLFSVPFFLTWSVVNSVHWANGSTQALPATTILLLLTVWLLVGFPLTVIGGIFGKNNASPFDAPCRTKNIAREIPPQPWYKSTVIHMTVGGFLPFSAISVELYYIFATVWGREQYTLYGILFFVFAILLSVGACISIALTYFQLSGEDYRWWWRSVLSVGSTGLFIFLYSVFYYARRSNMSGAVQTVEFFGYSLLTGYVFFLMLGTISFFSSLKFIRYIYVNLKMD

SEQ ID NO: 1465 - protein, 62 aa, Homo sapiens [sequence omitted]

SEQ ID NO: 1466 - protein, 295 aa, Homo sapiens
MGLPVSWAPPALWVLGCCALLLSLWALCTACRRPEDAVAPRKRARRQRARLQGSATAAEASLLRRTHLCSLSKSDTRLHELHRGPRSSRALRPASMDLLRPHWLEVSRDITGPQAAPSAFPHQELPRALPAAAATAGCAGLEATYSNVGLAALPGVSLAASPVVAEYARVQKRKGTHRSPQEPQQGKTEVTPAAQVDVLYSRVCKPKRRDPGPTTDPLDPKGQGAILALAGDLAYQTLPLRALDVDSGPLENVYESIRELGDPAGRSSTCGAGTPPASSCPSLGRGWRPLPASLP

SEQ ID NO: 1467 - protein, 83 aa, Homo sapiens
MCLLVEYSLMILTIIPSLLSFVLCLKGIKHGNYIFQTPLPEGYGWISAMSGLCIKFGRRKRRKTWLLQVGTLATIDTEFARSC

SEQ ID NO: 1468 - protein, 56 aa, Homo sapiens
  SITE (32): Xaa equals any of the naturally occurring L-amino acids
MLSFFICLLIFVHLLLLSFLISDWPPPTGSAXHKILRLMVVQRLSLLDQRKRWSEA

SEQ ID NO: 1469 - protein, 51 aa, Homo sapiens
MLTSWIASIPSRCGVLCICLCFGLVHCLDLSRKITIFSGAVYMVKNIQFWL

SEQ ID NO: 1470 - protein, 88 aa, Homo sapiens
MLFLSASICTSALFLCLSRLTISAPHPAWWGRMPTHTSPGHLLELQPRGMTESILFSISALVSNSWGKMTQLTSGSHSWSSGLQNFQA

SEQ ID NO: 1471 - protein, 90 aa, Homo sapiens
MAIRLVFLALAGLVDGKPVWITLWMDAKRPNLAGTGSTWGSRRDSHCCHGPTAWSLPCLLCLFRAQQKDRERSLLGVPLPTLQGGNLSDG

SEQ ID NO: 1472 - protein, 267 aa, Homo sapiens
  SITE (22): Xaa equals any of the naturally occurring L-amino acids
  SITE (227): Xaa equals any of the naturally occurring L-amino acids
MLIAVGIHLLLLMFEVLVCDRXERGTHFWLLVFMPLFFVSPVSVAACVWGFRHDRSLELEILCSVNILQFIFIALKLDRIIHWPWLVVFVPLWILMSFLCLVVLYYIVWSLLFLRSLDVVAEQRRTHVTMAISWITIVVPLLTFEVLLVHRLDGHNTFSYVSIFVPLWLSLLTLMATTFRRKGGNHWWFGIRRDFCQFLLEIFPFLREYGNISYDLHHEDSEDAEEXSVPEAPKIAPIFGKKARVVITQSPGKYVPPPPKLNIDMPD

SEQ ID NO: 1473 - protein, 60 aa, Homo sapiens [sequence omitted]

SEQ ID NO: 1474 - protein, 57 aa, Homo sapiens
MCEGWLHPIFLYCCFWTTTPSCSAFGILDLHQQHPIPTPSSWFSGLCPWTELHHCLR

SEQ ID NO: 1475 - protein, 672 aa, Homo sapiens
MCSRVPLLLPLLLLLALGPGVQGCPSGCQCSQPQTVFCTARQGTTVPRDVPPDTVGLYVFENGITMLDAGSFAGLPGLQLLDLSQNQIASLPSGVFQPLANLSNLDLTANRLHEITNETFRGLRRLERLYLGKNRIRHIQPGAFDTLDRLLELKLQDNELRALPPLRLPRLLLLDLSHNSLLALEPGILDTANVEALRLAGLGLQQLDEGLFSRLRNLHDLDVSDNQLERVPPVIRGLRGLTRLRLAGNTRIAQLRPEDLAGLAALQELDVSNLSLQALPGDLSGLFPRLRLLAAARNPFNCVCPLSWFGPWVRESHVTLASPEETRCHFPPKNAGRLLLELDYADFGCPATTTTATVPTTRPVVREPTALSSSLAPTWLSPTAPATEAPSPPSTAPPTVGPVPQPQDCPPSTCLNGGTCHLGTRHHLACLCPEGFTGLYCESQMGQGTRPSPTPVTPRPPRSLTLGIEPVSPTSLRVGLQRYLQGSSVQLRSLRLTYRNLSGPDKRLVTLRLPASLAEYTVTQLRPNATYSVCVMPLGPGRVPEGEEACGEAHTPPAVHSNHAPVTQAREGNLPLLIAPALAAVLLAALAAVGAAYCVRRGRAMAAAAQDKGQVGPGAGPLELEGVKVPLEPGPKATEAVERPCPAGLSVKCHSWASKAWPQSPLHAKPYI

SEQ ID NO: 1476 - protein, 69 aa, Homo sapiens
  SITE (56): Xaa equals any of the naturally occurring L-amino acids
MYKAFLLALTTVFYLGILNSHFHGCVLCNTNVFKWYSHPVGQLSKRCLDASKLAYXKFTSIKYQCNYST

SEQ ID NO: 1477 - protein, 56 aa, Homo sapiens [sequence omitted]

SEQ ID NO: 1478 - protein, 434 aa, Homo sapiens
  SITE (381): Xaa equals any of the naturally occurring L-amino acids
MALTAPSLSLDARQLWDSPETAPAARTPQSPAPCVLLRAQRSLAPEPKEPLIPASPKAEPIWELPTRAPRLSIGDLDFSDLGEDEDQDMLNVESVEAGKDIPAPSPPLPLLSGVPPPPPLPPPPPIKGPFPPPPPLPLAAPLPHSVPDSSALPTKRKTVKLFWRELKLAGGHGVSASRFGPCATLWASLDPVSVDTARLEHLFESRAKEVLPSKKAGEGRRTMTTVLDPKRSNAINIGLTTLPPVHVIKAALLNFDEFAVSKDGIEKLLTMMPTEEERQKIEEAQLANPDIPLGPAENFLMTLASIGGLAARLQLWAFKLDYDSMEREIAEPLFDLKVGMEQLVQNATFRCILATLLAVGNFLNGSQSSGFELSYLEKVSXVKDTVRRQSLLHHLCSLVLQTRPESSDLYSEIPALTRCAKVSTCQNQPRPDKA

SEQ ID NO: 1479 - protein, 305 aa, Homo sapiens
MAAGLARLLLLLGLSAGGPAPAGAAKMKVVEEPNAFGVNNPFLPQASRLQAKRDPSPVSGPVHLFRLSGKCFSLVESTYKYEFCPFHNVTQHEQTFRWNAYSGILGIWHEWEIANNTFTGMWMRDGDACRSRSRQSKVELACGKSNRLAHVSEPSTCVYALTFETPLVCHPHALLVYPTLPEALQRQWDQVEQDLADELITPQGHEKLLRTLFEDAGYLKTPEENEPTQLEGGPDSLGFETLENCRKAHKELSKEIKRLKGLLTQHGIPYTRPTETSNLEHLGHETPRAKSPEQLRGDPGLRGSL

SEQ ID NO: 1480 - protein, 289 aa, Homo sapiens
MFVLLYVTSFAICASGQPRGNQLKGENYSPRYICSIPGLPGPPGPPGANGSPGPHGRIGLPGRDGRDGRKGEKGEKGTAGLRGKTGPLGLAGEKGDQGETGKKGPIGPEGEKGEVGPIGPPGPKGDRGEQGDPGLPGVCRCGSIVLKSAFSVGITTSYPEERLPIIFNKVLFNEGEHYNPATGKFICAFPGIYYFSYDITLANKHLAIGLVHNGQYRIKTFDANTGNHDVASGSTVIYLQPEDEVWLEIFFTDQNGLFSDPGWADSLFSGFLLYVDTDYLDSISEDDEL

SEQ ID NO: 1481 - protein, 68 aa, Homo sapiens
MATVGLSWKKELVILLVGPGAAALQPTHTCCSLPSLSSLFPLRLNTKTSPKTTRTNLYLLSIAPLSHL

SEQ ID NO: 1482 - protein, 243 aa, Homo sapiens
MSSGTELLWPGAALLVLLGVAASLCVRCSRPGAKRSEKIYQQRSLREDQQSFTGSRTYSLVGQAWPGPLADMAPTRKDKLLQFYPSLEDPASSRYQNFSKGSRHGSEEAYIDPIAMEYYNWGRFSKPPEDDDANSYENVLICKQKTTETGAQQEGIGGLCRGDLSLSLALKTGPTSGLCPSASPEEDEESEDYQNSASIHQWRESRKVMGQLQREASPGPVGSPDEEDGEPDYVNGEVAATEA

SEQ ID NO: 1483 - protein, 364 aa, Homo sapiens
  SITE (20): Xaa equals any of the naturally occurring L-amino acids
MPGCPCPGCGMAGPRLLFLXALALELLGRAGGSQPALRSRGTATACRLDNKESESWGALLSGERLDTWICSLLGSLMVGLSGVFPLLVIPLEMGTMLRSEAGAWRLKQLLSFALGGLLGNVFLHLLPEAWAYTCSASPGGEGQSLQQQQQLGLWVIAGILTFLALEKMFLDSKEEGTSQAPNKDPTAAAAALNGGHCLAQPAAEPGLGAVVRSIKVSGYLNLLANTIDNFTHGLAVAASFLVSKKIGLLTTMAILLHEIPHEVGDFAILLRAGFDRWSAAKLQLSTALGGLLGAGFAICTQSPKGVEETAAWVLPFTSGGFLYIALVNVLPDLLEEEDPWRSLQQLLLLCAGIVVMVLFSLFVD

SEQ ID NO: 1484 - protein, 142 aa, Homo sapiens
MCAFPWLLLLLLLQEGSQRRLWRWCGSEEVVAVLQESISLPLEIPPDEEVENIIWSSHKSLATVVPGKEGHPATIMVTNPHYQGQVSFLDPSYSLHISNLSWEDSGLLPSSSQPENIPDLYHAAVQSMCLPMAVRAPDHCEL

SEQ ID NO: 1485 - protein, 282 aa, Homo sapiens
MLALTLAKADSPRTALLCSAWLLTASFSAQQHKGSLQVHQTLSVEMDQVLKALSFPKKKAALLSAAILCFLRTALRQSFSSALVALVPSGAQPLPATKDTVLAPLRMSQVRSLVIGLQNLLVQKDPLLSQACVGCLEALLDYLDARSPDIALHVASQPWNRFLLFTLLDAGENSFLRPEILRLMTLFMRYRSSSVLSHEEVGDVLQGVALADLSTLSNTTLQALHGFFQQLQSMGHLADHSMAQTLQASLEGLPPSTSSGQPPLQDMLCLGGVAVSLSHIRN

SEQ ID NO: 1486 - protein, 87 aa, Homo sapiens
  SITE (53): Xaa equals any of the naturally occurring L-amino acids
MTAFCSLLLQAQSLLPRTMAAPQDSLRPGEEDEGMQLLQTKDSMAKGARPGAXRGRARWGLAYTLLHNPTLQVFRKTALLGANGAQP

SEQ ID NO: 1487 - protein, 75 aa, Homo sapiens [sequence omitted]

SEQ ID NO: 1488 - protein, 67 aa, Homo sapiens
MKLLLLTLTVLLLLSQLTPGGTQRCWNLYGKCRYRCSKKERVYVYCINNKMCCVKPKYQPKERWWPF

SEQ ID NO: 1489 - protein, 126 aa, Homo sapiens
MCSSFPRMALCALWMWPSVKSSVPLPLREPFLWRSPGSQCLLCLQTIHVSCSEACPLLENISKNCTIPQRDLDNMAFPQALPLEKRCERFLQKSYRKLEKNPEKEEEHWARLQRYSLSLQRENFKK

SEQ ID NO: 1490 - protein, 233 aa, Homo sapiens
MALKNKFSCLWILGLCLVATTSSKIPSITDPHFIDNCIEAHNEWRGKVNPPAADMKYMIWDKGLAKMAKAWANQCKFEHNDCLDKSYKCYAAFEYVGENIWLGGIKSFTPRHAITAWYNETQFYDFDSLSCSRVCGHYTQLVWANSFYVGCAVAMCPNLGGASTAIFVCNYGPAGNFANMPPYVRGESCSLCSKEEKCVKNLCKNPFLKPTGRAPQQTAFNPFSLGFLLLRIF

SEQ ID NO: 1491 - protein, 46 aa, Homo sapiens
MEPVALLQPTWWLLNVTLPLVAWSGPLICRPLLHGEGRQGAACLQG

SEQ ID NO: 1492 - protein, 65 aa, Homo sapiens
MIKILKEAIEETSFCSFWRISFQLSIHHIFLIFCAQLTTLLYSTFLFIPISWFLIVPGAVDKTIL

SEQ ID NO: 1493 - protein, 257 aa, Homo sapiens [sequence omitted]

SEQ ID NO: 1494 - protein, 163 aa, Homo sapiens
  SITE (106): Xaa equals any of the naturally occurring L-amino acids
  SITE (113): Xaa equals any of the naturally occurring L-amino acids
MSPRGTGCSAGLLMTVGWLLLAGLQSARGTNVTAAVQDAGLAHEGEGEEETENNDSETAENYAPPETEDVSNRNVVKEVEFGMCTVTCGIGVREVILTNGCPGGEXKCVVRVXECRGPTDCGWGKPISESLESVRLACIHTSPLIVSIYVELLRQTTIHYTCK

SEQ ID NO: 1495 - protein, 142 aa, Homo sapiens
MPRCRWLSLILLTIPLALVARKDPKKNETGVLRKLKPVNASNANVKQCLWFAMQEYNKESEDKYVFLVVKTLQAQLQVTNLLEYLIDVEIARSDCRKPLSTNEICAIQENSKLKRKLSCSFLVGALPWNGEFTVMEKKCEDA

SEQ ID NO: 1496 - protein, 58 aa, Homo sapiens [sequence omitted]

SEQ ID NO: 1497 - protein, 47 aa, Homo sapiens
MYLFLLCCFISEHCAQHSFPHTCPNWKTRVLSFPLHPCPHLIHPNNT

SEQ ID NO: 1498 - protein, 208 aa, Homo sapiens
MWLFILLSLALISDAMVMDEKVKRSFVLDTASAICNYNAHYKNHPKYWCRGYFRDYCNIIAFSPNSTNHVALRDTGNQLIVTMSCLTKEDTGWYWCGIQRDFARDDMDFTELIVTDDKGTLANDFWSGKDLSGNKTRSCKAPKVVRKADRSRTSILIICILITGLGIISVISHLTKRRRSQRNRRVGNTLKPFSRVLTPKEMAPTEQM

SEQ ID NO: 1499 - protein, 84 aa, Homo sapiens
MKLLYLFLAILLAIEEPVISGKRHILRCMGNSGICRASCKKNEQPYLYCRNCQSCCLQSYMRISISGKEENTDWSYEKQWPRLP

SEQ ID NO: 1500 - protein, 89 aa, Homo sapiens
MVSASVFVGLVIFYIAFCLLWPLVVKGCTMIRWKINNLIASESYYTYASISGISSMPSLRHSRMGSMFSSRMTEDRAEPKEAVERQLMT

SEQ ID NO: 1501 - protein, 142 aa, Homo sapiens
MSGISGCPFFLWGLLALLGLALVISLIFNISHYVEKQRQDKMYSYSSDHTRVDEYYIEDTPIYGNLDDMISEPMDENCYEQMKARPEKSVNKMQEATPSAQATNETQMCYASLDHSVKGKRRSPGNRILISQTRMEMSNYMQ

SEQ ID NO: 1502 - protein, 94 aa, Homo sapiens
MLVIAGGILAALLLLIVVVLCLYFKIHNALKAAKEPEAVAVKNHNPDKVWWAKNSQAKTIATESCPALQCCEGYRMCASFDSLPPCCCDINEGL

SEQ ID NO: 1503 - protein, 39 aa, Homo sapiens
MAFGQEVTHLTKTSWLAPLRFIKGLLGPWGWILLILDLE

SEQ ID NO: 1504 - protein, 38 aa, Homo sapiens
MVSKHSLNLHFFYWKGGCACFTSEPRVFVVVELSLLDC

SEQ ID NO: 1505 - protein, 292 aa, Homo sapiens
MGIQTSPVLLASLGVGLVTLLGLAVGSYLVRRSRRPQVTLLDPNEKYLLRLLDKTTVSHHTLGLPVGKHIYLSTRIDGSLVIRPYTPVTSDEDQGYVDLVIKVYLKGVHPKFPEGGKMSQYLDSLKVGDVVEFRGPSGLLTYTGKGHFNIQPNKKSPPEPRVAKKLGMIAGGTGITPMLQLIRAILKVPEDPTQCFLLFANQTEKDIILREDLEELQARYPNRFKLWFTLDHPPKDWAYSKGFVTADMIREHLPAPGDDVLVLLCGPPPMVQLACHPNLDKLGYSQKMRFTY

SEQ ID NO: 1506 - protein, 90 aa, Homo sapiens
MALFSCLLLLKQSDGASPVLRALAASCLASPAGCCGTRKALNGNVGEKVGFTFMSFQGCDPSSPGCLCCSLLPSNSQLVFISFLVLSGLA

SEQ ID NO: 1507 - protein, 181 aa, Homo sapiens
MMLMPYGALIIGFVCGIISTLGFVYLTPFLESRLHIQDTCGINNLHGIPGIIGGIVGAVTAASASLEVYGKEGLVHSFDFQGFNGDWTARTQGKFQIYGLLVTLAMALMGGIIVGLILRLPFWGQPSDENCFEDAVYWEMPEGNSTVYIPEDPTFKPSGPSVPSVPMVSPLPMASSVPLVP

SEQ ID NO: 1508 - protein, 822 aa, Homo sapiens
MAAAVVVAEGDSDSRPGQELLVAWNTVSTGLVPPAALGLVSSRTSGAVPPKEEELRAAVEVLRGHGLHSVLEEWFVEVLQNDLQANISPEFWNAISQCENSADEPQCLLLLLDAFGLLESRLDPYLRSLELLEKWTRLGLLMGTGAQGLREEVHTMLRGVLFFSTPRTFQEMIQRLYGCFLRVYMQSKRKGEGGTDPELEGELDSRYARRRYYRLLQSPLCAGCSSDKQQCWCRQALEQFHQLSQVLHRLSLLERVSAEAVTTTLHQVTRERMEDRCRGEYERSFLREFHKWIERVVGWLGKVFLQDGPARPASPEAGNTLRRWRCHVQRFFYRIYASLRIEELFSIVRDFPDSRPAIEDLKYCLERTDQRQQLLVSLKAALETRLLHPGVNTCDIITLYISAIKALRVLDPSMVILEVACEPIRRYLRTREDTVRQIVAGLTGDSDGTGDLAVELSKTDPASLETGQDSEDDSGEPEDWVPDPVDADPGKSSSKRRSSDIISLLVSIYGSKDLFINEYRSLLADRLLHQFSFSPEREIRNVELLKLRFGEAPMHFCEVMLKDMADSRRINANIREEDEKRPAEEQPPFGVYAVILSSEFWPPFKDEKLEVPEDIRAALEAYCKKYEQLKAMRTLSWKHTLGLVTMDVELADRTLSVAVTPVQAVILLYFQDQASWTLEELSKAVKMPVALLRRRMSVWLQQGVLREEPPGTFSVIEEERPQDRDNMVLIDSDDESDSGMASQADQKEEELLLFWTYIQAMLTNLESLSLDRIYNMLRMFVVTGPALAEIDLQELQGYLQKKVRDQQLVYSAGVYRLPKNCS

SEQ ID NO: 1509 - protein, 71 aa, Homo sapiens
MLQAASLSLVTWVVCTVWLETTVPPSLPEPPMWPLSSDSSWSLWISTGMAPAPSSSTRSFSVLPEICFCLW

SEQ ID NO: 1510 - protein, 45 aa, Homo sapiens
MAGVWNTIALWFLSVFGVISAPTTGTSPTSCRCVGPRPPGCGPAG

SEQ ID NO: 1511 - protein, 101 aa, Homo sapiens
  SITE (67): Xaa equals any of the naturally occurring L-amino acids
MELERCSVVLCILANLAVLRALFLPCIIFHCVSDSRSVNRETKVKFVHTSVHGVGHSFVQSAFKAFXLVPPEAVPEQKDPDPEFPTVKYPNPEEGKGVLVT

SEQ ID NO: 1512 - protein, 77 aa, Homo sapiens
  SITE (43): Xaa equals any of the naturally occurring L-amino acids
MAARSALALLLLLPVLLLPVQSRSEPETTAPTPTPIPGGNSSXSRPLPSIELHACGPYPKPGLLILLAPLALWPILL

SEQ ID NO: 1513 - protein, 188 aa, Homo sapiens
MILTMLLMLKLCTEVRVANELNARRRSFTAADSKDEEVKVAPRRSFLDFDPHHFWQWSSFSDYVQCVLAFTGVAGYITYLSIDSALFVETLGFLAVLTEAMLGVPQLYRNHRHQSTEGMSIKMVLMWTSGDAFKTAYFLLKGAPLQFSVCGLLQVLVDLAILGQAYAFARHPQKPAPHAVHPTGTKAL

SEQ ID NO: 1514 - protein, 86 aa, Homo sapiens [sequence omitted]

SEQ ID NO: 1515 - protein, 246 aa, Homo sapiens
MALLLCLVCLTAALAHGCLHCHSNFSKKFSFYRHHVNFKSWWVGDIPVSGALLTDWSDDTMKELHLAIPAKITREKLDQVATAVYQMMDQLYQGKMYFPGYFPNELRNIFREQVHLIQNAIIESRIDCQHRCGKQGSVQAEGRAGGSSGPWRLRGALAALVRVSGIFQYETISCNNCTDSHVACFGYNCESSAQWKSAVQGLLNYINNWHKQDTSMSLVSPALRCLEPPHLANLTLEDAAECLKQH

SEQ ID NO: 1516 - protein, 246 aa, Homo sapiens
MGPQHLRLVQLFCLLGAISTLPRAGALLCYEATASRFRAVAFHNWKWLLMRNMVCKLQEGCEETLVFIETGTARGVVGFKGCSSSSSYPAQISYLVSPPGVSIASYSRVCRSYLCNNLTNLEPFVKLKASTPKSITSASCSCPTCVGEHMKDCLPNFVTTNSCPLAASTCYSSTLKFQAGFLNTTFLLMGCAREHNQLLADFHHIGSIKVTEVLNILEKSQIVGAASSRQDPAWGVVLGLLFAFRD

SEQ ID NO: 1517 - protein, 84 aa, Homo sapiens
  SITE (65): Xaa equals any of the naturally occurring L-amino acids
MWSSSWDHRITTPRLANFFFFFFFFFFVEMGFRYVGQAGLKLLASSNLPALASQSAGITGVSHHXWLGGLIKTPILSLTPRVSG

SEQ ID NO: 1518 - protein, 40 aa, Homo sapiens
MLQEVKLDFLWLLNLPLILLFSILESSMKICTNAMFTRTG

SEQ ID NO: 1519 - protein, 110 aa, Homo sapiens
  SITE (93): Xaa equals any of the naturally occurring L-amino acids
MFLASWLLFCIVAPKDDAHLSFIQCKDIWKDNRKYSCFHFKSDQLLELASKACTSFQAQSRSFTAGAVPSEHPELPCGSQQLCCGCTARLGGXWIGASRCGSGSAFLASP

SEQ ID NO: 1520 - protein, 59 aa, Homo sapiens
  SITE (54): Xaa equals any of the naturally occurring L-amino acids
MWTARRCTETVAVSLRIFPLVLAMPLQGKCTSTCQRKPLLLVFIFVVNFLYIPXAAFLH

SEQ ID NO: 1521 - protein, 24 aa, Homo sapiens
MKYLLFLVFCLSYVKDLNIFDLLY

SEQ ID NO: 1522 - protein, 56 aa, Homo sapiens [sequence omitted]

SEQ ID NO: 1523 - protein, 61 aa, Homo sapiens
MNASLISWVLVLHRICLGLSDIPKENCIITISGMQLSHHGQSLGKWAEKLHVFYSLFSFLL

SEQ ID NO: 1524 - protein, 53 aa, Homo sapiens
MQECLLHGCCCYLLRLGVLGTVQCISTWLILTANEQHRLKETSNSQSPAVSRA

SEQ ID NO: 1525 - protein, 231 aa, Homo sapiens
MWALQLSLPTCGLAALLTHMRPCSSPYPHAGLAALLTHMGPCRSPYPHGGLAAVLTHMRALQLSLPTWGLAALLTHMRPCSSPYPHAGLACCWLWSLSSHRSLQVQATHRLVVRTIKDRVMLKVLPQTRRRGPFLSSCRNDVMRNCVPRHAVLVTTCVFVSFPTHCKVGITGPITQVKQKPGNHSSPCPVIQLVAKAEFELMLPSVPKPVYLTLVLSCWCLCDVPCLSVSL

SEQ ID NO: 1526 - protein, 50 aa, Homo sapiens
  SITE (43): Xaa equals any of the naturally occurring L-amino acids
  SITE (50): Xaa equals any of the naturally occurring L-amino acids
MNFLVFLSLSSSLVSAAGPRFPSREERGVGGVVLIKSEDMTLXERSKGSX

SEQ ID NO: 1527 - protein, 41 aa, Homo sapiens
MCGLVILWPCIMTLFSSLSTGDVLLPCKILVGLRVFIGARV

SEQ ID NO: 1528 - protein, 32 aa, Homo sapiens
MPVPLWLVLWFCFLLYVASRRTFGLANYMPLP

SEQ ID NO: 1529 - protein, 362 aa, Homo sapiens
MRTLFNLLWLALACSPVHTTLSKSDAKKAASKTLLEKSQFSDKPVQDRGLVVTDLKAESVVLEHRSYCSAKARDRHFAGDVLGYVTPWNSHGYDVTKVFGSKFTQISPVWLQLKRRGREMFEVTGLHDVDQGWMRAVRKHAKGLHIVPRLLFEDWTYDDFRNVLDSEDEIEELSKTVVQVAKNQHFDGFVVEVWNQLLSQKRVTDQLGMFTHKEFEQLAPVLDGFSLMTYDYSTAHQPGPNAPLSWVRACVQVLDPKSKWRSKILLGLNFYGMDYATSKDAREPVVGARYIQTLKDHRPRMVWDSQASEHFFEYKKSRSGRHVVFYPTLKSLQVRLELARELGVGVSIWELGQGLDYFYDLL

SEQ ID NO: 1530 - protein, 37 aa, Homo sapiens
MCYIPGSTGGQCWPWCWCWLCREALEWLCGAVSAGPA

SEQ ID NO: 1531 - protein, 318 aa, Homo sapiens
MALMLSLVLSLLKLGSGQWQVFGPDKPVQALVGEDAAFSCFLSPKTNAEAMEVRFFRGQFSSVVHLYRDGKDQPFMQMPQYQGRTKLVKDSIAEGRISLRLENITVLDAGLYGCRISSQSYYQKAIWELQVSALGSVPLISIAGYVDRDIQLLCQSSGWFPRPTAKWKGPQGQDLSTDSRTNRDMHGLFDVEISLTVQENAGSISCSMRHAHLSREVESRVQIGDWRRKHGQAGKRKYSSSHIYDSFPSLSFMDFYILRPVGPCRAKLVMGTLKLQILGEVHFVEKPHSLLQISGGSTTLKKGPNPWSFPSPCALFPT

SEQ ID NO: 1532 - protein, 101 aa, Homo sapiens
MSQLSRTSLSLLLTLLVLWGSSCCLPIWCLPNRHRLLKLSFLLFSPDIPYLSHTHPNNISCSVLSLRQHLNFTQPGALFTCLVQIQFGLILQPCISKWGLG

SEQ ID NO: 1533 - protein, 85 aa, Homo sapiens
  SITE (68): Xaa equals any of the naturally occurring L-amino acids
MGMPLVTVTAATFPTLSCPPRAWPEVEAPEAPALPVVPELPEVPMEMPLVLPPELELLSLEAVHRYQXGGTLMGWTRAEASANGS

SEQ ID NO: 1534 - protein, 111 aa, Homo sapiens
MQFSLCLTAVFLLQLAAGILGFVFSDKARGKVSEIINNAIVHYRDDLDLQNLIDFGQKKVWVSQWSGGLWVKVNVIPRDASPSMPVGLFITCQVMASGKGFGKKSTRSRVL

SEQ ID NO: 1535 - protein, 102 aa, Homo sapiens [sequence omitted]

SEQ ID NO: 1536 - protein, 201 aa, Homo sapiens [sequence omitted]

SEQ ID NO: 1537 - protein, 102 aa, Homo sapiens
  SITE (91): Xaa equals any of the naturally occurring L-amino acids
  SITE (92): Xaa equals any of the naturally occurring L-amino acids
  SITE (93): Xaa equals any of the naturally occurring L-amino acids
MGRRSGLLGLRPGRSRWRWSGSVWVRSVLLLLGGLRASATSTPVSLGSSPPCRHHVPSDTEVINKVHLKANHVVKRDVDEHLRIKTVYDKXXXSCSLRKRIL

SEQ ID NO: 1538 - protein, 78 aa, Homo sapiens
MSPHQPMQVSSSKTILWLVLSCLCPSSPHPVISGLPQWYIGVLAGIVPVAPIRPGDSGLDLQREGPQPILSQGLNRRT

SEQ ID NO: 1539 - protein, 42 aa, Homo sapiens
MMLGLRQKLTTSLTSAAALTCVLLLSMTGMTTSSSRSVLWKT

SEQ ID NO: 1540 - protein, 73 aa, Homo sapiens
MCWICVWLFFSPTKTSCFPWLIRPGPRSFTDSHGTPPWQCLEPSRFYVPWEASVVTFFAAGSAKMSCQSWLAP

SEQ ID NO: 1541 - protein, 159 aa, Homo sapiens
MSQAWVPGLAPTLLFSLLAGPQKIAAKCGLILACPKGFKCCGDSCCQENELFPGPVRIFVIIFLVILSVFCICGLAKCFCRNCREPEPDSPVDCRGPLELPSIIPPERVRVSLSAPPPPYSEVILKPSLGPTPTEPPPPYSFRPEEYTGDQRGIDNPAF

SEQ ID NO: 1542 - protein, 68 aa, Homo sapiens
MKPTRSLWISFLMCCWIWFANILLRIFASVFFRDIGLKFSFFCCVSARLWYQDDAGLINELGRIPSFY

SEQ ID NO: 1543 - protein, 151 aa, Homo sapiens; identical to SEQ ID NO: 1240

SEQ ID NO: 1544 - protein, 506 aa, Homo sapiens
  SITE (65): Xaa equals any of the naturally occurring L-amino acids
  SITE (112): Xaa equals any of the naturally occurring L-amino acids
  SITE (423): Xaa equals any of the naturally occurring L-amino acids
  SITE (425): Xaa equals any of the naturally occurring L-amino acids
MGMRRHSLMLLPWWLGAAGRKECHREQLVAAVEVTEQETKVPKKTVIIEETITTVVKSPRGQRRXPSKSPSRSPSRCSASPLRPGLLAPDLLYLPGAGQPRRPEAEPGQKPXVPTLYVTEAEAHSPALPGLSGPQPKWVEVEETIEVRVKKMGPQGVSPTTEVPRSSSGHLFTLPGATPGGDPNSNNSNNKLLAQEAWAQGTAMVGVREPLVFRVDARGSVDWAASGMGSLEEEGTMEEAGEEEGEDGDAFVTEESQDTHSLGDRDPKILTHNGRMLTLADLEDYVPGEGETFHCGGPGPGAPDDPPCEVSVIQREIGEPTVGSLCCSAWGMHWVPEALSASLGLSPVGRHHRDPRSVALRAPPSSCGRPRLGLWAVLPGRSLSAPASGVLRTVARAASPQSFPPRPSTSGQWGRRSPFTSVXGXGPSYLTQLQPGGLGGACNVGMTGSKTSALGCFLSAWQEPQDCGRRMWPWAFVLFPHGPGPSLLAPATAARPDMALPLLQSW

SEQ ID NO: 1545 - protein, 334 aa, Homo sapiens
MFQCGLLQQLCTILMATGVPADILTETINTVSEVIRGCQVNQDYFASVNAPSNPPRPAIVVLLMSMVNERQPFVLRCAVLYCFQCFLYKNQKGQGEIVSTLLPSTIDATGNSVSAGQLLCGGLFSTDSLSNWCAAVALAHALQENATQKEQLLRVQLATSIGNPPVSLLQQCTNILSQGSKIQTRVGLLMLLCTWLSNCPIAVTHFLHNSANVPFLTGQIAENLGEEEQLVQGLCALLLGISIYFNDNSLESYMKEKLKQLIEKRIGKENFIEKLGFISKHELYSRASQKPQPNFPSPEYMIFDHEFTKLVKELEGVITKAIYKSSEEDKKKKK

SEQ ID NO: 1546 - protein, 522 aa, Homo sapiens
MRLRVRLLKRTWPLEVPETEPTLGHLRSHLRQSLLCTWGYSSNTRFTITLNYKDPLTGDEETLASYGIVSGDLICLILQDDIPAPNIPSSTDSEHSSLQNNEQPSLATSSNQTSMQDEQPSDSFQGQAAQSGVWNDDSMLGPSQNFEAESIQDNAHMAEGTGFYPSEPMLCSESVEGQVPHSLETLYQSADCSDANDALIVLIHLLMLESGYIPQGTEAKALSMPEKWKLSGVYKLQYMHPLCEGSSATLTCVPLGNLIVVNATLKINNEIRSVKRLQLLPESFICKEKLGENVANIYKDLQKLSRLFKDQLVYPLLAFTRQALNLPDVFGLVVLPLELKLRIFRLLDVRSVLSLSAVCRDLFTASNDPLLWRFLYLRDFRDNTVRVQDTDWKELYRKRHIQRKESPKGRFVMLLPSSTHTIPFYPNPLHPRPFPSSRLPPGIIGGEYDQRPTLPYVGDPISSLIPGPGETPSQFPPLRPRFDPVGPLPGPNPILPGRGGPNDRFPFRPSRGRPTDGRLSFM

SEQ ID NO: 1547 - protein, 186 aa, Homo sapiens
MRTLVELGPWAGDFGPDLLLTLLFLLFLAHGVTLDGASANPTVSLQEFLMAEQSLPGTLLKLAAQGLGMQAACTLMRLCWAWELSDLHLLQSLMAQSCSSALRTSVPHGALLEAACTFCFHLTLLHLRHSPPAYSGPAVALLVTVTAYTAGPFTSAFFNPALAASVTFACSDTPYWSTCRCTGWAL

SEQ ID NO: 1548 - protein, 168 aa, Homo sapiens
MVTFITATLWIAVFSYIMVWLVTIIGYTLGIPDVIMGITFLAAGQVSRLHGQPNCGETRPWGHGSLQHHRSNVFDILVGLGVPWGLQTMVVNYGSTVKINSRGLVYSVVLLLGSVALTVLGIHLNKWRLDRKLGVYVLVLYAIFLCFSIMIEFNVFTFVNLPMCREDD

SEQ ID NO: 1549 - protein, 48 aa, Homo sapiens
MMKYFFDVVVFLTFFLVFSLSIFLSDEEFPVSRTQNIGLCHFNPSFSE

SEQ ID NO: 1550 - protein, 168 aa, Homo sapiens
  SITE (83): Xaa equals any of the naturally occurring L-amino acids
MPLLRGLLWLQVLCAGPLHTEAVVLLVPSDDGRAFLLRSRLLHPEAHVPPAADRGASLQCVLHQAAPKSRPRSPAAGAALLHXPRRTGDEPCREFHGNGFPGPTQLTPGECGLPAPSSLLQHASAPVRTGSEGQVVGCPRARGETGEGLSLAFLSSLMFTSRNGLVGC

SEQ ID NO: 1551 - protein, 43 aa, Homo sapiens [sequence omitted]

SEQ ID NO: 1552 - protein, 212 aa, Homo sapiens [sequence omitted]

SEQ ID NO: 1553 - protein, 75 aa, Homo sapiens
MGPLWGAPLRAWAAGSVGCPCCLSCASPSSISSAGDPLASCSTCGSTWEIPLTWMTMDHLLVRYYLSQARWCTTG

SEQ ID NO: 1554 - protein, 187 aa, Homo sapiens
MVAATVAAAWLLLWAAACAQQEQDFYDFKAVNIRGKLVSLEKYRGSVSLVVNVASECGFTDQHYRALQQLQRDLGPHHFNVLAFPCNQFGQQEPDSNKEIESFARRTYSVSFPMFSKIAVTGTGAHPAFKYLAQTSGKEPTWNFWKYLVAPDGKVVGAWDPTVSVEEVRPQITALVRKLILLKREDL

SEQ ID NO: 1555 - protein, 105 aa, Homo sapiens
MSGLAAAAHVFRVCLFPLSWGSSKTTFIHGLSSYIATPVLNSIFSSWKSRRKDTWTCLLHRLSAFPISRRRRNFALFSHSCVCIRSSSDDVGPTMYSFSVPCRVK

SEQ ID NO: 1556 - protein, 67 aa, Homo sapiens
MGSFLHPQWHLLITFCAVLGKGLHSDPSRPFEHGGALGKVPRGRSTLLSKEVLLTLPPCLHVSVGRK

SEQ ID NO: 1557 - protein, 302 aa, Homo sapiens
  SITE (262): Xaa equals any of the naturally occurring L-amino acids
  SITE (279): Xaa equals any of the naturally occurring L-amino acids
  SITE (294): Xaa equals any of the naturally occurring L-amino acids
  SITE (295): Xaa equals any of the naturally occurring L-amino acids
MLLLWKNFMYRRRQPVQLLVELLWPLFLFFILVAVRHSHPPLEHHECHFPNKPLPSAGTVPWLQGLICNVNNTCFPQLTPGEEPGRLSNFNDSLVSRLLADARTVLGGASAHRTLAGLGKLIATLRAARSTAQPQPTKQSPLEPPMLDVAELLTSLLRTESLGLALGQAQEPLHSLLEAAEDLAQELLALRSLVELRALLQRPRGTSGPLELLSEALCSVRGPSSTVGPSLNWYEASDLMELVGQEPESACRQQLSPLLGAXWSLDSTRCPLVWNAEAXSSEVLLTDHFTEVMXXERLQSYL

SEQ ID NO: 1558 - protein, 110 aa, Homo sapiens
MLLWWQCLCCHAVLEPAATAMPEDAAPSSLPVPPNMTSSRFHYFWTLLQIKLTQFYSKPRSLSATPEKNIGLQEPERRERFTGESCRWELKSQVMSLPHQKLTRMYTMPL

SEQ ID NO: 1559 - protein, 40 aa, Homo sapiens
MRRQTFMSILVFQCSPISFGLCINKERTVVSSVITDNLCL

SEQ ID NO: 1560 - protein, 211 aa, Homo sapiens [sequence omitted]

SEQ ID NO: 1561 - protein, 90 aa, Homo sapiens
MYLLCWLYIMGVLGASCNWHVGVPFPGTHWPRSQNHLLWVYNHLNELPVPAGRSSEQLYLGYTEKLCIWISCYLAIRITEIQGSRVILMA

SEQ ID NO: 1562 - protein, 414 aa, Homo sapiens
MNPTLGLAIFLAVLLTVKGLLKPSFSPRNYKALSEVQGWKQRMAAKELARQNMDLGFKLLKKLAFYNPGRNIFLSPLSISTAFSMLCLGAQDSTLDEIKQGFNFRKMPEKDLHEGFHYIIHELTQKTQDLKLSIGNTLFIDQRLQPQRKFLEDAKNFYSAETILTNFQNLEMAQKQINDFISQKTHGKINNLIENIDPGTVMLLANYIFFRARWKHEFDPNVTKEEDFFLEKNSSVKVPMMFRSGIYQVGYDDKLSCTILEIPYQKNITAIFILPDEGKLKHLEKGLQVDTFSRWKTLLSRRVVDVSVPRLHMTGTFDLKKTLSYIGVSKIFEEHGDLTKIAPHRSLKVGEAVHKAELKMDERGTEGAAGTGAQTLPMETPLVVKIDKPYLLLIYSEKIPSVLFLGKIVNPIGK

SEQ ID NO: 1563 - protein, 346 aa, Homo sapiens [sequence omitted]

SEQ ID NO: 1564 - protein, 188 aa, Homo sapiens
MDVNIAPLRAWDDFFPGSDRFARPDFRDISKWNNRVVSNLLYYQTNYLVVAAMMISIVGFLSPFNMILGGIVVVLVFTGFVWAAHNKDVLRRMKKRYPTTFVMVVMLASYFLISMFGGVMVFVFGITFPLLLMFIHASLRLRNLKNKLENKMEGIGLKRTPMGIVLDALEQQEEGINRLTDYISKVKE

SEQ ID NO: 1565 - protein, 45 aa, Homo sapiens
MSMKCYLVVLICIPLMATDAECLFLCLRAMRISLEKGLSRSFAYF

SEQ ID NO: 1566 - protein, 165 aa, Homo sapiens
  SITE (127): Xaa equals any of the naturally occurring L-amino acids
MCLSLLAALACSAGDTWASEVGPVLSKSSPRLITTWEKVPVGTNGGVTVVGLVSSLLGGTFVGIAYFLTQLIFVNDLDISAPQWPIIAFGGLAGLLGSIVDSYLGATMQYTGLDESTGMVVNSPTNXARHIAGKPILDNNAVNLFSSVLIALLLPTAAWGFWPRG

SEQ ID NO: 1567 - protein, 155 aa, Homo sapiens [sequence omitted]

SEQ ID NO: 1568 - protein, 62 aa, Homo sapiens
MTWTKCPLPLGPAFFTQCCLIGLLVPLLGWGNQNTQWYPTSKMPDLKDSKTTDLCQHVKHMV

SEQ ID NO: 1569 - protein, 615 aa, Homo sapiens [sequence omitted]

SEQ ID NO: 1570 - protein, 76 aa, Homo sapiens
MTKARLFRLWLVLGSVFMILLIIVYWDSAAPRTSTCTRPSLGRTRGRRCPRPGRTGQGAHGRLRCRRVSGQFLMLA

SEQ ID NO: 1571 - protein, 72 aa, Homo sapiens
MGSAALEILGLVLCLVGWGGLILACGLPMWQVTAFLDHNIVTAQTTWKGLWMSCVVQSTGTCSAKCTTRCWL

SEQ ID NO: 1572 - protein, 91 aa, Homo sapiens
  SITE (12): Xaa equals any of the naturally occurring L-amino acids
  SITE (49): Xaa equals any of the naturally occurring L-amino acids
  SITE (51): Xaa equals any of the naturally occurring L-amino acids
MVLRGWGLAWSXSPVVCGYSGDMKGVCWGRSDHSLLPSEILLPPAPCPXSXVLHNPPPTPHLPSPVLVRIQEAPTWAQRSSLGASPLHKGD

SEQ ID NO: 1573 - protein, 4 aa, Homo sapiens
LREL

SEQ ID NO: 1574 - protein, 14 aa, Homo sapiens
GCSLYNSFNNLLCL

SEQ ID NO: 1575 - protein, 6 aa, Homo sapiens
WALPMS

SEQ ID NO: 1576 - protein, 45 aa, Homo sapiens
  SITE (28): Xaa equals any of the naturally occurring L-amino acids
MKKSLENLNRLQVMLLHLTAAFLQRAHXILTTRMSLGFQSPHLTM

SEQ ID NO: 1577 - protein, 18 aa, Homo sapiens
PGPHCFIGLAMRLYYGSR

SEQ ID NO: 1578 - protein, 98 aa, Homo sapiens
MVHINRALKLIIRLFLVEDLVDSLKLAVFMWLMTYVGAVFNGITLLILAELLIFSVPIVYEKYKTQIDHYVGIARDQTKSIVEKIQAKLPGIAKKKAE

SEQ ID NO: 1579 - protein, 392 aa, Homo sapiens
  SITE (251): Xaa equals any of the naturally occurring L-amino acids
MAPWPPKGLVPAVLWGLSLFLNLPGPIWLQPSPPPQSSPPPQPHPCHTCRGLVDSFNKGLERTIRDNFGGGNTAWEEENLSKYKDSETRLVEVLEGVCSKSDFECHRLLELSEELVESWWFHKQQEAPDLFQWLCSDSLKLCCPAGTFGPSCLPCPGGTERPCGGYGQCEGEGTRGGSGHCDCQAGYGGEACGQCGLGYFEAERNASHLVCSACFGPCARCSGPEESNCLQCKKGWALHHLKCVDCAKACXGCMGAGPGRCKKCSPGYQQVGSKCLDVDECETEVCPGENKQCENTEGGYRCICAEGYKQMEGICVKEQIPESAGFFSEMTEDELVVLQQMFFGIIICALATLAAKGDLVFTAIFIGAVAAMTGYWLSERSDRVLEGFIKGR

SEQ ID NO: 1580 - protein, 434 aa, Homo sapiens [sequence omitted]

SEQ ID NO: 1581 - protein, 91 aa, Homo sapiens
MLRCGGRGLLLGLAVAAAAVMAARLMGWWGPRAGFRLFIPEELSRYRGGPGDPGLYLALLGRVYDVSSGRSTTSLGPTIAASQAETHPELS

SEQ ID NO: 1582 - protein, 110 aa, Homo sapiens; identical to SEQ ID NO: 984

SEQ ID NO: 1583 - protein, 189 aa, Homo sapiens
MGPVRLGILLFLFLAVHEAWAGMLKEEDDDTERLPSKCEVCKLLSTELQAELSRTGRSREVLELGQVLDTGKRKRHVPYSVSETRLEEALENLCERILDYSVHAERKGSLRYAKGQSQTMATLKGLVQKGVKVDLGIPLELWDEPSVEVTYLKKQCETMLEEEEEEEEEEGGDKMTKTGSHPKLDREDL

SEQ ID NO: 1584 - protein, 196 aa, Homo sapiens
  SITE (171): Xaa equals any of the naturally occurring L-amino acids
  SITE (175): Xaa equals any of the naturally occurring L-amino acids
  SITE (177): Xaa equals any of the naturally occurring L-amino acids
  SITE (181): Xaa equals any of the naturally occurring L-amino acids
  SITE (185): Xaa equals any of the naturally occurring L-amino acids
  SITE (188): Xaa equals any of the naturally occurring L-amino acids
  SITE (189): Xaa equals any of the naturally occurring L-amino acids
  SITE (193): Xaa equals any of the naturally occurring L-amino acids
MSLLVDGDMNLSIIMTISSTLLALVLMPLCLWIYSWAWINTPIVQLLPLGTVTLTLCSTLIPIGLGVFIRYKYSRVADYIVKVSLWSLLVTLVVLFIMTGTMLGPELLASIPAAVYVIAIFMPLAGYASGYGLATLFHLPPNCKRTVCLETGSQNVQLCTAILKLAFHRIXRKHXHXSFAXCTFXVCXXGDFXFNL

SEQ ID NO: 1585 - protein, 80 aa, Homo sapiens; identical to SEQ ID NO: 995

SEQ ID NO: 1586 - protein, 178 aa, Homo sapiens [sequence omitted]

SEQ ID NO: 1587 - protein, 219 aa, Homo sapiens
  SITE (41): Xaa equals any of the naturally occurring L-amino acids
AAATAASLSPRGCRLRTPSSDVSPSRAPPPSAAPLPTGRAXMSPSGRLCLLTIVGLILPTRGQTLKDTTSSSSADSTIMDIQVPTRAPDAVYTELQPTSPTPTWPADETPQPQTQTQQLEGTDGPLVTDPETHKSTKAAHPTDDTTTLSERPSPSTDVQTDPQTLKPSGFHEDDPFFYDEHTLRKRGLLVAAVLFITGIIILTSGKCRQLSRLCRNHCR

SEQ ID NO: 1588 - protein, 76 aa, Homo sapiens
MAGPWTFTLLCGLLAATLIQATLSPTAVLILGPKVIKEKLTQELKDHNATSILQQLPLLSAMREKPAGASLCWAAW

SEQ ID NO: 1589 - protein, 130 aa, Homo sapiens
  SITE (64): Xaa equals any of the naturally occurring L-amino acids
  SITE (65): Xaa equals any of the naturally occurring L-amino acids
MLMPVHFLLLLLLLLGGPRTGLPHKFYKAKPIFSCLNTALSEAEKGQWEDASLLSKRSFHYLRXXTPLRERRRRAKRKRLSPSLGPGVEPEAPGTDTCPKHSPGESHARTRPRVPTAPSSPCPSTSPPTS

SEQ ID NO: 1590 - protein, 173 aa, Homo sapiens
MEAPGPRALRTALCGGCCCLLLCAQLAVAGKGARGFGRGALIRLNIWPAVQGACKQLEVCEHCVEGDRARNLSSCMWEQCRPEEPGHCVAQSEVVKEGCSIYNRSEACPAAHHHPTYEPKTVTTGSPPVPEAHSPGFDGASFIGGVVLVLSLQAVAFFVLHFLKAKDSTYQTL

SEQ ID NO: 1591 - protein, 210 aa, Homo sapiens
  SITE (139): Xaa equals any of the naturally occurring L-amino acids
  SITE (187): Xaa equals any of the naturally occurring L-amino acids
MEAPGPRALRTALCGGCCCLLLCAQLAVAGKGARGFGRGALIRLNIWPAVQGACKQLEVCEHCVEGDRARNLSSCMWEQCRPEEPGHCVAQSEVVKEGCSIYNRSEACPAAHHHPTYEPKTVTTGSPPVPEAHSPGFDXASFIGGVVLVLSLQAVAFFVLTSSRPRTAPTRRCEYLASSKYLSPSSXLVPAHVPFSTQGAVFSTGKPSGR

SEQ ID NO: 1592 - protein, 99 aa, Homo sapiens
MEGPRGWLVLCVLAISLASMVTEDLCRAPDGKKGEAGRPGRRGRPGLKGEQGEPGAPGIRTGIQGLKGDQGEPGPSGNPGKVGYPGPSGPLRSPWHPGN

SEQ ID NO: 1593 - protein, 245 aa, Homo sapiens; identical to SEQ ID NO: 1006

SEQ ID NO: 1594 - protein, 250 aa, Homo sapiens; identical to SEQ ID NO: 1009

SEQ ID NO: 1595 - protein, 250 aa, Homo sapiens; identical to SEQ ID NO: 1009

SEQ ID NO: 1596 - protein, 281 aa, Homo sapiens
MSILTMISSWPFSRVVRFWFLHQMVLDLCLGQGVPQQNLGKPKGKKKLSSVRQKFDHRFQPQNPLSGAQQFVAKDPQDDDDLKLCSHTMMLPTRGQLEGRMIVTAYEHGLDNVTEEAVSAVVYAVENHLKDILTSVVSRRKAYRLRDGHFKYAFGSNVTPQPYLKNSVVAYNNLIESPPAFTAPCAGQNPASHPPPDDAEQQAALLLACSGDTLPASLPPVNMYDLFEALQVHREVIPTHTVYALNIERIITKLWHPNHEELQQDKVHRQRLAAKEGLLLC

SEQ ID NO: 1597 - protein, 89 aa, Homo sapiens
  SITE (24): Xaa equals any of the naturally occurring L-amino acids
  SITE (75): Xaa equals any of the naturally occurring L-amino acids
MFKDYPPAIKPSYDVLLLLLLLVXLLQAGLNTGTAIQCVRFKVSARLQGASWDTQNGPQERLAGEVARSPLKEFXKEKAWRAVVVQMAQ

SEQ ID NO: 1598 - protein, 335 aa, Homo sapiens
MKKELPVDSCLPRSLELHPQKMDPKRQHIQLLSSLTECLTVDPLSASVWRQLYPKHLSQSSLLLEHLLSSWEQIPKKVQKSLQETIQSLKLTNQELLRKGSSNNQDVVTCDMACKGLLQQVQGPRLPWTRLLLLLLVFAVGFLCHDLRSHSSFQASLTGRLLRSSGFLPASQQACAKLYSYSLQGYSWLGETLPLWGSHLLTVVRPSLQLAWAHTNATVSFLSAHCASHLAWFGDSLTSLSQRLQIQLPDSVNQLLRYLRELPLLFHQNVLLPLWHLLLEALAWAQEHCHEACRGEVTWDCMKTQLSEAVHWTWLCLQDITVAFLDWALALISQQ

SEQ ID NO: 1599 - protein, 27 aa, Homo sapiens
MHQLFGLFVTLMFASVGGGLGGIILVL

SEQ ID NO: 1600 - protein, 54 aa, Homo sapiens
LAATRKFFLSSHSSSCKKGAMSQKEAPFHRQRLHRERGNRRLGNGGEWGRNWVQ

SEQ ID NO: 1601 - protein, 147 aa, Homo sapiens
MLAGAGRPGLPQGRHLCWLLCAFTLKLCQAEAPVQEEKLSASTSNLPCWLVEEFVVAEECSPCSNFRAKTTPECGPTGYVEKITCSSSKRNEFKSCRFSFEWNNAYFGSSKGAVVCVALIFACLVIIRQRQLDRKALEKVRKQIESI

SEQ ID NO: 1602 - protein, 70 aa, Homo sapiens
MTHWSGCAALYLIFLSLKLAFQAGAGRGAQVGSVLPPSGGAVVVDQYCCRLSAQTYFSLPALQKCIGICR

SEQ ID NO: 1603 - protein, 91 aa, Homo sapiens
  SITE (84): Xaa equals any of the naturally occurring L-amino acids
MYGKSSTRAVLLLLGIQLTALWPIAAVEIYTSRVLEAVNGTDARLKCTFSSFAPVGDALTVTWNFRPLDGGPEQFVFYYHIDPXPTHEWAV

SEQ ID NO: 1604 - protein, 158 aa, Homo sapiens [sequence omitted]

SEQ ID NO: 1605 - protein, 106 aa, Homo sapiens
  SITE (26): Xaa equals any of the naturally occurring L-amino acids
PTFSDQYLAPHPYSPQPPPYHELPHXHGQSQRVLCGCYVAHCGARLGRALLVCDWVSWPSCACSYSAWAQPTSCCHTGDCGHCDSHQQCLVPPPSLRGRQGTFDYF

SEQ ID NO: 1606 - protein, 708 aa, Homo sapiens
MKDMPLRIHVLLGLAITTLVQAVDKKVDCPRLCTCEIRPWFTPRSIYMEASTVDCNDLGLLTFPARLPANTQILLLQTNNIAKIEYSTDFPVNLTGLDLSQNNLSSVTNINVKKMPQLLSVYLEENKLTELPEKCLSELSNLQELYINHNLLSTISPGAFIGLHNLLRLHLNSNRLQMINSKWFDALPNLEILMIGENPIIRIKDMNFKPLINLRSLVIAGINLTEIPDNALVGLENLESISFYDNRLIKVPHVALQKVVNLKFLDLNKNPINRIRRGDFSNMLHLKELGINNMPELISIDSLAVDNLPDLRKIEATNNPRLSYIHPNAFFRLPKLESLMLNSNALSALYHGTIESLPNLKEISIHSNPIRCDCVIRWMNMNKTNIRFMEPDSLFCVDPPEFQGQNVRQVHFRDMMEICLPLIAPESFPSNLNVEAGSYVSFHCRATAEPQPEIYWITPSGQKLLPNTLTDKFYVHSEGTLDINGVTPKEGGLYTCIATNLVGADLKSVMIKVDGSFPQDNNGSLNIKIRDIQANSVLVSWKASSKILKSSVKWTAFVKTENSHAAQSARIPSDVKVYNLTHLNPSTEYKICIDIPTIYQKNRKKCVNVTTKGLHPDQKEYEKNNTTTLMACLGGLLGIIGVICLISCLSPEMNCDGGHSYVRNYLQKPTFALGELYPPLINLWEAGKEKSTSLKVKATVIGLPTNMS

SEQ ID NO: 1607 - protein, 244 aa, Homo sapiens
  SITE (231): Xaa equals any of the naturally occurring L-amino acids
  SITE (237): Xaa equals any of the naturally occurring L-amino acids
MRAPFNTLFGRLFGLLLVAIVLAHVLAFFWFHHYGPPPPPRAAFVEQPDGSLTPLRKAPRPWFGGPVVPLTFQFISLIIAAWYGAKLLSRPIQRLSAAAERLSVDLDSPPLVETGPREARQAASTFNLMQKRIREQVSQRARMLGAVSHDLRTPLSRLKLRLEQIEDPKLQGQMRQDLDDMIGMLDATLSYLHEQRTSETRHWLDVQALVESLSENAQDQGRDVQFFFGGXPPGGGXPKTPPPF

SEQ ID NO: 1608 - protein, 244 aa, Homo sapiens
  SITE (25): Xaa equals any of the naturally occurring L-amino acids
  SITE (40): Xaa equals any of the naturally occurring L-amino acids
  SITE (41): Xaa equals any of the naturally occurring L-amino acids
  SITE (43): Xaa equals any of the naturally occurring L-amino acids
  SITE (231): Xaa equals any of the naturally occurring L-amino acids
  SITE (237): Xaa equals any of the naturally occurring L-amino acids
MRAPFNTLFGRLFGLLLVAIVLAHXLAFFWFHHYGPPPPXXAXFVEQPDGSLTPLRKAPRPWFGGPVVPLTFQFISLIIAAWYGAKLLSRPIQRLSAAAERLSVDLDSPPLVETGPREARQAASTFNLMQKRIREQVSQRARMLGAVSHDLRTPLSRLKLRLEQIEDPKLQGQMRQDLDDMIGMLDATLSYLHEQRTSETRHWLDVQALVESLSENAQDQGRDVQFFFGGXPPGGGXPKTPPPF

SEQ ID NO: 1609 - protein, 10 aa, Homo sapiens
MGLFLFLVSS

SEQ ID NO: 1610 - protein, 146 aa, Homo sapiens; identical to SEQ ID NO: 1046

SEQ ID NO: 1611 - protein, 48 aa, Homo sapiens
MVTFASSTLWIAAFSYMMVWMVTIIGYTLGIPDVIMGDHLPGCWDQRA

SEQ ID NO: 1612 - protein, 271 aa, Homo sapiens
MTQGKLSVANKAPGTEGQQQVHGEKKEAPAVPSAPPSYEEATSGEGMKAGAFPPAPTAVPLHPSWAYVDPSSSSSYDNGFPTGDHELFTTFSWDDQKVRRVFVRKVYTILLIQLLVTLAVVALFTFCDPVKDYVQANPGWYWASYAVFFATYLTLACCSGPRRHFPWEPDSPDRLYPVHGLPHWDAVQLLQHHLRAAVPGHHGPCLPLSHRLQLPDQVRLHLLPGRALRASHDSFLQRTHPGHPPTLPICALAPCSLCSTGSGCIYIVPGT

SEQ ID NO: 1613 - protein, 138 aa, Homo sapiens
MAYLTGMLSSYYNTTSVLLCLGITALVCLSVTVFSFQTKFDFTSCQGVLFVLLMTLFFSGLILAILLPFQYVPWLHAVYAALGAGVFTLFLALDTQLLMGNRRHSLSPEEYIFGALNIYLDIIYIFTFFLQLFGTNRE

SEQ ID NO: 1614 - protein, 612 aa, Homo sapiens
  SITE (245): Xaa equals any of the naturally occurring L-amino acids
  SITE (246): Xaa equals any of the naturally occurring L-amino acids
  SITE (249): Xaa equals any of the naturally occurring L-amino acids
MAAAGRLPSSWALFSPLLAGLALLGVGPVPARALHNVTAELFGAEAWGTLAAFGDLNSDKQTDLFVLRERNDLIVFLADQNAPYFKPKVKVSFKNHSALITSVVPGDYDGDSQMDVLLTYLPKNYAKSELGAVIFWGQNQTLDPNNMTILNRTFQDEPLIMDFNGDLIPDIFGITNESNQPQILLGGNLSWHPALTTTSKMRIPHSHAFIDLTEDFTADLFLTTLNATTSTFQFEIWENLDGNFXXSTXLEKPQNMMVVGQSAFADFDGDGHMDHLLPGCEDKNCQKSTIYLVRSGMKQWVPVLQDFSNKGTLWGFVPFVDEQQPTEIPIPITLHIGDYNMDGYPDALVILKNTSGSNQQAFLLENVPCNNASCEEARRMFKVYWELTDLNQIKDAMVATFFDIYEDGILDIVVLSKGYTKNDFAIHTLKNNFEADAYFVKVIVLSGLCSNDCPRKITPFGVNQPGPYIMYTTVDANGYLKNGSAGQLSQSAHLALQLPYNVLGLGRSANFLDHLYVGIPRPSGEKSIRKQEWTAIIPNSQLIVIPYPHNVPRSWSAKLYLTPSNIVLLTAIALIGVCVFILAIIGILHWQEKKADDREKRQEAHRFHFDAM

SEQ ID NO: 1615 - protein, 456 aa, Homo sapiens
MAAAGRLPSSWALFSPLLAGLALLGVGPVPARALHNVTAELFGAEAWGTLAAFGDLNSDKQTDLFVLRERNDLIVFLADQNAPYFKPKVKVSFKNHSALITSVVPGDYDGDSQMDVLLTYLPKNYAKSELGAVIFWGQNQTLDPNNMTILNRTFQDEPLIMDFNGDLIPDIFGITNESNQPQILLGGNLSWHPALTTTSKMRIPHSHAFIDLTEDFTADLFLTTLNATTSTFQFEIWENLDGNFSVSTILEKPQNMMVVGQSAFADFDGDGHMDHLLPGCEDKNCQKSTIYLVRSGMKQWVPVLQDFSNKGTLWGFVPFVDEQQPTEIPIPITLHIGDYNMDGYPDALVILKNTSGSNQQAFLLENVPCNNASCEEARRMFKVYWELTDLNQIKDAMVATFFDIYEDGILDIVVLSKGYTKNDFAIHTLKNNFEADAYFVKVIVLSGLCSNDCPRR

SEQ ID NO: 1616 - protein, 264 aa, Homo sapiens
MPFRLLIPLGLLCALLPQHHGAPGPDGSAPDPAHYRERVKAMFYHAYDSYLENAFPFDELRPLTCDGHDTWGSFSLTLIDALDTLLILGNVSEFQRVVEVLQDSVDFDIDVNASVFETNIRVVGGLLSAHLLSKKAGVEVEAGWPCSGPLLRMAEEAARKLLPAFQTPTGMPYGTVNLLHGVNPGETPVTCTAGIGTFIVEFATLSSLTGDPVFEDVARVALMRLWESRSDIGLVGNHIDVLTGKGWPRTQASGLAWTPTLSTW

SEQ ID NO: 1617 - protein, 316 aa, Homo sapiens
MLRRRGSPGMGVHVGAALGALWFCLTGALEVQVPEDPVVALVGTDATLCCSFSPEPGFSLAQLNLIWQLTDTKQLVHSFAEGQDQGSAYANRTALFPDLLAQGNASLRLQRVRVADEGSFTCFVSIRDFGSAAVSLQVAAPYSKPSMTLEPNKDLRPGDTVTITCSSYQGYPEAEVFWQDGQGVPLTGNVTTSQMANEQGLFDVHSILRVVLGANGTYSCLVRNPVLQQDAHSSVTITGQPMTFPPEALWVTVGLSVCLIALLVALAFVCWRKIKQSCEEENAGAEDQDGEGEGSKTALQPLKHSDSKEDDGQEIA

SEQ ID NO: 1618 - protein, 302 aa, Homo sapiens
  SITE (128): Xaa equals any of the naturally occurring L-amino acids
MRLGSPGLLFLLFSSLRADTQEKEVRAMVGSDVELSCACPEGSRFDLNDVYVYWQTSESKTVVTYHIPQNSSLENVDSRYRNRALMSPAGMLRGDFSLRLFNVTPQDEQKFHCLVLSQSLGFQEVLSXEVTLHVAANFSVPVVSAPHSPSQDELTFTCTSINGYPRPNVYWINKTDNSLLDQALQNDTVFLNMRGLYDVVSVLRIARTPSVNIGCCIENVLLQQNLTVGSQTGNDIGERDKITENPVSTGEKNAATWSILAVLCLLVVVAVAIGWVCRDRCLQHSYAGAWAVSPETELTGHV

SEQ ID NO: 1619 - protein, 109 aa, Homo sapiens
  SITE (94): Xaa equals any of the naturally occurring L-amino acids
MNTLVLWIFGFLICLGIILAIGNSIWESQTGDQFRTFLFWNEGEKSSVFSGFLTFWSYIIILNTVVPISLYVSVEVIRLGHSYFINWDRKMYYXRKAIPAVARTTTLNE

SEQ ID NO: 1620 - protein, 46 aa, Homo sapiens
  SITE (45): Xaa equals any of the naturally occurring L-amino acids
INHVFIWGSIAIYFSILFTMHSNGIFGIFPNQFPFVGNARHSLTXK

SEQ ID NO: 1621 - protein, 6 aa, Homo sapiens
TVAIYD

SEQ ID NO: 1622 - protein, 11 aa, Homo sapiens
FLVCLLLGPRS

SEQ ID NO: 1623 - protein, 56 aa, Homo sapiens
  SITE (35): Xaa equals any of the naturally occurring L-amino acids
  SITE (42): Xaa equals any of the naturally occurring L-amino acids
  SITE (46): Xaa equals any of the naturally occurring L-amino acids
KSQMQSFTIVTAYGRCLSLTCLPTLNQMLVFKSNXSLVSPHXLTFXNIFARFENFQ

SEQ ID NO: 1624 - protein, 53 aa, Homo sapiens
NYNRGGTFLYQKAKIKHHVLMVFYKSTSNSTESLIWSLLNSWSDKVTFPKRVR

SEQ ID NO: 1625 - protein, 566 aa, Homo sapiens
MAPLALHLLVLVPILLSLVASQDWKAERSQDPFEKCMQDPDYEQLLKVVTWGLNRTLKPQRVIVVGAGVAGLVAAKVLSDAGHKVTILEADNRIGGRIFTYRDQNTGWIGELGAMRMPSSHRILHKLCQGLGLNLTKFTQYDKNTWTEVHEVKLRNYVVEKVPEKLGYALRPQEKGHSPEDIYQMALNQALKDLKALGCRKAMKKFERHTLLEYLLGEGNLSRPAVQLLGDVMSEDGFFYLSFAEALRAHSCLSDRLQYSRIVGGWDLLPRALLSSLSGLVLLNAPVVAMTQGPHDVHVQIETSPPARNLKVLKADVVLLTASGPAVKRITFSPPLPRHMQEALRRLHYVPATKVFLSFRRPFWREEHIEGGHSNTDRPSRMIFYPPPREGALLLASYTWSDAAAAFAGLSREEALRLALDDVAALHGPVVRQLWDGTGVVKRWAEDQHSQGGFVVQPPALWQTEKDDWTVPYGRIYFAGEHTAYPHGWVETAVKLLRAAIKINSRKGPASDTASPEGHASDMEGQGHVHGVASSPSHDLAKEEGSHPPVQGQLSLQNTTHTRTSH

SEQ ID NO: 1626 - protein, 319 aa, Homo sapiens
  SITE (68): Xaa equals any of the naturally occurring L-amino acids
  SITE (115): Xaa equals any of the naturally occurring L-amino acids
  SITE (213): Xaa equals any of the naturally occurring L-amino acids
MAPLALHLLVLVPILLSLVASQDWKAERSQDPFEKCMQDPDYEQLLKVTILEADNRIGGRIFTYRDQXTGWIGELGAMRMPSSHRILHKLCQGLGLNLTKFTQYDKNTWTEVHEXKLRNYVVEKVPEKLGYALRPQEKGHSPEDIYQMALNQALKDLKALGCRKAMKKFERHTLLEYLLGEGNLSRPAVQLLGDVMSEDGFFYLSFAEALRAXSCLSDRLQYSRIVGGWDLLPRALLSSLSGLVLLNAPVVAMTQGPHDVHVQIETSPPARNLKVLKADVVLLTASGPAVKRITFSPRCPATCRRRCGGCTTCRPPRCS

SEQ ID NO: 1627 - protein, 55 aa, Homo sapiens
MSSDFLCFFFKLCNQMILCFFFRGAEYWFLLLVVFSFLCHSCFFFVFSVSNTICI

SEQ ID NO: 1628 - protein, 99 aa, Homo sapiens
  SITE (91): Xaa equals any of the naturally occurring L-amino acids
MAALLLLPLLLLLPLLLLKLHLWPQLRWLPADLAFAVRALCCKRALRARALAAAAADPEGPEGGCSLAWRLAELAQQRAELLLRSRALATXRRSARVTG

SEQ ID NO: 1629 - protein, 214 aa, Homo sapiens
  SITE (199): Xaa equals any of the naturally occurring L-amino acids
  SITE (206): Xaa equals any of the naturally occurring L-amino acids
  SITE (214): Xaa equals any of the naturally occurring L-amino acids
MLGARAWLGRVLLLPRAGAGLAASRRCPGVWPRTWPHRSPSRGSSSRDKDRSATVSSSVPMPAGGKGSHPSSTPQRVPNRLIHEKSPYLLQHAYNPVDWYPWGQEAFDKARKENKPIFLSVGYSTCHWCHMMEEESFQNEEIGRLLSEDFVSVKVDREERPDVDKVYMTFVQATSSGGGWPMNVWLTPNLQPFVGGTIXLLKDGLXRVGSAQCX

SEQ ID NO: 1630 - protein, 43 aa, Homo sapiens
MLGARAWLGRVLLLPRAGAGLAASRRSACSPTSRLNSLRSLIP

SEQ ID NO: 1631 - protein, 44 aa, Homo sapiens [sequence omitted]

SEQ ID NO: 1632 - protein, 333 aa, Homo sapiens
  SITE (100): Xaa equals any of the naturally occurring L-amino acids
  SITE (111): Xaa equals any of the naturally occurring L-amino acids
  SITE (227): Xaa equals any of the naturally occurring L-amino acids
MLTGIAVGALLALALVGVLILFMFRRLRQFRQAQPTPQYRFRKRDKVMFYGRKIMRKVTTLPNTLVENTALPRQRARKRTKVLSLAKRILRFKKEYPGLXPKDPRPSLLEXDFTEFDVKNSHLPSEVLYMLKNVRVLGHFEKPLFLELCKHIVFVQLQEGEHVFQPREPDPSICVVQDGRLEVCIQDTDGTEVVVKEVLAGDSVHSLLSILDIITGHAAPYKTVSVXAAIPSTILRLPAAAFHGVFEKYPETLVRVVQIIMVRLQRVTFLALHNYLGLTTELFNAESQAIPLVSVASVAAGKAKKQVFYGEEERLKKPPRLQESCDSDHGGGR

SEQ ID NO: 1633 - protein, 365 aa, Homo sapiens
  SITE (144): Xaa equals any of the naturally occurring L-amino acids
  SITE (201): Xaa equals any of the naturally occurring L-amino acids
MFVGLMAFLLSFYLIFTNEGRALKTATSLAEGLSLVVSPDSIHSVAPENEGRLVHIIGALRTSKLLSDPNYGVHLPAVKLRRHVEMYQWVETEESREYTEDGQVKKETRYSYNTEWRSEIINSKNFDREIGHKNPSAMAVESFXATAPFVQIGRFFLSSGLIDKVDNFKSLSLSKLEDPHVDIIRRGDFFYHSENPKYPEXGDLRVSFSYAGLSGDDPDLGPAHVVTVIARQRGDQLVPFSTKSGDTLLLLHHGDFSAEEVFHRELRSNSMKTWGLRAAGWMAMFMGLNLMTRILYTLVDWFPVFRDLVNIGLKAFAFCVATSLTLLTVAAGWLFYRPLWALLIAGLALVPILVARTRVPAKKLE

SEQ ID NO: 1634 - protein, 220 aa, Homo sapiens
  SITE (159): Xaa equals any of the naturally occurring L-amino acids
MKLLLWACIVCVAFARKRRFPFIGEDDNDDGHPLHPSLNIPYGIRNLPPPLYYRPVNTVPSYPGNTYTDTGLPSYPWILTSPGFPYVYHIRGFPLATQLNVPPLPPRGFPFVPPSRFFSAAAAPAAPPIAAEPAAAAPLTATPVAAEPAARGPVAAEPXGRGHLLELEPAAEAPVAAEPAAEAPVGVEPAAEEPSPAEPATAKPAAPEPHPSPSLEQANQ

SEQ ID NO: 1635 - protein, 108 aa, Homo sapiens
  SITE (48): Xaa equals any of the naturally occurring L-amino acids
  SITE (55): Xaa equals any of the naturally occurring L-amino acids
  SITE (58): Xaa equals any of the naturally occurring L-amino acids
  SITE (67): Xaa equals any of the naturally occurring L-amino acids
MFYKLTLILCELSVAGVTQAASQRPLQRLPRHICSQRNPPGRCLLKAXLQTTWGXPDXQFPGCPHPXRVTLNARQMGNGKEKKAADLKLKFPQKRFYLSAFSERIKAF

SEQ ID NO: 1636 - protein, 73 aa, Homo sapiens
  SITE (38): Xaa equals any of the naturally occurring L-amino acids
  SITE (48): Xaa equals any of the naturally occurring L-amino acids
  SITE (54): Xaa equals any of the naturally occurring L-amino acids
  SITE (55): Xaa equals any of the naturally occurring L-amino acids
  SITE (68): Xaa equals any of the naturally occurring L-amino acids
MFYKLTLILCELSVAGVTQAASQRPLQRLPRHICSQRXPPGRCLLKAXLQTTWXXPDKPIPRLSPPLXSDPKR

SEQ ID NO: 1637 - protein, 67 aa, Homo sapiens [sequence omitted]

SEQ ID NO: 1638 - protein, 67 aa, Homo sapiens [sequence omitted]

SEQ ID NO: 1639 - protein, 83 aa, Homo sapiens; identical to SEQ ID NO: 1084

SEQ ID NO: 1640 - protein, 29 aa, Homo sapiens
  SITE (26): Xaa equals any of the naturally occurring L-amino acids
  SITE (29): Xaa equals any of the naturally occurring L-amino acids
MYVWVSGALVLVLSPHPASRTLCLMXQAX

SEQ ID NO: 1641 - protein, 80 aa, Homo sapiens
PHCASRAVPYPPGPAAAAFPRQGLQLATTCGHSSDPACFGQCPCHLCANHPGYLWSYRVHLSPQPHLHPPQHLLPPHCTL

SEQ ID NO: 1642 - protein, 56 aa, Homo sapiens
MFVFVVVAWTGNSAGLLLYASLCLPACARGCQGLLGQSGHPFLQGSLQQLACPWWG

SEQ ID NO: 1643 - protein, 51 aa, Homo sapiens
  SITE (20): Xaa equals any of the naturally occurring L-amino acids
  SITE (38): Xaa equals any of the naturally occurring L-amino acids
MELLQAKKLLLLLGLFVSCXSNIRKTEPCFGLDSITFXDPKKKCLSNLKSC

SEQ ID NO: 1644 - protein, 1 aa, Homo sapiens
A

SEQ ID NO: 1645 - protein, 415 aa, Homo sapiens
VGLVSMLGIPIPGAEGAPVLNSLVFLSGQSTPTQKGVGIAGAVCVSSKLRPRGQCRLEFSLAWDMPRIMFGAKGQVHYRRYTRFFGQDGDAAPALSHYALCRYAEWEERISAWQSPVLDDRSLPAWYKSALFNELYFLADGGTVWLEVLEDSLPEELGRNMCHLRPTLRDYGRFGYLEGQEYRMYNTYDVHFYASFALIMLWPKLELSLQYDMALATLREDLTRRRYLMSGVMAPVKRRNVIPHDIGDPDDEPWLRVNAYLIHDTADWKDLNLKFVLQVYRDYYLTGDQNFLKDMWPVCLAVMESEMKFDKDHDGLIENGGYADQTYDGWVTTGPSAYCGGLWLAAVAVMVQMAALCGAQDIQDKFSSILSRGQEAYERLLWNGRYYNYDSSSRPQSRSVMSDQCAGQWFLKACG

SEQ ID NO: 1646 - protein, 201 aa, Homo sapiens; identical to SEQ ID NO: 1103

SEQ ID NO: 1647 - protein, 203 aa, Homo sapiens
MTLRPSLLPLHLLLLLLLSAAVCRAEAGLETESPVRTLQVETLVEPPEPCAEPAAFGDTLHIHYTGSLVDGRIIDTSLTRDPLVIELGQKQVIPGLEQSLLDMCVGEKRRAIIPSHLAYGKRGFPPSVPADAVVQYDVELIALIRANYWLKLVKGILPLVGMAMVPPSWASLGITYTERPIDPKSPKRSSRKRNETRAKRNNK

SEQ ID NO: 1648 - protein, 313 aa, Homo sapiens
MAQLEGYYFSAALSCTFLVSCLLFSAFSRALREPYMDEIFHLPQAQRYCEGHFSLSQWDPMITTLPGLYLVSIGVIKPAIWIFGWSEHVVCSIGMLRFVNLLFSVGNFYLLYLLFCKVQPRNKAASSIQRVLSTLTLAVFPTLYFFNFLYYTEAGSMFFTLFAYLMCLYGNHKTSAFLGFCGFMFRQTNIIWAVFCAGNVIAQKLTEAWKTELQKKEDRLPPIKGPFAEFRKILQFLLAYSMSFKNLSMLLLLTWPYILLGFLFCAFVVVNGGIVIGDRSSHEACLHFPQLFYFFSFTLFFSFPHLLSQQINK

SEQ ID NO: 1649 - protein, 134 aa, Homo sapiens
  SITE (8): Xaa equals any of the naturally occurring L-amino acids
  SITE (73): Xaa equals any of the naturally occurring L-amino acids
  SITE (76): Xaa equals any of the naturally occurring L-amino acids
MAQLEGYXFSAALSCTFLVSCLLFSAFSRALREPYMDEIFHLPQAQRYCEGHFSLSQWDPMITTLPGLYLVSXGVXKPAIWIFGWSEHVVCSIGMLRFVNLLFSVGNFYLLYLLFCKYNPETRLPQVSRESCQH

SEQ ID NO: 1650 - protein, 159 aa, Homo sapiens [sequence omitted]

SEQ ID NO: 1651 - protein, 121 aa, Homo sapiens; identical to SEQ ID NO: 1118

SEQ ID NO: 1652 - protein, 161 aa, Homo sapiens
  SITE (104): Xaa equals any of the naturally occurring L-amino acids
MPTTLPSDLMLLWLGLPSLPSPVEEEGRLVKGLRLTLAAPASEVLPDWEDPPSHPTAWAQPRTHQPDTPNSIKSGIYSPCGGAVLRGAGAIVLRKEVCPSVRLXGRPGPKWGRKRGTARVKIPAYSGWEYVQGGGAQAGVGAGGPAAAAPTRGPPHLGPYL

SEQ ID NO: 1653 - protein, 291 aa, Homo sapiens
MDCFITFSIRETTPSLSCTWSCKGWFILSTPGEVFGYCQELELSLHYLLLPYLLLGVNLFFFTLTCGTNPGIITKANELLFLHVYEFDEVMFPKNVRCSTCDLRKPARSKHCSVCNWCVHRFDHHCVWVNNCIGAWNIRYFLIYVLTLTASAATVAIVSTTFLVHLVVMSDLYQETYIDDLGHLHVMDTVFLIQYLFLTFPRIVFMLGFVVVLSFLLGGYLLFVLYLAATNQTTNEWYRGDWAWCQRCPLVAWPPSAEPQVHRNIHSHGLRSNLQEIFLPAFPCHERKKQE

SEQ ID NO: 1654 - protein, 184 aa, Homo sapiens
MLFLFSMATLLRTSFSDPGVIPRALPDEAAFIEMEIEATNGAVPQGQRPPPRIKNFQINNQIVKLKYCYTCKIFRPPRASHCSICDNCVERFDHHCPWVGNCVGKRNYRYFYLFILSLSLLTIYVFAFNIVYVALKSLKIGFLETLKGNSWNCSRSPHLLLYTLVRRGTDWISYFPRGSQPDNQ

SEQ ID NO: 1655 - protein, 91 aa, Homo sapiens
  SITE (29): Xaa equals any of the naturally occurring L-amino acids
  SITE (31): Xaa equals any of the naturally occurring L-amino acids
  SITE (43): Xaa equals any of the naturally occurring L-amino acids
MKASQCCCCLSHLLASVLLLLLLPELSGXLXVLLQAAEAAPGXGPPDPRPGHYRRCHRALTPAQQPGRGLAEAAGAAGLRGRQWQQPCGRA

SEQ ID NO: 1656 - protein, 122 aa, Homo sapiens
  SITE (89): Xaa equals any of the naturally occurring L-amino acids
  SITE (91): Xaa equals any of the naturally occurring L-amino acids
  SITE (94): Xaa equals any of the naturally occurring L-amino acids
  SITE (97): Xaa equals any of the naturally occurring L-amino acids
  SITE (98): Xaa equals any of the naturally occurring L-amino acids
MHRSEPFLKMSLLILLFLGLAEACTPREVNLLKGIIGLMSRLSPDEILGLLSLQVLHEETSGCKEEVKPFSGTTPSRKPLPKREEHVEXPXNAXTWXXTYLFVSYNKGDWFTFSSQVLLPLL

SEQ ID NO: 1657 - protein, 229 aa, Homo sapiens; identical to SEQ ID NO: 1131
  SITE (206): Xaa equals any of the naturally occurring L-amino acids

SEQ ID NO: 1658 - protein, 85 aa, Homo sapiens
  SITE (33): Xaa equals any of the naturally occurring L-amino acids
  SITE (62): Xaa equals any of the naturally occurring L-amino acids
FLGTQAFAVPLLLISRSQTFGYNGRACQEWLPXLISSILMAYTVALANSYGRLISELKRQRXTEAQNKVFLARRAVALTSTKPAL

SEQ ID NO: 1659 - protein, 47 aa, Homo sapiens; identical to SEQ ID NO: 1140

SEQ ID NO: 1660 - protein, 549 aa, Homo sapiens
  SITE (132): Xaa equals any of the naturally occurring L-amino acids
  SITE (398): Xaa equals any of the naturally occurring L-amino acids
MGNACIPLKRIAYFLCLLSALLLTEGKKPAKPKCPAVCTCTKDNALCENARSIPRTVPPDVISLSFVRSGFTEISEGSFLFTPSLQLLLFTSNSFDVISDDAFIGLPHLEYLFIENNNIKSISRHTFRGLKXLIHLSLANNNLQTLPKDIFKGLDSLTNVDLRGNSFNCDCKLKWLVEWLGHTNATVEDIYCEGPPEYKKRKINSLSSKDFDCIITEFAKSQDLPYQSLSIDTFSYLNDEYVVIAQPFTGKCIFLEWDHVEKTFRNYDNITGTSTVVCKPIVIETQLYVIVAQLFGGSHIYKRDSFANKFIKIQDIEILKIRKPNDIETFKIENNWYFVVADSSKAGFTTIYKWNGNGFYSHQSLHAWYRDTDVEYLEIVRTPQTLRTPHLILSSSSXRPVIYQWNKATQLFTNQTDIPNMEDVYAVKHFSVKGDVYICLTRFIGDSKVMKWGGSSFQDIQRMPSRGSMVFQPLQINNYQYAILGSDYSFTQVYNWDAEKAKFVKFQELNVQAPRSFTHVSINKRNFLFASSFKGNTQIYKHVIVDLSA

SEQ ID NO: 1661 - protein, 66 aa, Homo sapiens
MGNACIPLKRIAYFLCLLSALLLTEGKKPANQNALPCVLVPKIMLYVRMPDPFHAPFLLMLSHYPL

SEQ ID NO: 1662 - protein, 56 aa, Homo sapiens
  SITE (53): Xaa equals any of the naturally occurring L-amino acids
MHRLWIGPAFFLMTSLSVSGAVIPRNGGPGGVSSGPCLLQLLCGQAGSSTIRXIPS

SEQ ID NO: 1663 - protein, 194 aa, Homo sapiens
  SITE (138): Xaa equals any of the naturally occurring L-amino acids
MKLASGFLVLWLSLGGGLAQSDTSPDTEESYSDWGLRHLRGSFESVNSYFDSFLELLGGKNGVCQYRCRYGKAPMPRPGYKPQEPNGCGSYFLGLKVPESMDLGIPAMTKCCNQLDVCYDTCGANKYRCDAKFRWCLXSICSDLKRSLGFVSKVEACDSLVDTVFNTVWTLGCRPFMNSQRAACICAEEEKEEL

SEQ ID NO: 1664 - protein, 67 aa, Homo sapiens [sequence omitted]

SEQ ID NO: 1665 - protein, 170 aa, Homo sapiens
MATAMDWLPWSLLLFSLMCETSAFYVPGVAPINFHQNDPVEIKAVKLTSSRTQLPYEYYSLPFCQPSKITYKAENLGEVLRGDRIVNTPFQVLMNSEKKCEVLCSQSNKPVTLTVEQSRLVAERITEDYYVHLIADNLPVATRLELYSNRDSDDKKKESDIKWASRWDTY

SEQ ID NO: 1666 - protein, 151 aa, Homo sapiens
HASGARRRLQAPPVPHDPQLPAGLRHSAVLYDPHRHLCSHAWDAVALQPGSSHDHSLLPLHVHGGVWRIFCWPSVPHFKRPSVEERSLLYGNSVPWCGFWHLLRIELLHLGKALIRSGALSHHGGSAVHVVRDLPAPRLLGLLLRLPKAAI

SEQ ID NO: 1667 - protein, 166 aa, Homo sapiens [sequence omitted]

SEQ ID NO: 1668 - protein, 26 aa, Homo sapiens
GLFLGQMNWIFSCCFSNNVTTTVKKR

SEQ ID NO: 1669 - protein, 20 aa, Homo sapiens
RLLNLSVPMFTFIVVKRYAT

SEQ ID NO: 1670 - protein, 74 aa, Homo sapiens; identical to SEQ ID NO: 1174

SEQ ID NO: 1671 - protein, 33 aa, Homo sapiens
HHVAQALPPAGAPRGRPHQPHPAPVGQGSPERG

SEQ ID NO: 1672 - protein, 53 aa, Homo sapiens
  SITE (40): Xaa equals any of the naturally occurring L-amino acids
SNPSHILMISILLSHASRGAGADPKRSCCPQRVGSRGRAXVRLTRLCSQPSPH

SEQ ID NO: 1673 - protein, 163 aa, Homo sapiens; identical to SEQ ID NO: 1179

SEQ ID NO: 1674 - protein, 92 aa, Homo sapiens
  SITE (61): Xaa equals any of the naturally occurring L-amino acids
  SITE (68): Xaa equals any of the naturally occurring L-amino acids
MGSTWGSPGWVRLALCLTGLVLSLYALHVKAARARDRDYRALCDVGTAISCSRVFSSRLPXDTLGLCXDAAELPGVSRWFCLPGLDPVLRAL

SEQ ID NO: 1675 - protein, 236 aa, Homo sapiens
  SITE (55): Xaa equals any of the naturally occurring L-amino acids
MISLPGPLVTNLLRFLFLGLSALAPPSRAQLQLHLPANRLQAVEGGEVVLPAWYXLHGEVSSSQPWEVPFVMWFFKQKEKEDQVLSYINGVTTSKPGVSLVYSMPSRNLSLRLEGLQEKDSGPYSCSVNVQDKQGKSRGHSIKTLELNVLVPPAPPSCRLQGVPHVGANVTLSCQSPRSKPAVQYQWDRQLPSFQTFFAPALDVIRGSLSLTNLSSSMAGVYVCKAHNEVGTANVM

SEQ ID NO: 1676 - protein, 95 aa, Homo sapiens
  SITE (46): Xaa equals any of the naturally occurring L-amino acids
MTSYILISFVLLIGVGCIEKDQSCPVFGGRKRLHLLFVGGQLRQVXLGAPRPPGGQDPSHQRLGRGELPLVRQHHRDLHHRGPHQEGLQVHHQHE

SEQ ID NO: 1677 - protein, 152 aa, Homo sapiens
  SITE (1): Xaa equals any of the naturally occurring L-amino acids
XPSWWGPRWCRSSCGVARTRVVHPVRVADGLDLALLEVGELPAGHALLAVLVVELHVAARLDPANYPSLLLGDGRHDHLGRGPEVGCPVAEHHAGGLIDASGDGVDGGFHINHRDPFPEDSGFASDALNTAHGIQERSDLQGRPAVTEKTRH

SEQ ID NO: 1678 - protein, 11 aa, Homo sapiens
MSGGLSFLLLV

SEQ ID NO: 1679 - protein, 302 aa, Homo sapiens
MARARGSPCPPLPPGRMSWPHGALLFLWLFSPPLGAGGGGVAVTSAAGGGSPPATSCPVACSCSNQASRVICTRRDLAEVPASIPVNTRYLNLQENGIQVIRTDTFKHLRHLEILQLSKNLVRKIEVGAFNGLPSLNTLELFDNRLTTVPTQAFEYLSKLRELWLRNNPIESIPSYAFNRVPSLRRLDLGELKRLEYISEAAFEGLVNLRYLNLGMCNLKDIPNLTALVRLEELELSGNRLDLIRPGSFQGLTSLRKLWLMHAQVATIERNAFDDLKSLEELNLSHNNLMSLPHDLFTPLHR

SEQ ID NO: 1680 - protein, 224 aa, Homo sapiens
  SITE (76): Xaa equals any of the naturally occurring L-amino acids
MARARGSPCPPLPPGRMSWPHGALLFLWLFSPPLGAGGGGVAVTSAAGGGSPPATSCPVACSCSNQASRVICTRRXLAEVPASIPVNTRYLNLQENGIQVIRTDTFKHLRHLEILQLSKNLVRKIEVGAFNGLPSLNTLELFDNRLTTVPTQAFEYLSKLRELWLRNNPIESIPSYAFNRVPSLRRLDLGELKRLEYISEAAFEGLVNLRYLNLGMCNLKDIPN

SEQ ID NO: 1681 - protein, 108 aa, Homo sapiens; identical to SEQ ID NO: 1197

SEQ ID NO: 1682 - protein, 130 aa, Homo sapiens
STCCGWGPLGHSRVRGCHCHLGHVGRHQHFVVTNSTVTNIFGQIPFYTSRQLLVCNPTGQREGPVTWLSHCPAPQMVLGLLFSLGPANTTVFTSAHWLSAVVPGSQWHVSPRSSLIPQHTPKGSVANTLN

SEQ ID NO: 1683 - protein, 122 aa, Homo sapiens
  SITE (19): Xaa equals any of the naturally occurring L-amino acids
  SITE (73): Xaa equals any of the naturally occurring L-amino acids
KAPSSHPGLTCVSLSRLQXSLSLCFPSGPCWAGLLSSLALAGGAPGALPPWQPGQDSKMRTAELVGGSHGPAXGPGEAEPEPTAVVLWTVDPEGGLGQVPAEGPGGLCVPLGPGALVTWTPG

SEQ ID NO: 1684 - protein, 223 aa, Homo sapiens
  SITE (132): Xaa equals any of the naturally occurring L-amino acids
AWYLLRVQVLQLVAAYLSLPSNNLSHSLWEQLCAQGWQTPEIALIDSHKLLRSIILLLMGSDILSTQKAAVETSFLDYGENLVQKWQVLSEVLSCSEKLVCHLGRLGSVSEAKAFCLEALKLTTKLQIPRQXALFLVLKGELELARNDIDLCQSDLQQVLFLLESCTEFGGVTQHLDSVKKVHLQKGKQQAQVPCPPQLPEEELFLRGPALELVPLWPRSLAP

SEQ ID NO: 1685 - protein, 8 aa, Homo sapiens
AWFLVKPE

SEQ ID NO: 1686 - protein, 83 aa, Homo sapiens [sequence omitted]

SEQ ID NO: 1687 - protein, 143 aa, Homo sapiens
MATARPPWMWVLCALITALLLGVTEHVLANNDVSCDHPSNTVPSGSNQDLGAGAGEDARSDDSSSRIINGSDCDMHTQPWQAALLLRPNQLYCGAVLVHPQWLLTAAHLQEESFQSRLGHYSLSQFIESGPEMSRGSIQSRTG

SEQ ID NO: 1688 - protein, 293 aa, Homo sapiens; identical to SEQ ID NO: 1208

SEQ ID NO: 1689 - protein, 85 aa, Homo sapiens
MATARPPWMWVLCALITALLLGVTEHVLANNDVSCDHPSNTVPSGSNRTWELGPGKTPGRMTAAAASSMDPTAICTPSRGRPRCC

SEQ ID NO: 1690 - protein, 293 aa, Homo sapiens; identical to SEQ ID NO: 1208

SEQ ID NO: 1691 - protein, 293 aa, Homo sapiens; identical to SEQ ID NO: 1208

SEQ ID NO: 1692 - protein, 61 aa, Homo sapiens
MATARPPWMWVLCALITALLLGVTEHVLANNDVSCDHPSNTVPSGSNQDLGAGAGGRRPVG

SEQ ID NO: 1693 - protein, 243 aa, Homo sapiens; identical to SEQ ID NO: 1211

SEQ ID NO: 1694 - protein, 154 aa, Homo sapiens
  SITE (150): Xaa equals any of the naturally occurring L-amino acids
MARHGLPLLPLLSLLVGAWLKLGNGQATSMVQLQGGRFLMGTNSPDSRDGEGPVREATVKPFAIDIFPVTNKDFRDFVREKKYRTEAEMFGWSFVFEDFVSDELRNKATQPMKSVLWWLPVEKAFWRQPAGPGSGIRERLEHPVLHVSWXDARA

SEQ ID NO: 1695 - protein, 120 aa, Homo sapiens
  SITE (103): Xaa equals any of the naturally occurring L-amino acids
MGTVSSRRSWWPLPLLLLLLLLLGPAGARAQEDEDGDYEELVLALRSEEDGLAEAPEHGTTATFHRCAKDPWRLPGTYVVVLKEETHLSQSERTARRLQAQAXRRGYLPRSCMSSMAFFL

SEQ ID NO: 1696 - protein, 269 aa, Homo sapiens
  SITE (236): Xaa equals any of the naturally occurring L-amino acids
  SITE (257): Xaa equals any of the naturally occurring L-amino acids
MGTVSSRRSWWPLPLLLLLLLLLGPAGARAQEDEDGDYEELVLALRSEEDGLAEAPEHGTTATFHRCAKDPWRLPGTYVVVLKEETHLSQSERTARRLQAQAARRGYLTKILHVFHGLLPGFLVKMSGDLLELALKLPHVDYIEEDSSVFAQSIPWNLERITPPRYRADEYQPPDGGSLVEVYLLDTSIQSDHREIEGRVMVTDFENVPEEDGTRFHRQASKCDSHGPTWQGWSAXGMPAWPRVPACAACACFPKKXPLLGGPPQKKGG

SEQ ID NO: 1697 - protein, 17 aa, Homo sapiens
GWCSRRDSCWPSPPTMP

SEQ ID NO: 1698 - protein, 45 aa, Homo sapiens
TWWPPCPPAPMGQVGSCFAGLCGQHTRGLHGWPQPSPAAPQMRSC

SEQ ID NO: 1699 - protein, 57 aa, Homo sapiens
MPCTCTWRNWRQWIRPLVAVIYLVSIVVAVPLCVWELQKLEVGIHTKAWFIAGIFLL

SEQ ID NO: 1700 - protein, 107 aa, Homo sapiens
  SITE (92): Xaa equals any of the naturally occurring L-amino acids
MVRYTYSMLSVIGISYAVLTWLSQTLWMPIYPLCVLAEAFAIYQSLPYFESFGTYSTKLPFDLSIYFPYVLKIYLMMLFIGMYFTYSHLYSXRRDILGIFPIKKKKM

SEQ ID NO: 1701 - protein, 37 aa, Homo sapiens
MVRYTYSMLSVIGISYAVLTWAQSNTMDANLSFVCSC

SEQ ID NO: 1702 - protein, 104 aa, Homo sapiens
MLWLLFFLVTAIHAELCQPGAENAFKVRLSIRTALGDKAYAWDTNEEYLFKAMVAFSMRKVPNREATEISHVLLCNVTQRYHSGLWLQTLQKITPFLLLRCNQP

SEQ ID NO: 1703 - protein, 94 aa, Homo sapiens
  SITE (2): Xaa equals any of the naturally occurring L-amino acids
  SITE (30): Xaa equals any of the naturally occurring L-amino acids
  SITE (37): Xaa equals any of the naturally occurring L-amino acids
AXPSSGAPFLLLLLFKLWLVVPGSSTDISXDWEKDFXLDMTEEEVQMALSKVDASGEVSGPGGSEGSEPNGPGCESSPQPAQLSPQEGPCSCLR

SEQ ID NO: 1704 - protein, 47 aa, Homo sapiens
MLSIIPNDRLFINLIFLSNFLPSVLWEPAGQMWYTHVRYPSGRLLSL

SEQ ID NO: 1705 - protein, 80 aa, Homo sapiens; identical to SEQ ID NO: 1226

SEQ ID NO: 1706 - protein, 47 aa, Homo sapiens
ILKSEPKLVSFINILGKEERKKEGGRERKKERKKERKKERKKKKKNS

SEQ ID NO: 1707 - protein, 142 aa, Homo sapiens
  SITE (69): Xaa equals any of the naturally occurring L-amino acids
  SITE (76): Xaa equals any of the naturally occurring L-amino acids
  SITE (90): Xaa equals any of the naturally occurring L-amino acids
  SITE (108): Xaa equals any of the naturally occurring L-amino acids
MYVTLVFRVKGSRLVKPSLCLALLCPAFLVGVVRVAEYRNHWSDVLAGFLTGAAIATFLVTCVVHNFQXRPPSGRXLSPQSAYPRLPGPXFPHLHNGGDHPCPAGCRXGCESSAWMQPGGSHRAAFTGLALPWAGGRPHPKR

SEQ ID NO: 1708 - protein, 89 aa, Homo sapiens
MAKRTFSNLETFLIFLLVMMSAITVALLSLLFITSGTIENHKDLGGHFFSTTQSPPATQGSTAAQRSTATQHSTATQSSNSQLKLLQCL

SEQ ID NO: 1709 - protein, 486 aa, Homo sapiens
MQPSGLEGPGTFGRWPLLSLLLLLLLLQPVTCAYTTPGPPRALTTLGAPRAHTMPGTYAPSTTLSSPSTQGLQEQARALMRDFPLVDGHNDLPLVLRQVYQKGLQDVNLRNFSYGQTSLDRLRDGLVGAQFWSAYVPCQTQDRDALRLTLEQIDLIRRMCASYSELELVTSAKALNDTQKLACLIGVEGGHSLDNSLSILRTFYMLGVRYLTLTHTCNTPWAESSAKGVHSFYNNISGLTDFGEKVVAEMNRLGMMVDLSHVSDAVARRALEVSQAPVIFSHSAARGVCNSARNVPDDILQLLKKNGGVVMVSLSMGVIQCNPSANVSTVADHFDHIKAVIGSKFIGIGGDYDGAGKFPQGLEDVSTYPVLIEELLSRGWSEEELQGVLRGNLLRVFRQVEKVQEENKWQSPLEDKFPDEQLSSSCHSDLSRLRQRQSLTSGQELTEIPIHWTAKLPAKWSVSESSPHMAPVLAVVATFPVLILWL

SEQ ID NO: 1710 - protein, 92 aa, Homo sapiens; identical to SEQ ID NO: 1674
  SITE (61): Xaa equals any of the naturally occurring L-amino acids
  SITE (68): Xaa equals any of the naturally occurring L-amino acids

SEQ ID NO: 1711 - protein, 151 aa, Homo sapiens; identical to SEQ ID NO: 1240

SEQ ID NO: 1712 - protein, 21 aa, Homo sapiens
DLHIKLLEHYCLTSCKKVLQL

SEQ ID NO: 1713 - protein, 67 aa, Homo sapiens
  SITE (13): Xaa equals any of the naturally occurring L-amino acids
PQSPQRGCYSMLXVLSVSHPQPNKWRCVVPRGPFSHCLASRRGVLQGYSFVCTCRLVGPEFFSHVQE

SEQ ID NO: 1714 - protein, 91 aa, Homo sapiens
  SITE (41): Xaa equals any of the naturally occurring L-amino acids
VWRRCVSWRSIRAQVTFPEDFLSLSSSVQFQVIHVLLDPGXTGISTDLLASFGLEYHSWLGAEAAGLIVIYHKVARKLPRGVRKAAGGGRV

SEQ ID NO: 1715 - protein, 190 aa, Homo sapiens
  SITE (25): Xaa equals any of the naturally occurring L-amino acids
MPVPTLCLLWALAMVTRPASAAPMXGPELAQHEELTLLFHGTLQLGQALNGVYRTTEGRLTKARNSLGLYGRTIELLGQEVSRGRDAAQELRASLLETQMEEDILQLQAEATAEVLGEVAQAQKVLRDSVQRLEVQLRSAWLGPAYREFEVLKAHADKQEPTSYGPHRPRQRQRREMVAQQHRLRQIQER

SEQ ID NO: 1716 - protein, 42 aa, Homo sapiens
MEPAMVLKFLSSLPENLFLPSLLFFAWLCWNMVCGSPVSCPY

SEQ ID NO: 1717 - protein, 488 aa, Homo sapiens
  SITE (344): Xaa equals any of the naturally occurring L-amino acids
  SITE (416): Xaa equals any of the naturally occurring L-amino acids
  SITE (429): Xaa equals any of the naturally occurring L-amino acids
  SITE (430): Xaa equals any of the naturally occurring L-amino acids
MILSLLFSLGGPLGWGLLGAWAQASSTSLSDLQSSRTPGVWKAEAEDTSKDPVGRNWCPYPMSKLVTLLALCKTEKFLIHSQQPCPQGAPDCQKVKVMYRMAHKPVYQVKQKVLTSLAWRCCPGYTGPNCEHHDSMAIPEPADPGDSHQEPQDGPVSFKPGHLAAVINEVEVQQEQQEHLLGDLQNDVHRVADSLPGLWKALPGNLTAAVMEANQTGHEFPDRSLEQVLLPHVDTFLQVHFSPIWRSFNQSLHSLTQAIRNLSLDVEANRQAISRVQDSAVARADFQELGAKFEAKVQENTQRVGQLRQDVEERLHAQHFTLHRSISELQADVDTKLKRLHKAXEAPGTNGSLVLATPGAGARPEPDSLQARLGQLQRNLSELHMTTARREEELQYTLEDMRATLTRHVDEIKELXSESDETFDQISKXXRQVEELQVNHTALRELRVILMEKSLIMEENKEEVERQLLELNLTLQHLQGGMPTSSST

SEQ ID NO: 1718 - protein, 60 aa, Homo sapiens; identical to SEQ ID NO: 1261

SEQ ID NO: 1719 - protein, 54 aa, Homo sapiens
MSVWPRSTLLFCLLSLSTGLFLDKLGIIIPILLCGWKLNVIMMCVRCLHSAWRY

SEQ ID NO: 1720 - protein, 215 aa, Homo sapiens
MYLSIIFLAFVSIDRCLQLTHSCKIYRIQEPGFAKMISTVVWLMVLLIMVPNMMIPIKDIKEKSNVGCMEFKKEFGRNWHLLTNFICVAIFLNFSAIILISNCLVIRQLYRNKDNENYPNVKKALINILLVTTGYIICFVPYHIVRIPYTLSQTEVITDCSTRISLFKAKEATLLLAVSNLCFDPILYYHLSKAFRSKVTETFASPKETKVRKKN

SEQ ID NO: 1721 - protein, 77 aa, Homo sapiens
MLLATLLLLLLGGALAHPDRIIFPNHACEDPPAVLLEVQGTLQRPLVRDSRTSPANCTWLTKRVQQMLLFHSYGIAQ

SEQ ID NO: 1722 - protein, 306 aa, Homo sapiens
  SITE (171): Xaa equals any of the naturally occurring L-amino acids
  SITE (180): Xaa equals any of the naturally occurring L-amino acids
  SITE (182): Xaa equals any of the naturally occurring L-amino acids
  SITE (188): Xaa equals any of the naturally occurring L-amino acids
  SITE (208): Xaa equals any of the naturally occurring L-amino acids
  SITE (210): Xaa equals any of the naturally occurring L-amino acids
  SITE (211): Xaa equals any of the naturally occurring L-amino acids
  SITE (218): Xaa equals any of the naturally occurring L-amino acids
  SITE (219): Xaa equals any of the naturally occurring L-amino acids
MALRLLRRAARGAAAAALLRLKASLAADIPRLGYSSSSHHKYIPRRAVLYVPGNDEKKIKKIPSLNVDCAVLDCEDGVAANKKNEARLRIVKTLEDIDLGPTEKCVRVNSVSSGLAEEDLETLLQSRVLPSSLMLPKVESPEEIQWAVCEETLKVGPQVGLFLDAVRFWRXRLSSHIGAXSXKETLDXLYARQKIVVIAKAFGLQAVXLXXIDFRDGXXLLRQSREGAAMGFTGKQVIHPNQIAVVQEQFSPSPEKIKWAEELIAAFKEHQQLGKGAFTFQGSMIDMPLLKQAQNTVTLATSIKEK

SEQ ID NO: 1723 - protein, 40 aa, Homo sapiens
MSGSSLPSALALSLLLVSGSLLPGPGAAQNVRVQSGQDQK

SEQ ID NO: 1724 - protein, 103 aa, Homo sapiens
  SITE (77): Xaa equals any of the naturally occurring L-amino acids
MAFLLERSGTLLICSMWWHHGYSNITGTEGERRNLKRNKTNFRRFQDGRIGTAPVYSSQCERCRRWVISAFPTEQTXHQKIISHAWLGGSHAHGASLIASTAV

SEQ ID NO: 1725 - protein, 957 aa, Homo sapiens [sequence omitted]

SEQ ID NO: 1726 - protein, 103 aa, Homo sapiens
MLTFFMAFLFNWIGFFLSFCLTTSAAGRYGAISGFGLSLIKWILIVRFSTYFPGYFDGQYWLWWVFLVLGFLLFLRGFINYAKVRKMPETFSNLPRTRVLFIY

SEQ ID NO: 1727 - protein, 198 aa, Homo sapiens; identical to SEQ ID NO: 965
  SITE (29): Xaa equals any of the naturally occurring L-amino acids

SEQ ID NO: 1728 - protein, 106 aa, Homo sapiens
  SITE (3): Xaa equals any of the naturally occurring L-amino acids
MAXALAALAAVEPACAAGTSSCRMKKSLENLNRLQVMLLHLTAAFLQRAQFSTYFPGYFDGQYWLWWVFLVLGFLLFLRGFINYAKVRKMPETFSNLPRTRVLFIY

SEQ ID NO: 1729 - protein, 68 aa, Homo sapiens
  SITE (3): Xaa equals any of the naturally occurring L-amino acids
  SITE (16): Xaa equals any of the naturally occurring L-amino acids
  SITE (51): Xaa equals any of the naturally occurring L-amino acids
MAXALAALAAARAACXAGTSSCRMKKSLENLNRLQVMLLHLTAAFLQRAHXILTTRMSLGFQSPHLTM

SEQ ID NO: 1730 - protein, 23 aa, Homo sapiens
  SITE (3): Xaa equals any of the naturally occurring L-amino acids
  SITE (13): Xaa equals any of the naturally occurring L-amino acids
  SITE (16): Xaa equals any of the naturally occurring L-amino acids
MAXALAALAAVEXPAXPVPAVAE

SEQ ID NO: 1731 - protein, 60 aa, Homo sapiens
MRKVTISKKHALLLCFQLFRCLLSMYIWITFVLDGSCGIHCSLKPVSFPCTYHSVHSSTS

SEQ ID NO: 1732 - protein, 188 aa, Homo sapiens
  SITE (85): Xaa equals any of the naturally occurring L-amino acids
  SITE (104): Xaa equals any of the naturally occurring L-amino acids
  SITE (164): Xaa equals any of the naturally occurring L-amino acids
MRPAFALCLLWQALWPGPGGGEHPTADRAGCSASGACYSLHHATMKRQAAEEACILRGGALSTVRAGAELRAVLALLRAGPGPGXGSKDLLFWVALERRRSHCXLENEPLRGFSWLSSDPGGLESDTLQWVEEPQRSCTARRWVLPGHRWGRARSWKEMRCHLXANATCASTSLRSCVLRRAPGPPLT

SEQ ID NO: 1733 - protein, 57 aa, Homo sapiens
MLETLSQFISILFVLLWIISDLILCFLKCGNPGTLDMVLPIWTNQYIHSSRSILSFI

SEQ ID NO: 1734 - protein, 44 aa, Homo sapiens [sequence omitted]

SEQ ID NO: 1735 - protein, 44 aa, Homo sapiens [sequence omitted]

SEQ ID NO: 1736 - protein, 48 aa, Homo sapiens
MRHVAIVTMIVVLSPPVLASSLKPPLFIDTYFMFGKRCSRWDTPACSK

SEQ ID NO: 1737 - protein, 36 aa, Homo sapiens; identical to SEQ ID NO: 1336

SEQ ID NO: 1738 - protein, 28 aa, Homo sapiens
LLLCKFKKVNYFLKVLISNFSIWAYDHH

SEQ ID NO: 1739 - protein, 34 aa, Homo sapiens
CKWVQNGGHPNVESSKYHCHEPKASLYTLEESTL

SEQ ID NO: 1740 - protein, 121 aa, Homo sapiens
MCFLMIFTFLVCWMPYIVICFLVVNGHGHLVTPTISIVSYLFAKSNTVYNPVIYVFMIRKFRRSLLQLLCLRLLRCQRPAKDLPAAGSEMQIRPIVMSQKDGDRPKKSDFQLFFHHFYHHQ

SEQ ID NO: 1741 - protein, 49 aa, Homo sapiens
  SITE (41): Xaa equals any of the naturally occurring L-amino acids
MGAHSFGFQLFMSVSVLWGRLCLYGRFSVITFASPPTTFMXIQCCSHCS

SEQ ID NO: 1742 - protein, 79 aa, Homo sapiens
SGWQVPSSVKHLPYDNLRSHCVADEGETEVEGTRATWVEHSGRPGVGSGRPPGTSLTTLPLLLTHLSLTCPLGGDFSKR

SEQ ID NO: 1743 - protein, 104 aa, Homo sapiens; identical to SEQ ID NO: 1348

SEQ ID NO: 1744 - protein, 148 aa, Homo sapiens [sequence omitted]

SEQ ID NO: 1745 - protein, 88 aa, Homo sapiens
MKIAVLFCFFLLIIFQTDFGKNEEIPRKQRRKIYHRRLRKSSTSHKHRSNRQLGIPQTTVFTPVARLPIVNFDYSMEEKFESFQVFLE

SEQ ID NO: 1746 - protein, 20 aa, Homo sapiens
IFALSLSFYTCIHIHTHRHT

SEQ ID NO: 1747 - protein, 484 aa, Homo sapiens
MPRHLSGLLLLLWPLLLLLPPTPAAPGPLARPGLRRLGTRGPGGSPGRRPGSAVPTRAPYSGAGQPGGARGAGVCRSRPLDLVFIIDSSRSVRPLEFTKVKTFVSQIIDTLDIGAADTRVAVVNYASTVKIEFHLQTHSDKQSLKQAVARITPLSTGTMSGLAIQTAMDEAFTVEAGARGPTSNIPKVAIIVTDGRPQDQVNEVAARARASGIELYAVGVDRADMESLKMMASEPLDEHVFYVETYGVIEKLSSRFQETFCALDPCVLGTHRCQHVCVSDGEGKHHCECSQGYSLNADQKTCSAIDKCALNTHGCEHICVNDRTGSYHCECYEGYTLNQDRKTCSAQDQCAFGTHGCQHICVNDRDGSHHCECYEGYTLNADNKTCSVRSECAGGSHGCQHLCVDDGPAAYHCDCFPGYTLTEDRRTCAAIEEARRLVSTEDACGCEATLAFQERASSYLQRLNAKLDDILGKLQADAYGQIHR

SEQ ID NO: 1748 - protein, 266 aa, Homo sapiens
  SITE (45): Xaa equals any of the naturally occurring L-amino acids
  SITE (47): Xaa equals any of the naturally occurring L-amino acids
  SITE (51): Xaa equals any of the naturally occurring L-amino acids
  SITE (134): Xaa equals any of the naturally occurring L-amino acids
  SITE (183): Xaa equals any of the naturally occurring L-amino acids
  SITE (222): Xaa equals any of the naturally occurring L-amino acids
  SITE (224): Xaa equals any of the naturally occurring L-amino acids
  SITE (255): Xaa equals any of the naturally occurring L-amino acids
MPRHLSGLLLLLWPLLLLLPPTPAAPGPLARPGLRRLGTRGPGGXPXRRPXSAVPTRAPYSGAGQPGGARGAGVCRSRPLDLVFIIDSSRSVRPLEFTKVKTFVSQIIDTLDIGAADTRVAVVNYASTVKIEFXLQTHSDKQSLKQAVARITPLSTGTMSGLAIQTAMDEAFTVEAGARGPTXNIPKVAIIVTDGRPQDQVNEVAARARASGIELYAVGVDXAXMESLQDEWPAKPLDEHVFYVETYGVIEKPSXRFQETLLRSWN

SEQ ID NO: 1749 - protein, 5 aa, Homo sapiens
VLLIL

SEQ ID NO: 1750 - protein, 84 aa, Homo sapiens
KMHFNKNKSILKSFSFVRGNMNEIHSYLKTEYFTAKTLNISRAYHILNTLWSCSYFNIPGSGGQLACLWLRICFHACFLSFFYL

SEQ ID NO: 1751 - protein, 115 aa, Homo sapiens
  SITE (50): Xaa equals any of the naturally occurring L-amino acids
  SITE (70): Xaa equals any of the naturally occurring L-amino acids
  SITE (86): Xaa equals any of the naturally occurring L-amino acids
  SITE (100): Xaa equals any of the naturally occurring L-amino acids
MQPPSLLLLVLGLLAAPAAALVRIPLHKFTSVRRTMSELGGPVEDLIARXPISKYAQGVPSVAGGPVPEXLKETTWNAQILRGKFXHPGTPPRKLLPPVXPFEKRGSFPTLLGSP

SEQ ID NO: 1752 - protein, 92 aa, Homo sapiens
  SITE (43): Xaa equals any of the naturally occurring L-amino acids
  SITE (69): Xaa equals any of the naturally occurring L-amino acids
  SITE (70): Xaa equals any of the naturally occurring L-amino acids
LVVLGVCAAQHELTPRLRAGVPVQVEREDVLLHQLLLHQVIKXGKHIVDRDAGVGHAQDAVELGRDEGXXRLLGGFPERLPLHLDASQARQT

SEQ ID NO: 1753 - protein, 368 aa, Homo sapiens
  SITE (310): Xaa equals any of the naturally occurring L-amino acids
  SITE (365): Xaa equals any of the naturally occurring L-amino acids
MQPSSLLPLALCLLAAPASALVRIPLHKFTSIRRTMSEVGGSVEDLIAKGPVSKYSQAVPAVTEGPIPEVLKNYMDAQYYGEIGIGTPPQCFTVVFDTGSSNLWVPSIHCKLLDIACWIHHKYNSDKSSTYVKNGTSFDIHYGSGSLSGYLSQDTVSVPCQSASSASALGGVKVERQVFGEATKQPGITFIAAKFDGILGMAYPRISVNNVLPVFDNLMQQKLVDQNIFSFYLSRDPDAQPGGELMLGGTDSKYYKGSLSYLNVTRKAYWQVHLDQVEVASGLTLCKEGCEAIVDTGTSLMVGPVDEVRXLQKAIGAVPLIQGEYMIPCEKVSTLPAITLKLGGKGYKLSPEDYTLKVSQAGKTXCLS

SEQ ID NO: 1754 - protein, 72 aa, Homo sapiens
MLVLFKFLPLTSSGRFLSVTLYHRVHHQTFFAGAKSFSPASTLNLYICSSQFQSLQKLYCGVIPVLRYASIE

SEQ ID NO: 1755 - protein, 112 aa, Homo sapiens
  SITE (103): Xaa equals any of the naturally occurring L-amino acids
  SITE (112): Xaa equals any of the naturally occurring L-amino acids
MKTLLLLVGLLLTWENGRVLGDQMVSDTELQEMSTEGSKYINREIKNALKGVKQIKTLIEQTNEERKSLLTNLEEAKKKKEDALNDTKDSEMKLKASPGVFNXTLDGPLGGX

SEQ ID NO: 1756 - protein, 112 aa, Homo sapiens
  SITE (71): Xaa equals any of the naturally occurring L-amino acids
  SITE (103): Xaa equals any of the naturally occurring L-amino acids
  SITE (112): Xaa equals any of the naturally occurring L-amino acids
MKTLLLLVGLLLTWENGRVLGDQMVSDTELQEMSTEGSKYINREIKNALKGVKQIKTLIEQTNEERKSLLXNLEEAKKKKEDALNDTKDSEMKLKASPGVFNXTLDGPLGGX

SEQ ID NO: 1757 - protein, 139 aa, Homo sapiens
MKTLLLLVGLLLTWENGRVLGDQMVSDTELQEMSTEGSKYINREIKNALKGVKQIKTLIEQTNEERKSLLTNLEEAKKKKEDALNDTKDSEMKLKASQGVCNDTMMALWEECKPCLKQTWGKGLRPSLQKQHRAGWPPG

SEQ ID NO: 1758 - protein, 7 aa, Homo sapiens
LLVVLLS

SEQ ID NO: 1759 - protein, 14 aa, Homo sapiens
LLLVGLQQLVVQAW

SEQ ID NO: 1760 - protein, 288 aa, Homo sapiens
  SITE (10): Xaa equals any of the naturally occurring L-amino acids
  SITE (15): Xaa equals any of the naturally occurring L-amino acids
  SITE (268): Xaa equals any of the naturally occurring L-amino acids
  SITE (271): Xaa equals any of the naturally occurring L-amino acids
  SITE (273): Xaa equals any of the naturally occurring L-amino acids
  SITE (274): Xaa equals any of the naturally occurring L-amino acids
  SITE (276): Xaa equals any of the naturally occurring L-amino acids
  SITE (286): Xaa equals any of the naturally occurring L-amino acids
FSSSACPSVXSLFVXLGKNPHDAQGHPRASEDQPSSGKPVTSYPGECGFVFTKEASLEIRDMLLANKVPAAARAGAIAPCEVTVPAQNTGLGPEKTSFFQALGITTKISRGTIEILSDVQLIKTGDKVGASEATLLNMLNISPFSFGLIIQQVFDNGSIYNPEVLDITEETLHSRFLEGVRNVASVCLQIGYPTVASVPHSIINGYKRVLALSVETDYTFPLAEKVKAFLADPSAFVAAAPVAAATTAAPAAAAAPAKVEAKEESEEXDEXIXXSXISKSNNSSQXIV

SEQ ID NO: 1761 - protein, 67 aa, Homo sapiens
MAPSGPLLLVLLVPLAAARPGPTSVPAGAAACPCGGTSCRGWGAGPTPGRTSTCPHLTCPRAGTGAT

SEQ ID NO: 1762 - protein, 14 aa, Homo sapiens
PQGPNDVTAKLLCP

SEQ ID NO: 1763 - protein, 6 aa, Homo sapiens
MLLLYL

SEQ ID NO: 1764 - protein, 554 aa, Homo sapiens
GGGYALALLVLLLLGPGGWCLAEPPRDSLREELVITPLPSGDVAATFQFRTRWDSELQREGVSHYRLFPKALGQLISKYSLRELHLSFTQGFWRTRYWGPPFLQAPSDTDHYFLRYAVLPREVVCTENLTPWKKLLPCSSKAGLSVLLKADRLFHTSYHSQAVHIRPVCRNARCTSISWELRQTLSVVFDAFITGQGKKDWSLFRMFSRTLTEPCPLASESRVYVDITTYNQDNETLEVHPPPTTTYQDVILGTRKTYAIYDLLDTAMINNSRNLNIQLKWKRPPENEAPPVPFLHAQRYVSGYGLQKGELSTLLYNTHPYRAFPVLLLDTVPWYLRLYVHTLTITSKGKENKPSYIHYQPAQDRLQPHLLEMLIQLPANSVTKVSIQFERALLKWTEYTPDPNHGFYVSPSVLSALVPSMVAAKPVDWEESPLFNSLFPVSDGSNYFVRLYTEPLLVNLPTPDFSMPYNVICLTCTVVAVCYGSFYNLLTRTFPHRGAPHRWPGQAAGQPYPARPSVPPTLILALSSSCSCRFSLGRGAQGLFLPLALLRVGF

SEQ ID NO: 1765 - protein, 5 aa, Homo sapiens
GEIFL

SEQ ID NO: 1766 - protein, 453 aa, Homo sapiens
  SITE (432): Xaa equals any of the naturally occurring L-amino acids
MRMASIMVWVMIIMVILVLGYGIFHCYMEYSRLRGEAGSDVSLVDLGFQTDFRVYLHLRQTWLAFMIILSILEVIIILLLIFLRKRILIAIALIKEASRAVGYVMCSLLYPLVTFFLLCLCIAYWASTAVFLSTSNEAVYKIFDDSPCPFTAKTCNPETFPSSNESRQCPNARCQFAFYGGESGYHRALLGLQIFNAFMFFWLANFVLALGQVTLAGAFASYYWALRKPDDLPAFPLFSAFGRALRYHTGSLAFGALILAIVQIIRVILEYLDQRLKAAENKFAKCLMTCLKCCFWCLEKFIKFLNRNAYIMIAIYGTNFCTSARNAFFLLMRNIIRVAVLDKVTDFLFLLGKLLIVGSVGILAFFFFTHRIRIVQDTAPPLNYYWVPILTVIVGSYLIAHGFFSVYGMCVDTLFLCFLEDLERNDGSAERXYFMSSTLKKLLNKTNKKAAES

SEQ ID NO: 1767 - protein, 96 aa, Homo sapiens
  SITE (25): Xaa equals any of the naturally occurring L-amino acids
  SITE (77): Xaa equals any of the naturally occurring L-amino acids
  SITE (79): Xaa equals any of the naturally occurring L-amino acids
AAREGAPPPCPTSAIGRASLSLRDXGRGLRDARREKRRGVRGQDGGDYGWCGPARGRGVAAKGTAEGPTGENRAQGXKXGVRVAVEASSVRGPGRA

SEQ ID NO: 1768 - protein, 77 aa, Homo sapiens
  SITE (8): Xaa equals any of the naturally occurring L-amino acids
  SITE (9): Xaa equals any of the naturally occurring L-amino acids
  SITE (10): Xaa equals any of the naturally occurring L-amino acids
  SITE (16): Xaa equals any of the naturally occurring L-amino acids
LGGYALSXXXNRVTDXVMIYFFIIIVEYFYGKIFVVLIIPIKIMPNTKYEFYDVHFVLGIKRKKHTSWKSVSCFLLL

SEQ ID NO: 1769 - protein, 84 aa, Homo sapiens
TYSFCVCERAFVFGSVPRAEVEQGCTYHGKGGRKENWIACDLWWNLFLLPRPFRPCLISVGHFRLWQGRAGLQSEVPASSLEHN

SEQ ID NO: 1770 - protein, 469 aa, Homo sapiens
MRPPGFRNFLLLASSLLFAGLSAVPQSFSPSLRSWPGAACRLSRAESERRCRAPGQPPGAALCHGRGRCDCGVCICHVTEPGMFFGPLCECHEWVCETYDGSTCAGHGKCDCGKCKCDQGWYGDACQYPTNCDLTKKKSNQMCKNSQDIICSNAGTCHCGRCKCDNSDGSGLVYGKFCECDDRECIDDETEEICGGHGKCYCGNCYCKAGWHGDKCEFQCDITPWESKRRCTSPDGKICSSRGTCVCGECTCHDVDPTGDWGDIHGDTCECDERDCRAVYDRYSDDFCSGHGQCNCGRCDCKAGWYGKKCEHPQSCTLSAEESIRKCQGSSDLPCSGRGKCECGKCTCYPPGDRRVYGKTCECDDRRCEDLDGVVCGGHGTCSCGRCVCERGWFGKLCQHPRKCNMTEEQSKNLCESADGILCSGKGSCHCGKCICSAEEWYISGEFCDCDDRDCDKHDGLICTREWNM

SEQ ID NO: 1771 - protein, 211 aa, Homo sapiens
  SITE (45): Xaa equals any of the naturally occurring L-amino acids
  SITE (195): Xaa equals any of the naturally occurring L-amino acids
MRLFLWNAVLTLFVTSLIGALIPEPEVKIEVLQKPFICHRKTKGXDLMLVHYEGYLEKDGSLFHSTHKHNNGQPIWFTLGILEALKGWDQGLKGMCVGEKRKLIIPPALGYGKEGKGKIPPESTLIFNIDLLEIRNGPRSHESFQEMDLNDDWKLSKDEVKAYLKKEFEKHGAVVNESHHDALVEDIFDKEDEDXYGFISAREFTYKHDEL

SEQ ID NO: 1772 - protein, 40 aa, Homo sapiens; identical to SEQ ID NO: 1383

SEQ ID NO: 1773 - protein, 61 aa, Homo sapiens
MQGKFMKVQVYRFLKYLLMLLCMFVNRGMSKDSTKKPGQEKLKVSLGSILNMKSQRPLSWC

SEQ ID NO: 1774 - protein, 315 aa, Homo sapiens
MPLTLLILSCLAELTMAEAEGNASCTVSLGGANMAETHKAMILQLNPSENCTWTIERPENKSIRIIFSYVQLDPDGSCESENIKVFDGTSSNGPLLGQVCSKNDYVPVFESSSSTLTFQIVTDSARIQRTVFVFYYFFSPNISIPNCGGYLDTLEGSFTSPNYPKPHPELAYCVWHIQVEKDYKIKLNFKEIFLEIDKQCKFDFLAIYDGPSTNSGLIGQVCGRVTPTFESSSNSLTVVLSTDYANSYRGFSASYTSIYAENINTTSLTCSSDRMRVIISKSYLEAFNSNGNNLQLKDPTWQTKIIKCCGIFCPS

SEQ ID NO: 1775 - protein, 72 aa, Homo sapiens
MPLTLLILSCLADWTMAEAEGNASCTVSLGGANMAETHKAMILQLNPSENCTWTIERPENKSIRIIFSYVPA

SEQ ID NO: 1776 - protein, 131 aa, Homo sapiens [sequence omitted]

SEQ ID NO: 1777 - protein, 49 aa, Homo sapiens; identical to SEQ ID NO: 1392

SEQ ID NO: 1778 - protein, 173 aa, Homo sapiens
MVFLKFFCMSFFCHLCQGYFDGPLYPEMSNGTLHHYFVPDGDYEENDDPEKCQLLFRVSDHRRCSQGEGSQVGSLLSLTLREEFTVLGHQVEGCWARAGGHQQKHLLRPRRGRELWQVPAAGVPPDRGMPTPTRTNPSLSWRASSSRARNRTAGRRAGSTRTFWECWSTPGPC

SEQ ID NO: 1779 - protein, 51 aa, Homo sapiens [sequence omitted]

SEQ ID NO: 1780 - protein, 48 aa, Homo sapiens [sequence omitted]

SEQ ID NO: 1781 - protein, 10 aa, Homo sapiens
IYQHFSLWLG

SEQ ID NO: 1782 - protein, 4 aa, Homo sapiens
MFKM

SEQ ID NO: 1783 - protein, 80 aa, Homo sapiens; identical to SEQ ID NO: 1401

SEQ ID NO: 1784 - protein, 145 aa, Homo sapiens
DPSGSFMGRSVMMRILGSPVFFPMHDTSVCLTYPNFYTVVSPTGSRPPSRNWNSETPGDEELGFEAAVAALGMKTTVSEAEHPLLCEGTRREKGDLALALMITYKDDQAKLKKKISRAWWRAPVVPATREAEVGELLEPRSLRLQ

SEQ ID NO: 1785 - protein, 115 aa, Homo sapiens
MVPNWIQGRWDVLLCVLTVGVLPSIGSRGGWFGTQVPCLIPGALASLHRGTALQLSYPFSMAGRTAERPCSMTNHSFHLLSIYWELGTVLSVKRVLTHLLQQPGKAVLPLAPAQS

SEQ ID NO: 1786 - protein, 174 aa, Homo sapiens [sequence omitted]

SEQ ID NO: 1787 - protein, 228 aa, Homo sapiens
  SITE (92): Xaa equals any of the naturally occurring L-amino acids
  SITE (134): Xaa equals any of the naturally occurring L-amino acids
  SITE (170): Xaa equals any of the naturally occurring L-amino acids
  SITE (195): Xaa equals any of the naturally occurring L-amino acids
  SITE (205): Xaa equals any of the naturally occurring L-amino acids
  SITE (209): Xaa equals any of the naturally occurring L-amino acids
  SITE (214): Xaa equals any of the naturally occurring L-amino acids
MVPNWIQGRWDVLLCVLTVGVLPSIGSRGGWFGTQVPCLIPGALASLHRGTALQLSYPFSMAGRTAERPCSMTNHSFHLLSIYWELGTVLSXKRVLTHLLQQPGKAGSSVSPCSKLGDLEHRRSSAWLKAHSSXVQILCPSWHPSLGGSGVGSLQSVPGGWMTKLQPSRXPTISIAQWSQKETDHFTDQRNKGAXLLNPGASDRXKPEXRTKKXPVNSEPGETLPFTN

SEQ ID NO: 1788 - protein, 84 aa, Homo sapiens
DNFLLGVAWFFRGRGSAHVGVVSRQKQWEEGTAKHAAWDYGCPQSCSFSKGVFCLFLRQGHTLSPRMECSGPILAHCNLELLGS

SEQ ID NO: 1789 - protein, 69 aa, Homo sapiens
MSRKSLAFPIICSYLCFLTVATCSIACTTVFFANLRHTRYICIELSALETSGVISPQINNVPEVHGKYS

SEQ ID NO: 1790 - protein, 52 aa, Homo sapiens
  SITE (36): Xaa equals any of the naturally occurring L-amino acids
  SITE (37): Xaa equals any of the naturally occurring L-amino acids
MQRLGKAPGTWQAISKCWLLLLLSLPFSQSIIISLXXGTMSYLPLYFPQYFP

SEQ ID NO: 1791 - protein, 86 aa, Homo sapiens
SLKHFWSQGFWIKDTQCATCRMVVARWEERMESYCLMIQCFRLGRWKVLEMCDGYGCATMGRYLVLLNCAHLKMVKMINFVYVLKQ

SEQ ID NO: 1792 - protein, 54 aa, Homo sapiens; identical to SEQ ID NO: 1414

SEQ ID NO: 1793 - protein, 47 aa, Homo sapiens
MKTHLLMFLLSCMARCTGIVPKRPQPAFPLRGKEKKKLLFIFTFFQH

SEQ ID NO: 1794 - protein, 102 aa, Homo sapiens
MTVRRLSLLCRDLWALWLLLKAGAVRGARAGPRLPGRCCGATCGDAGRGWTFWAQPCPQKLLGQKPGAGGCRGWVLGWVPPRPEEPCSLAGKVCTGLARWMV

SEQ ID NO: 1795 - protein, 53 aa, Homo sapiens
  SITE (41): Xaa equals any of the naturally occurring L-amino acids
MCKAVCKHRLRLFAVSSFSLGLGWVCVLVLMLWPVRLSLAXRPVQLQQRRSHC

SEQ ID NO: 1796 - protein, 575 aa, Homo sapiens
MRVLVVTIAPIYWALARESGEALNGHSLTGGKFRQESHVEFATGELLTMTQWPGVWIPMASCSSTWWSMALSPDSLADADLQVQDFEEHYVQTGPGQLFVGSTQRFFQGGLPSFLRCNHSIQYNAARGPQPQLVQHLRASAISSAFDPEAEALRFQLATALQAEENEVGCPEGFELDSQGAFCVDVDECAWDAHLCREGQRCVNLLGSYRCLPDCGPGFRVADGAGCEDVDECLEGLDDCHYNQLCENTPGGHRCSCPRGYRMQGPSLPCLDVNECLQLPKACAYQCHNLQGSYRCLCPPGQTLLRDGKACTSLERNGQNVTTVSHRGPLLPWLRPWASIPGTSYHAWVSLRPGPMALSSVGRAWCPPGFIRQNGVCTDLDECRVRNLCQHACRNTEGSYQCLCPAGYRLLPSGKNCQDINECEEESIECGPGQMCFNTRGSYQCVDTPCPATYRQGPSPGTCFRRCSQDCGTGGPSTLQYRLLPLPLGVRAHHDVARLTAFSEVGVPANRTELSMLEPDPRSPFALRPLRAGLGAVYTRRALTRAGLYRLTVRAAAPRHQSVFVLLIAVSPYPY

SEQ ID NO: 1797 - protein, 146 aa, Homo sapiens
MRVLVVTIAPIYWALARESGEALNGHSLTGGKFRQSHTWSLLQGAAHDDPVARGLDPDGLLLLDVVVNGVVPGRAWLTQIFKCRTLKKHYVQTRAWPAVRGLHTALLPGRPPLVPTLQPQHPVQRGPGPPAPAGAAPAGLSYQLGL

SEQ ID NO: 1798 - protein, 48 aa, Homo sapiens
  SITE (42): Xaa equals any of the naturally occurring L-amino acids
MWDTFVRDRDFSAYLFLHLLPPLSACGLNASLYTATPIVWVXHTSPQD

SEQ ID NO: 1799 - protein, 45 aa, Homo sapiens
  SITE (43): Xaa equals any of the naturally occurring L-amino acids
MQAPLQDCGRSVSLRLACVLAPLTTSSRGCHLQLPQDKGKARXDS

SEQ ID NO: 1800 - protein, 305 aa, Homo sapiens
MGILLGLLLLGHLTVDTYGRPILEVPESVTGPWKGDVNLPCTYDPLQGYTQVLVKWLVQRGSDPVTIFLRDSSGDHIQQAKYQGRLHVSHKVPGDVSLQLSTLEMDDRSHYTCEVTWQTPDGNQVVRDKITELRVQKHSSKLLKTKTEAPTTMTYPLKATSTVKQSWDWTTDMDGYLGETSAGPGKSLPVFAIILIISLCCMVVFTMAYIMLCRKTSQQEHVYEAARAHAREANDSGETMRVAIFASGCSSDEPTSQNLGNNYSDEPCIGQEYQIIAQINGNYARLLDTVPLDYEFLATEGKSVC

SEQ ID NO: 1801 - protein, 97 aa, Homo sapiens
MYRAIDSFPRWRSYFYFITLIFFLAWLVKNVFIAVIIETFAEIRVQFQQMWGSRSSTTSTATTQMFHEDAAGGWQLVAVGCQQAPGTRPSLPPGAVQ

SEQ ID NO: 1802 - protein, 219 aa, Homo sapiens [sequence omitted]

SEQ ID NO: 1803 - protein, 219 aa, Homo sapiens
  SITE (104): Xaa equals any of the naturally occurring L-amino acids
  SITE (197): Xaa equals any of the naturally occurring L-amino acids
MEMASKMKDTGFIVFAVLLLVSCLILIFVIAPRYGQRNILIYIIICSVIGAFSVAAVKGLGITIKNFFQGLPVVRHPLPYILSLILALSLSTQVNFLNRALDIXNTSLVFPIYYVFFTTVVVTSSIILFKEWYSMSAVDIAGTLSGFVTIILGVFMLHAFKDLDISCASLPHMHKNPPPSPAPEPTVIRLEDKNVLXDNIELASTSSPEEKPKVFIIHS

SEQ ID NO: 1804 - protein, 121 aa, Homo sapiens
MGLWLGMLACVFLATAAFVAYTARLDWKLAAEEAKKHSGRQQQQRAESTATRPGPEKAVLSSVATGSSPGITLTTYSRSECHVDFFRTPEEAHALSAPTSRLSVKQLVIRRGAALGAASAH

SEQ ID NO: 1805 - protein, 218 aa, Homo sapiens
  SITE (139): Xaa equals any of the naturally occurring L-amino acids
  SITE (217): Xaa equals any of the naturally occurring L-amino acids
MVSWMICRLVVLVFGMLCPAYASYKAVKTKNIREYVRWMMYWIVFALFMAAEIVTDIFISWFPFYYEIKMAFVLWLLSPYTKGASCFTASLSTRPCPAMRRRSTRTSCRPRSAATRPCSASGSGASTLPPPLLCRLPPXVRGRWPAGCGASPCRTCAPSLTHLPLPTMTPSTWRTRCPTGGHPLGTGPGACRTATPRMSVGQILRQSPGRQPGPERXP

SEQ ID NO: 1806 - protein, 58 aa, Homo sapiens
MVISIFFSLPFSTSAYTLIAPNINRRNEIQRIADRSWPTWRSGRSRTELNRFTWCPDG

SEQ ID NO: 1807 - protein, 59 aa, Homo sapiens; identical to SEQ ID NO: 1450

SEQ ID NO: 1808 - protein, 327 aa, Homo sapiens
  SITE (300): Xaa equals any of the naturally occurring L-amino acids
MWRPSVLLLLLLLRHGAQGKPSPDAGPHGQGRVHQAAPLSDAPHDDAHGNFQYDHEAFLGREVAKEFDQLTPEESQARLGRIVDRMDRAGDGDGWVSLAELRAWIAHTQQRHIRDSVSAAWDTYDTDRDGRVGWEELRNATYGHYAPGEEFHDVEDAETYKKMLARDERRFRVADQDGDSMATREELTAFLHPEEFPHMRDIVIAETLEDLDRNKDGYVQVEEYIADLYSAEPGEEEPAWVQTERQQFRDFRDLNKDGHLDGSEVGHWVLPPAQDQPLVEANHLLHESDTDKDGRLSKAXILGNWNMFVGSQATNYGEDLTRHHDEL

SEQ ID NO: 1809 - protein, 184 aa, Homo sapiens
  SITE (140): Xaa equals any of the naturally occurring L-amino acids
  SITE (145): Xaa equals any of the naturally occurring L-amino acids
  SITE (146): Xaa equals any of the naturally occurring L-amino acids
  SITE (148): Xaa equals any of the naturally occurring L-amino acids
  SITE (165): Xaa equals any of the naturally occurring L-amino acids
MWRPSVLLLLLLLRHGAQGKPSPDAGPHGQGRVHQAAPLSDAPHDDAHGNFQYDHEAFLGREVAKEFDQLTPEESQARLGRIVDRMDRAGDGDGWVSLAELRAWIAHTQQRHIRDSVSAAWDTYDTDRDGRVGWEELRNXTYGHXXPXEEFHDVEDAETYKKMLXRDERRFRVADQDGDSMATR

SEQ ID NO: 1810 - protein, 171 aa, Homo sapiens
  SITE (151): Xaa equals any of the naturally occurring L-amino acids
MYSLHSWVGLIAVICYLLQLLSGFSVFLLPWAPLSLRAFLMPIHVYSGIVIFGTVIATALMGLTEKLIFSLRDPAYSTFPPEGVFVNTLGLLILVFGALIFWIVTRPQWKRPKEPNSTILHPNGGTEQGARGSMPAYSGNNMDKSDSELNXEVAARKRNLALDEAGQRSTM

SEQ ID NO: 1811 - protein, 509 aa, Homo sapiens
MTWRMGPRFTMLLAMWLVCGSEPHPHATIRGSHGGRKVPLVSPDSSRPARFLRHTGRSRGIERSTLEEPNLQPLQRRRSVPVLRLARPTEPPARSDINGAAVRPEQRPAARGSPREMIRDEGSSARSRMLRFPSGSSSPNILASFAGKNRVWVISAPHASEGYYRLMMSLLKDDVYCELAERHIQQIVLFHQAGEEGGKVRRITSEGQILEQPLDPSLIPKLMSFLKLEKGKFGMVLLKKTLQVEERYPYPVRLEAMYEVIDQGPIRRIEKIRQKGFVQKCKASGVEGQVVAEGNDGGGGAGRPSLGSEKKKEDPRRAQVPPTRESRVKVLRKLAATAPAFPQPPSTPRATTLPPAPATTVTRSTSRAVTVAARPMTTTAFPTTQRPWTPSPSHRPPTTTEVITARRPSVSENLYPPSRKDQHRERPQTTRRPSKATSLESFTNAPPTTISEPSTRAAGPGRFRDNRMDRREHGHRDPNVVPGPPKPAKEKPPKKKAQDKILSNEYEEV

SEQ ID NO: 1812 - protein, 554 aa, Homo sapiens
MGPRFTMLLAMWLVCGSEPHPHATIRGSHGGRKVPLVSPDSSRPARFLRHTGRSRGIERSTLEEPNLQPLQRRRSVPVLRLARPTEPPARSDINGAAVRPEQRPAARGSPREMIRDEGSSARSRMLRFPSGSSSPNILASFAGKNRVWVISAPHASEGYYRLMMSLLKDDVYCELAERHIQQIVLFHQAGEEGGKVRRITSEGQILEQPLDPSLIPKLMSFLKLEKGKFGMVLLKKTLQVEERYPYPVRLEAMYEVIDQGPIRRIEKIRQKGFVQKCKASGVEGQVVAEGNDGGGGAGRPSQGSEKKKEDPRRAQVPPTRESRVKVLRKLAATAPAFPQPPSTPRATTLTPAPATTVTRSTSRAGNRCCKTYDHHWLSHHAEALDPLTLPTGPLQPLRVITARRPSVSRESLPSIPGRISTGRGHRQPGGPARPTSLESFTNAPPTTISEPSTRAAGPGRFRDNRMDRREHGHRDPNVVPGPPKPAKEKPPKKKAQDKILSNEYEEKYDLSRPTASQLEDELQVGNVPLKKAKESKKHEKLEKPEKEKKKKKKK

SEQ ID NO: 1813 - protein, 247 aa, Homo sapiens
  SITE (166): Xaa equals any of the naturally occurring L-amino acids
MHLARLVGSCSLLLLLGALSGWAASDDPIEKVIEGINRGLSNAEREVGKALDGINSGITHAGREVEKVFNGLSNMGSHTGKELDKGVQGLNHGMDKVAHEINHGIGQAGKEAEKLGHGVNNAAGQAGKEADKAVQGFHTGVHQAGKEAEKLGQGVNHAADQAGKEXEKLGPSAHHAAGQAGKELQNAHNGVNQASKEANQLLNGNHQSGSSSHQGGATTTPLASGASVNTPFINLPALWRSVANIMP

SEQ ID NO: 1814 - protein, 57 aa, Homo sapiens
MAGCCLKLFGVLSLCFLCGLISIERVICNPVSADFQVSTFCQRHCLLRSKVMFPIRG

SEQ ID NO: 1815 - protein, 42 aa, Homo sapiens; identical to SEQ ID NO: 1457

SEQ ID NO: 1816 - protein, 6 aa, Homo sapiens
LLLSSF

SEQ ID NO: 1817 - protein, 41 aa, Homo sapiens; identical to SEQ ID NO: 1458

SEQ ID NO: 1818 - protein, 218 aa, Homo sapiens; identical to SEQ ID NO: 1460

SEQ ID NO: 1819 - protein, 56 aa, Homo sapiens
MHFLFRFIVFFYLWGLFTAQRQKKEESTEEVKIEVLHRPENCSKTSKKGDLLKCPL

SEQ ID NO: 1820 - protein, 606 aa, Homo sapiens; identical to SEQ ID NO: 1464

SEQ ID NO: 1821 - protein, 295 aa, Homo sapiens; identical to SEQ ID NO: 1466

SEQ ID NO: 1822 - protein, 37 aa, Homo sapiens
MGLPVSWAPPALWVLGCCALLLSLWALCTACRSPRTL

SEQ ID NO: 1823 - protein, 172 aa, Homo sapiens
  SITE (107): Xaa equals any of the naturally occurring L-amino acids
  SITE (132): Xaa equals any of the naturally occurring L-amino acids
MSFLCLVVLYYIVWSLLFLRSLDVVAEQRRTHVTMAISWITIVVPLLTFEVLLVHRLDGHNTFSYVSIFVPLWLSLLTLMATTFRRKGGNHWWFGIRRDFCQFLLEXFPFLREYGNISYDLHHEDSEDAEEXSVPEAPKIAPIFGKKARVVITQSPGKYVPPPPKLNIDMPD

SEQ ID NO: 1824 - protein, 60 aa, Homo sapiens [sequence omitted]

SEQ ID NO: 1825 - protein, 17 aa, Homo sapiens
ITFSCFFCNNCSQVNLQ

SEQ ID NO: 1826 - protein, 56 aa, Homo sapiens
  SITE (9): Xaa equals any of the naturally occurring L-amino acids
  SITE (24): Xaa equals any of the naturally occurring L-amino acids
  SITE (30): Xaa equals any of the naturally occurring L-amino acids
MRFWFLVFXFFFFPEAHVYPTSWXVSEQGXATISVTPGILNWIFVEEENNTVLDFP

SEQ ID NO: 1827 - protein, 106 aa, Homo sapiens
RSRSKPRCNCEIVTIFFARFKIGPGRHRKRKIPKLCSSGSTIGRVYSLPGLLRRGSCLFGYITPDWFVLKINVIMLVSYLMVSLEHSPLILFERVGGRDCEGREKC

SEQ ID NO: 1828 - protein, 279 aa, Homo sapiens
EERWKSPEVRWAPGVAMEESGYESVLCVKPDVHVYRIPPRATNRGYRAAEWQLDQPSWSGRLRITAKGQMAYIKLEDRTSGELFAQAPVDQFPGTAVESVTDSSRYFVIRIEDGNGRRAFIGIGFGDRGDAFDFNVALQDHFKWVKQQCEFAKQAQNPDQGPKLDLGFKEGQTIKLNIANMKKKEGAAGNPRVRPASTGGLSLLPPPPGGKTSTLIPPPGEQLAVGGSLVQPAVAPSSGGAPVPWPQPNPATADIWGDFTKSTGSTSSQTQPGTGWVQF

SEQ ID NO: 1829 - protein, 40 aa, Homo sapiens
MLFPLLAWPHLLSLWVCLTATSPSKPSAPHSHQMDLCLLH

SEQ ID NO: 1830 - protein, 305 aa, Homo sapiens; identical to SEQ ID NO: 1479

SEQ ID NO: 1831 - protein, 127 aa, Homo sapiens
  SITE (127): Xaa equals any of the naturally occurring L-amino acids
MFVLLYVTSFAICASGQPRGNQLKGENYSPRYICSIPGLPGPPGPPGANGSPGPHGRIGLPGRDGRDGRKGEKGEKGTAGLRGKTGPLGLAGEKGDQGETGKKGPIGPEGEKGEVGPIGPPGPKGDX

SEQ ID NO: 1832 - protein, 190 aa, Homo sapiens
MSSGTELLWPGAALLVLLGVAASLCVRCSRPGAKRSEKIYQQRSLREDQQSFTGSRTYSLVGQAWPGPLADMAPTRKDKLLQFYPSLEDPASSRYQNFSKGSRHGSEEAYIDPIAMEYYNWGRFSKPPEDDDANSYENVLICKQKTTETGAQQEGIGGLCRGDLSLSLALKTGPTSGLCPSASPEEDEGI

SEQ ID NO: 1833 - protein, 142 aa, Homo sapiens
  SITE (92): Xaa equals any of the naturally occurring L-amino acids
  SITE (136): Xaa equals any of the naturally occurring L-amino acids
  SITE (138): Xaa equals any of the naturally occurring L-amino acids
MCAFPWLLLLLLLQEGSQRRLWRWCGSEEVVAVLQESISLPLEIPPDEEVENIIWSSHKSLATVVPGKEGHPATIMVTNPHYQGQVSFLDPXYSLHISNLSWEDSGLYQAQVNLRTSQISTMQQYNLCVYRWLSEXPXHCEL

SEQ ID NO: 1834 - protein, 122 aa, Homo sapiens
  SITE (92): Xaa equals any of the naturally occurring L-amino acids
  SITE (100): Xaa equals any of the naturally occurring L-amino acids
  SITE (109): Xaa equals any of the naturally occurring L-amino acids
  SITE (116): Xaa equals any of the naturally occurring L-amino acids
MLALTLAKADSPRTALLCSAWLLTASFSAQQHKGSLQVHQTLSVEMDQVLKALSFPKKKAALLSTAILCFLRTALRQSFSSAWNPGALKGPXTAATKDTXLTSLRMSKXGPGHWAXKTSWCK

SEQ ID NO: 1835 - protein, 216 aa, Homo sapiens
  SITE (6): Xaa equals any of the naturally occurring L-amino acids
  SITE (18): Xaa equals any of the naturally occurring L-amino acids
CFPWGXALRQKLFPSALXALVPSGAQPLPATKDTVLAPLRMSQVRSLVIGLQNLLVQKDPLLSQACVGCLEALLDYLDARSPDIALHVASQPWNRFLLFTLLDAGENSFLRPEILRLMTLFMRYRSSSVLSHEEVGDVLQGVALADLSTLSNTTLQALHGFFQQLQSMGHLADHSMAQTLQASLEGLPPSTSSGQPPLQDMLCLGGVAVSLSHIRN

SEQ ID NO: 1836 - protein, 77 aa, Homo sapiens
MALKNKFSCLWILGLCLVATTSSKIPSITDPHFIDNCIEAHNEWRGKVNPPAADMKYMIWDKGLAKMAKAWGKPVQI

SEQ ID NO: 1837 - protein, 257 aa, Homo sapiens
  SITE (27): Xaa equals any of the naturally occurring L-amino acids
MTAAVFFGCAFIAFGPALALYVFTIAXEPLRIIFLIAGAFFWLVSLLISSLVWFMARVIIDNKDGPTQKYLLIFGAFVSVYIQEMFRFAYYKLLKKASEGLKSINPGETAPSMRLLAYVSGLGFGIMSGVFSFVNTLSDSLGPGTVGIHGDSPQFFLYSAFMTLVIILLHVFWGIVFFDGCEKKKWGILLIVLLTHLLVSAQTFISSYYGINLASAFIILVLMGTWAFLAAGGSCRSLKLCLLCQDKNFLLYNQRSR

SEQ ID NO: 1838 - protein, 94 aa, Homo sapiens
  SITE (2): Xaa equals any of the naturally occurring L-amino acids
RXPIFIGENFYPPVRGRVGMSACQGGGGGGGGGGGGGGGGGGGGGGGGGGGGVDKLPCLTMCWCGNGAQPARLKVDGIPTGQRKSYADTPAWPG

SEQ ID NO: 1839 - protein, 82 aa, Homo sapiens
  SITE (26): Xaa equals any of the naturally occurring L-amino acids
  SITE (28): Xaa equals any of the naturally occurring L-amino acids
PGNEVTDGQPRQPLRRLRLPCGASLXRXPASPSDAIQRALPGRKLPRWNASPEQRVAVPCGGLTQWLNTGKELALGVRTSET

SEQ ID NO: 1840 - protein, 60 aa, Homo sapiens
  SITE (3): Xaa equals any of the naturally occurring L-amino acids
  SITE (17): Xaa equals any of the naturally occurring L-amino acids
NLXCCEPLKGTEIVHLXSSDFKAVACRCSQLNKALPSTTLRGFVCGSSCYISWFPNQETR

SEQ ID NO: 1841 - protein, 124 aa, Homo sapiens
  SITE (75): Xaa equals any of the naturally occurring L-amino acids
MSPRGTGCSAGLLMTVGWLLLAGLQSARGTNVTAAVQDAGLAHEGEGEEETENNDSETAENYAPSETEDVSNRNXVKEVEFGMCTVTCGIGVREVILTNGCPGGESKCVVRVEECPWTNRLWLG

SEQ ID NO: 1842 - protein, 113 aa, Homo sapiens
  SITE (42): Xaa equals any of the naturally occurring L-amino acids
  SITE (50): Xaa equals any of the naturally occurring L-amino acids
  SITE (110): Xaa equals any of the naturally occurring L-amino acids
MPRCRWLSLILLTIPLALVARKDPKKNETGVLRKLKPVNAFXCQRGSSVXGFAMQEYNKESEDKYVFLVVKTLQAQLQVTNLLEYLIDVEIARSDCRKPLSTNEIAPFKXTPS

SEQ ID NO: 1843 - protein, 159 aa, Homo sapiens
MWLFILLSLALISDAMVMDEKVKRSFVLDTASAICNYNAHYKNHPKYWCRGYFRDYCNIIAFSPNSTNHVALKDTGNQLIVTMSCLNKEDTGWYWCGIQRDFARDDMDFTELIVTDDKGTWPMTLVWERLSGTKPEAARLPKLSARLTAPGRPFSSFAY

SEQ ID NO: 1844 - protein, 71 aa, Homo sapiens
  SITE (40): Xaa equals any of the naturally occurring L-amino acids
  SITE (51): Xaa equals any of the naturally occurring L-amino acids
  SITE (55): Xaa equals any of the naturally occurring L-amino acids
MWLFILLSLALISDAMVMDEKVKRSLCWTRLLPSATTMPXTRITPNTGAEXISVXTATSSPSPLTAPIMWP

SEQ ID NO: 1845 - protein, 39 aa, Homo sapiens; identical to SEQ ID NO: 1503

SEQ ID NO: 1846 - protein, 38 aa, Homo sapiens; identical to SEQ ID NO: 1504

SEQ ID NO: 1847 - protein, 64 aa, Homo sapiens
RTLRMSPSAFCYSLTLLACWRAAWIPTCVPRAAGEMDSPGLADGHWCSGAARRSPHYVARSLVL

SEQ ID NO: 1848 - protein, 5 aa, Homo sapiens
AGTWS

SEQ ID NO: 1849 - protein, 170 aa, Homo sapiens
MILTMLLMLKLCTEVRVANELNARRRSFTDFDPHHFWQWSSFSDYVQCVLAFTGVAGYITYLSIDSALFVETLGFLAVLTEAMLGVPQLYRNHRHQSTEGMSIKMVLMWTSGDAFKTAYFLLKGAPLQFSVCGLLQVLVDLAILGQAYAFARHPQKPAPHAVHPTGTKAL

SEQ ID NO: 1850 - protein, 170 aa, Homo sapiens; identical to SEQ ID NO: 1849

SEQ ID NO: 1851 - protein, 60 aa, Homo sapiens
  SITE (2): Xaa equals any of the naturally occurring L-amino acids
MXLAFSVIILAGAGSSRSWNSVLVEKEVVEGGLGPWGNCSAEPLPHLLLPRTNLKAKVPG

SEQ ID NO: 1852 - protein, 61 aa, Homo sapiens; identical to SEQ ID NO: 1523

SEQ ID NO: 1853 - protein, 322 aa, Homo sapiens
  SITE (28): Xaa equals any of the naturally occurring L-amino acids
RAPRRTGPASFSSRPAGTCSDNRVTSFXDLIHDQDEDEEEEEGQRFYAGGSERSGQQIVGPPRKKSPNELVDDLFKGAKEHGAVAVERVTKSPGETSKPRPFAGGGYRLGAAPEEESAYVAGEKRQHSSQDVHVVLKLWKSGFSLDNGELRSYQDPSNAQFLESIRRGEVPAELRRLAHGGQVNLDMEDHRDEDFVKPKGAFKAFTGEGQKLGSTAPQVLSTSSPAQQAENEAKASSSILIDESEPTTNIQIRLADGGRLVQKFNHSHRISDIRLFIVDARPAMAATSFILMTTFPNKELADESQTLKEANLLNAVIVQRLT

SEQ ID NO: 1854 - protein, 13 aa, Homo sapiens
SCISWVFVMINGL

SEQ ID NO: 1855 - protein, 240 aa, Homo sapiens
  SITE (67): Xaa equals any of the naturally occurring L-amino acids
GEGDDKEESVEKLDCHYSGHHPQPASFCTFGSRQIGRGYYVFDSRWNRLRCALNLMVEKHLNAQLWXKIPPVPSTTSPISTRIPHRTNSVPTSQCGVSYLAAATVSTSPVLLSSTCISPNSKSVPAHGTTLNAQPAASGAMDPVCSMQSRQVSSSSSSPSTPSGLSSVPSSPMSRKPQKLKSSKSLRPKESSGNSTNCQNASSSTSGGSGKKRKNSSPLLVHSSSSSSSSSSSSHSMGVF

SEQ ID NO: 1856 - protein, 362 aa, Homo sapiens
  SITE (307): Xaa equals any of the naturally occurring L-amino acids
MRTLFNLLWLALACSPVHTTLSKSDAKKAASKTLLEKSQFSDKPVQDRGLVVTDLKAESVVLEHRSYCSAKARDRHFAGDVLGYVTPWNSHGYDVTKVFGSKFTQISPVWLQLKRRGREMFEVTGLHDVDQGWMRAVRKHAKGLHIVPRLLFEDWTYDDFRNVLDSEDEIEELSKTVVQVAKNQHFDGFVVEVWNQLLSQKRVTDQLGMFTHKEFEQLAPVLDGFSLMTYDYSTAHQPGPNAPLSWVRACVQVLDPKSKWRSKILLGLNFYGMDYATSKDAREPVVGARYIQTLKDHRPRMVWDSQXSEHFFEYKKSRSGRHVVFYPTLKSLQVRLELARELGVGVSIWELGQGLDYFYDLL

SEQ ID NO: 1857 - protein, 415 aa, Homo sapiens
  SITE (338): Xaa equals any of the naturally occurring L-amino acids
MRTLFNLLWLALACSPVHTTLSKSDAKKAASKTLLEKSQFSDKPVQDRGLVVTDLKAESVVLEHRSYCSAKARDRHFAGDVLGYVTPWNSHGYDVTKVFGSKFTQISPVWLQLKRRGREMFEVTGLHDVDQGWMRAVRKHAKGLHIVPRLLFEDWTYDDFRNVLDSEDEIEELSKTVVQVAKNQHFDGFVVEVWNQLLSQKRVGLIHMLTHLAEALHQARLLALLVIPPAITPGTDQLGMFTHKEFEQLAPVLDGFSLMTYDYSTAHQPGPNAPLSWVRACVQVLDPKSKWRSKILLGLNFYGMDYATSKDAREPVVGARYIQTLKDHRPRMVWDSQXSEHFFEYKKSRSGRHVVFYPTLKSLQVRLELARELGVGVSIWELARAWTTSTTCSRWALRPPRWTCSFLSHGVSEQV

SEQ ID NO: 1858 - protein, 461 aa, Homo sapiens
  SITE (234): Xaa equals any of the naturally occurring L-amino acids
  SITE (236): Xaa equals any of the naturally occurring L-amino acids
MALMLSLVLSLLKLGSGQWQVFGPDKPVQALVGEDAAFSCFLSPKTNAEAMEVRFFRGQFSSVVHLYRDGKDQPFMQMPQYQGRTKLVKDSIAEGRISLRLENITVLDAGLYGCRISSQSYYQKAIWELQVSALGSVPLISITGYVDRDIQLLCQSSGWFPRPTAKWKGPQGQDLSTDSRTNRDMHGLFDVEISLTVQENAGSISCSMRHAHLSREVESRVQIGDTFFEPISWXLXTKVLGILCCGLFFGIVGLKIFFSKFQWKIQAELDWRRKHGQAELRDARKHAVEVTLDPETAHPKLCVSDLKTVTHRKAPQEVPHSEKRFTRKSVVASQSFQAGKHYWEVDGGHNKRWRVGVCRDDVDRRKEYVTLSPDHGYWVLRLNGEHLYFTLNPRFISVFPRTPPTKIGVFLDYECGTISFFNINDQSLIYTLTCRFEGLLRPYIEYPSYNEQNGTPRDKQQ

SEQ ID NO: 1859 - protein, 111 aa, Homo sapiens; identical to SEQ ID NO: 1534

SEQ ID NO: 1860 - protein, 91 aa, Homo sapiens
MLCHPHVHHHLVCLLATLTFSLNASCAEQTFHSQQSNGEFMATLPSISKQFGVIVWKPQRKDVIRLPVALSFSMGLGLLSPALGRFLASEL

SEQ ID NO: 1861 - protein, 78 aa, Homo sapiens; identical to SEQ ID NO: 1538

SEQ ID NO: 1862 - protein, 54 aa, Homo sapiens
MCWICVWLFFSPTKTSCFPWLIRPGPRSFTDSHGTPPWQCLEPSSFTYPGKQVW

SEQ ID NO: 1863 - protein, 145 aa, Homo sapiens
MSQAWVPGLAPTLLFSLLAGPQKIAAKCGLILACPKGFKCCGDSCCQENELFPGPVRIFVIIFLVILSVFCICGLAKCFCRNCREPEPDSPVDCRGPLELPSIIPPERVILKPSLGPTPTEPPPPYSFRPEEYTGDQRGIDNPAF

SEQ ID NO: 1864 - protein, 68 aa, Homo sapiens; identical to SEQ ID NO: 1542

SEQ ID NO: 1865 - protein, 142 aa, Homo sapiens [sequence omitted]

SEQ ID NO: 1866 - protein, 119 aa, Homo sapiens
MRRLLLVTSLVVVLLWEAGAVPAPKVPIKMQVKHWPSEQDPEKAWGARVVEPPEKDDQLVVLFPVQKPKLLTTEEKPRGTKAWMETEDTLGRVLSPEPDHDSLYHPPPEEDQGEERPRL

SEQ ID NO: 1867 - protein, 462 aa, Homo sapiens
  SITE (115): Xaa equals any of the naturally occurring L-amino acids
MRLRVRLLKRTWPLEVPETEPTLGHLRSHLRQSLLCTWGYSSNTRFTITLNYKDPLTGDEETLASYGIVSGDLICLILQDDIPAPNIPSSTDSEHSSLQNNEQPSLATSSNQTSXQDEQPSDSFQGQAAQSGVWNDDSMLGPSQNFEAESIQDNAHMAEGTGFYPSEPMLCSESVEGQVPHSLETLYQSADCSDANDALIVLIHLLMLESGYIPQGTEAKALSMPEKWKLSGVYKLQYMHPLCEGSSATLTCVPLGNLIVVNALNLPDVFGLVVLPLELKLRIFRLLDVRSVLSLSAVCRDLFTASNDPLLWRFLYLRDFRDNTVRVQDTDWKELYRKRHIQRKESPKGRFVMLLPSSTHTIPFYPNPLHPRPFPSSRLPPGIIGGEYDQRPTLPYVGDPISSLIPGPGETPSQFPPLRPRFDPVGPLPGPNPILPGRGGPNDRFPFRPSRGRPTDGRLSFM

SEQ ID NO: 1868 - protein, 174 aa, Homo sapiens
MFVPSCLCLRFVVTSLLLQMTHSCGGFYICVIFETILSEFKTQIGRLYRKRHIQRKESPKGRFVMLLPSSTHTIPFYPNPLHPRPFPSSRLPPGIIGGEYDQRPTLPYVGDPISSLIPGPGETPSQFPPLRPRFDPVGPLPGPNPILPGRGGPNDRFPFRPSRGRPTDGRLSFM

SEQ ID NO: 1869 - protein, 164 aa, Homo sapiens
  SITE (76): Xaa equals any of the naturally occurring L-amino acids
  SITE (112): Xaa equals any of the naturally occurring L-amino acids
  SITE (146): Xaa equals any of the naturally occurring L-amino acids
MRTLVELGPWAGDFGPDLLLTLLFLLFLAHGVTLDGASANPTVSLQEFLMAEQSLPGTLLKLAAQGLGMQAACTLXRLCWAWELSDLHLLQSLMAQSCSSALRTSVPHGALXEAACTFCFHLTLLHLRHSPPAYSGPAVALLVTVXAYTAGPYVCFFNPALAAL

SEQ ID NO: 1870 - protein, 53 aa, Homo sapiens
MVTFINATLWIAVFSYIMVWLVTIIGYTLGIPDVIMGITFLAAGQVFQTAWPA

SEQ ID NO: 1871 - protein, 169 aa, Homo sapiens
  SITE (6): Xaa equals any of the naturally occurring L-amino acids
  SITE (39): Xaa equals any of the naturally occurring L-amino acids
  SITE (44): Xaa equals any of the naturally occurring L-amino acids
  SITE (71): Xaa equals any of the naturally occurring L-amino acids
MVTFIXATLWIAVFSYIMVWLVTIIGYTLGIPDVIMGIXFLAAXTSVPDCMASLIVARQGLGDMAVSNTIXSNVFDILVGLGVPWGLQTMVVNYGSTVKINSRGLVYSVVLLLGSVALTVLGIHLNKWRLDRKLGVYVLVLYAIFLCFSIMIEFNVFTFVNLPMCREDD

SEQ ID NO: 1872 - protein, 101 aa, Homo sapiens
  SITE (101): Xaa equals any of the naturally occurring L-amino acids
MKTLPAMLGTGKLFWVFFLIPYLDIWNIHGKESCDVQLYIKRQSEHSILAGDPFELECPVKYCANRPHVTWCKLNGTTCVKLEDRQTSWKKRRTFHFSSTX

SEQ ID NO: 1873 - protein, 187 aa, Homo sapiens; identical to SEQ ID NO: 1554

SEQ ID NO: 1874 - protein, 105 aa, Homo sapiens
  SITE (69): Xaa equals any of the naturally occurring L-amino acids
MSGLAAAAHVFRVCLFPLSWGSSKTTFIHGLSSYIATPVLNSIFSSWKSRRKDTWTCLLHRLSAFPISXRRRNFALFSHSCVCIRSSSDDVGPTMYSFSVPCRVK

SEQ ID NO: 1875 - protein, 61 aa, Homo sapiens
MGSFLHPQWHLLITFCAVLGKGLHSDPSRPFEHGGALGKVPRGRSTLLSKEVLLKKKKKKR

SEQ ID NO: 1876 - protein, 37 aa, Homo sapiens
LPWLPFFFSCLVSTLPSMSVSAFSLVVRGRRAFTSVR

SEQ ID NO: 1877 - protein, 16 aa, Homo sapiens
PLCLALELGWVCLSST

SEQ ID NO: 1878 - protein, 117 aa, Homo sapiens
  SITE (113): Xaa equals any of the naturally occurring L-amino acids
MLLWWQCLCCHAVLEPAATAMPEDAAPSSLPVPPNMTSSRFHYFWTLLQIKLTQFYSKPRSLSATPEKNIGLQEPERRERFTGESCRWELKAKSCLCPTRNSLGCTQCHCDGXKICN

SEQ ID NO: 1879 - protein, 40 aa, Homo sapiens; identical to SEQ ID NO: 1559

SEQ ID NO: 1880 - protein, 77 aa, Homo sapiens
MYASVLLTGLLSLQRCLAVTRPFLAPRCAARPWPAACCWRSGWPPCCSPSRPPSTATCGGTAYASCATRRRSTPPPT

SEQ ID NO: 1881 - protein, 150 aa, Homo sapiens
MLAVLAFPVGVFVVAVFWIIYAYDREMIYPKLLDNFIPGWLNHGMHTTVLPFILIEMRTSHHQYPSRSSGLTAICTFSVGYILWVCWVHHVTGMWVYPFLEHIGPGARIIFFGSTTILMNFLYLLGEVLNNYIWDTQKSMEEEKEKPKLE

SEQ ID NO: 1882 - protein, 102 aa, Homo sapiens
  SITE (70): Xaa equals any of the naturally occurring L-amino acids
MMISIVGFLSPFNMILGGIVVVLVFTGFVWAAHNKDVLRRMKKRYPTTFVMVVMLASYFLISMFGGVMVXVFGITFPLLLMFIHASLRLRNLKNKLENKMEG

SEQ ID NO: 1883 - protein, 188 aa, Homo sapiens; identical to SEQ ID NO: 1564

SEQ ID NO: 1884 - protein, 45 aa, Homo sapiens; identical to SEQ ID NO: 1565

SEQ ID NO: 1885 - protein, 136 aa, Homo sapiens
  SITE (1): Xaa equals any of the naturally occurring L-amino acids
  SITE (3): Xaa equals any of the naturally occurring L-amino acids
  SITE (8): Xaa equals any of the naturally occurring L-amino acids
  SITE (14): Xaa equals any of the naturally occurring L-amino acids
XYXSCRKXYLTYGXNSRVDPRVRHVCGVRAHGAGVPHLVSGGDEVSPGGAGPVSHSAEEQPVHQVDRLCGACPGQRVFLCPGEPGAKSGRHLSGGVPPYTECDHAQPLARPGAVESCNHEVCAQTGETVQPLMARR

SEQ ID NO: 1886 - protein, 141 aa, Homo sapiens
GGERHLHRTHPRLPGHRFLRLHRAPRVPHVCGVRAHGAGVPHLVSGGDEVSPGGAGPVSHSAEEQPVHQVDRLCGACPGQRVFLCPGEPGAKSGRHLSGGVPPYTECDHAQPLARPGAVESCNHEVCAQTGETVQPLMARR

SEQ ID NO: 1887 - DNA, 839 bp, Homo sapiens
cccacacgtttctgcagatgcccgcatcatggtcctgaggggatgggggctggcctggagcctttcccccgtggtgtgtggctatagcggggacatgaagggggtgtgttggggacgtagtgaccactcccttctaccgtcagagatcctgcttccccctgccccctgcccctcctcggctgcccttcataaccccccacccactccccacctgccctctcctgtgcttgtgcggatccaggaagcacctacctgggcacagagatcatcgctcggtgcctcgcccctacacaagggcgattaacttctctgttatgaactcctacttagtaattctgacatgaaactcccactaggataaaacttggcgcagaacagcaattactgaaaacacatttttaaaaaggttgatgttttgtaagagttcatcctcctccactcctcagcctccctcaaggagacacatatttagatcttctctgtgtgagtctaacttggagactgtgagttgcagtttaaaaggggctctggggccaggtgcggtggcacacacttgtggtctcagctactcaagaggctgagatgtgaggaacgcttgagcccaggagttcaagaccagcctgagcaacatagggagatgggatctacccaaaacacttaacaataaggctggcatggtggcatatgcctgtggtcccagctacttggaggctgaggcaggagaatcatttaagcctgggagatcgaggctgcagtgaggtatggtttcaactgctgtgctccagcctgggagacagggcaatactgtgtctctaaaaaataaaaaataaaaataaaaa

SEQ ID NO: 1888 - DNA, 839 bp, Homo sapiens
cccacccgtttctgcagatgcccgcatcatggtcctgaggggatgggggctggcctgtagcctttcccccgtggtgtgtggctatagcggggacatgaagggggtgtgttggggacgtagtgaccactcccttctaccatcagagatcctgcttccccctgccccctgcccctcctcggctgcccttcataaccccccacccactccccacctgccatctcctgtgcttgtgtggatccaggaagcacctacctgggtacagagatcattgctcggtgcctcgcccctacacaagggcgattaacttgtctgttatgaactcctacttagtaattccgacatgaaactcccactaggataaaacttggcgcagaacagcaattactgaaaacacatttttaaaaaggttgacgttttgtaagagttcatcctcctccactcctcagcctccctcaaggagacacatatttagatcttctctctgtgagtctaacttggagactgtgagttgcagtttaaaaggggctctggggccaggtgcggtggcacacacttgtggtctcagctactcaagaggccgagatgtgaggaacgcttgagcccaggagttcaagaccagcctgagcaacatagggagatgggatctaccaaaaacatttaacaataaggctggcatggtggcatatgcctgtggtcccagctacttggaggctgaggcaggagaatcatttaagcctgggagatcgaggctgcagtgaggtatggtttcaactgctgtgctccagcctgggagacagggcaatactctgtctctaaaaaataaaaaataaaaataaaaa

SEQ ID NO: 1889 - DNA, 837 bp, Homo sapiens
cccacccgtttctgcagatgcccgcatcatggtcctgaggggatgggggccggcctggagcctttcccccgtggtgtgtggctatagcggggacatgaagggggtgtgttggggacgtagtgaccactcccttctaccgtcagagatcctgcttccccctgccccctgcccctcctcggctgcccttcataaccccccacccactccccacctgccatctcctgtgcttgtgcggatccaggaagcacctacctgggcacagagatcatcgctcggtgcctcgcccctacacaagggcgattaacttctctgttatgaactcctacttagtaattctgacatgaaactcccactaggataaaacttggcgcagaacagcaattactgaaaacacatttttaaaaaggttgatgttttgtaagagttcatcctcctccactcctcagcctccctcaaggagacacatatttagatcttctctgtgtgagtctaacttggagactgtgagttgcagtttaaaaggggctctggggccaggtgcggtggcacacacttgtggtctcagctactcaagaggctgagatgtgaggaacgcttgagcccaggagttcaagaccagcctgagcaacatagggagatgggatctacccaaaacatttaacaataaggctggcatggtggcatatgcctgtggtcccagctacttggaggctgaggcaggagaatcatttaagcctgggagatcgaggctgcagtgaggtatggtttcaactgctgtgctccagcctgggagacagggcaatactgtgtctctaaaaaataaaataaataaataaa

SEQ ID NO: 1890 - DNA, 836 bp, Homo sapiens
cccacccgtttctgcagatgccgcatcatggtcctgaggggatgggggctggcctgtagccttcccccgtggtgtgtggctatagcggggacatgaagggggtgtgttggggatgtagtgaccactcccttctaccgtcagagatcctgcttccccctgccccctgcccctcctcggctgcccttcataaccccccacccactccccacctgccatctcctgtgcttgtgtggatccaggaagcacctacctgggtacagagatcattgctcggtgcctcgcccctacacaagggcgattaacttgtctgttatgactcctacttagtaattccgacatgaaactcccactaggataaaacttggcgcagaacagcaattactgaaaacacatttttaaaaaggttgacgttttgtaagagttcatcctcctccactcctcagcctccctcaaggagacacatatttagatcttctctctgtgagtctaacttggagactgtgagttgcagtttaaaaggggctctggggccaggtgcggtggcacacacttgtggtctcagctactcaagaggccgagatgtgaggaacgcttgagcccaggagttcaagaccagcctgagcaacatagggagatgggatctaccaaaaacatttaacaataaggctggcatggtggcatatgcctgtggtcccagctacttggaggctgaggcaggagaatcatttaagcctgggagatcgaggctgcagtgaggtatggtttcaactgctgtgctccagcctgagagacagggcaatactctgtctctaaaaaataaaaaataaaaataaaaa

SEQ ID NO: 1891 - DNA, 4269 bp, Homo sapiens
agcgtcctgtgagggaggggctgcactgccactttactgatgaggaagttaaggttcagagagatgaggtcatttgttagaggccagacagcctcctcagcccatttctaaggttgtttctgtggtatttgccataaagccataggttcattgatttgttcttaagtagttctgagcccttcctgcatatcaggcagggacaaacaggaaagtccctgcctttggcaagtgcgggggaaatgaaatgattctgctcagcctcatccattggtctgaacaatcacgtctcatgaccgcagggacacggcttcccctgaacgcggatcctagaggccaggcagaagcagcatgggtttccactcacacggtaggcggctgtgcaatttcgtctggagtccccagacccctcctcatccttcccagggttgctctgaggccattccttgtcatctaggaggggtctacataaaagcatttataaacacctccaaatgggagccaggcgtgcccacctttggagcacttttctctactgcaaatttatctactgctcgtgaaatctctggatttaactctgatgaaagactggaggctgaaggagaacttcaatatcatatattttaaaggttgattcacagtttggagcaagaattaaagaaccacgaacttcaaggtaaaacgggcaacggcgttggggcaagcctctctgcatctgcgtgtccagcctctcctgcgtgccagaagttcccaggcaggagtgtggtgggacatccggctggggtaaggacaggcaccctcccactgtgtcagggcccagagagtgggtggagaagctctgcaagagacctgtgcaagggcgccttgcaggagcctgcagtccccacaggtgtgtttgtggataacacttggggagccctggccttttggggtcacggagggcttggcctctcacctcagagctgcagagaagccgcttctacatcaggacatcagaagctggaacaggatggccggcgaggggcctcttgttggggtcacagagatgggtcgcagagatggcccgtgtggaaggttggattctcaccccacctctgcccctagatgtcctggtgaccctcccctctgtagtcttggttttttgcaaaacagttatgacctcctgccatactgggtactttgcttatgtattgtgtttactctttactgtgtgtctctcctgctaaggtctacgaagaagggtctttgtgggtggggttcttagaggcatcccaagtaccagaagcagtccttggactaaggggctcaataaatattttttatttattattttttctttttgagatggagtctcgctctcttgaccaggctggagtacagtggcacaatcttggctcactgcagccttcgcctcctgggttcaagtgatttccggctaatttttgtatttttagtagtgacggggtatcaccatgttggccaggctggtcacaaactcctgacctcaagtgatccacccgcctcagcctcccaacatgctgggattatagacatgagccaccatgcctggccaaatatttgtcaaattgaatttgtatttccatacaaattttagtctggataaagtgcttcatgcctgtaatccaagcactttgagaggctgaggcgggtggatggcttgagcccaggagtttgagaccagcatggaaaacatagagaaaccccatctcaatataagaagaagaagaaaaagaaaaaaaaaatcaaaaacgaaaacaacacaaattttagagtaagtattttaagttccacaaaaacctggttaggatttggatagcaatttctttagttctacaaatcaatttggaaaaaattaattaatttgggaagaattcattttgagtcttctaatccatgaacatggtatctccatttgtttagaccatctttaatgcctactaataacatttctgtatagtgaccttgcacattattcttagattcttgatattttgtgctattatgtctttttataaattttatttttccaacattgttgctaatatatagtaagaaaatggaatcttgcctatagattttgaacccaacaactttgctaaactcctctgaatcctcagaatttccctgtggattatgtaggctcttctgcatacacaaccatatcatctgtgaataaagacagttttgttttcttcttcacaaactttacccgactcactgtgcagtctgccacatccaggctgatattgaatagcagtggcactaataggattctttgcccccttgccaatcttgtaaagaaagctttcaacattttcctgttagctctgttggcagctctgactttttccatagatggccttcatcagcttaacaatgggtcttttcttcccagagggctgagcttttccttaagaacagacagtgagtgtcatcaaacactaggctgcatctgttgagatggtcatacgacttgtgtcttttcctgtgtttgtgtgtgaactctctgggtgtctgagggttcttgtgactttcacagaagaacacaatttaccctccggtgtgggaaggggaaggaggcagaggaagaaagaccccaagtccccctcatccccactgaccttcctgctggcttcgtccttgatctgtgcctccttagatcctgcgtttgagtacttgcggtcatgatgacagggccaacctcctgaccagggctgttagcacctcccctgctgcccagagtccctgctccaaaccacttccttcatcttccgtacccccagccaatatttccctgcccagtgtcaacccaggcccagaaccagaccacaagggacagccccgaaacccagaatcagacaaatcagcccgtcccaagctgtctcccctgctctgcccggctttcacagggaagccaacacaggctgtggcttggcctttccctagctcctttctgcctcctggtctgcctgcggcttccccctgccgccctgcggggcctgccacgtctctcatttctagcgaatgtttcaagagcgatgttagactttcctttcaatagagttgacctctgttaggcacctttatggattaagacctgggcatagatggtttcttcggcatcacgacctgaaggtgcttgggagagacggtgaggaggagaatgcaccctgccatgctctgcaccgcacatggatgcggatttcaccatgttggccaggctggtctgaaacacacggagcccaagcgcccggtggactctctgacggtcctcgggcgtgtgcctttgtaagcagagtattcagctctcatcagggcctcgccagagcagaaatggtctgttgataaatgcatcgtatacaattataaatgtgcacccagcattgctgcttcctcttttttttttgatatagggacttgctctgtcgcccaggctgcagtgcagtagggcagtcacagctcactgcggcctcaacctcccaggctcaagcaatccttccgcctcagcctcctaagtagctggaactacacatccagcttttttttttttttttttgtagacacaggatctcaccatgttggccaggctggtcttaaactcctgggctcaagtgatccgcccaccttgggctcccaaagtactggcattacaggtgggagccactatgcctggcctgcttccttttgcaaacagaaaatcttggtaaatagaattgatcagaacttgttgtttaacgtacacgacctctagctgtactgcaaagctgtgtgcacatgtgttaagtcatctgttctatgtgttctaattataaataagaaaaaacaaatttcaatcaaccatgctggaggaagagcaattatgtttctattccttctatcataggtgatgtaaaattctcaaacaatgagatagataaaaagtacgcagccaaaaagttcaagaagaagtgttatggagatggagcaggcccttcgtaaaaacacgatgttggttttctggattttgtatgtttgcttttttttttcctcatcctaaagaaatattcactgtcatacctaattttgtttttgtaagtttgtattctttctttatagggaggcctcacaaaacccggatcagactcgcccactgccctgtgtctgccctcccgaccgcctctcctgcccagcagggatgagggtggcagtggtgctgtgtggagggtggcgggaggacctggaagactgcgaccagtgagccgggaggccttg

SEQ ID NO: 1892 - DNA, 4273 bp, Homo sapiens
agcgtcctgtgagggaggggctgcactgccactttactgatgaggaaattaaggttcagagagatgaggtcatttgttagaggccagacagcctcctcagcccatttctaaggttgtttctgtgtatttgccataaagccataggttcattgatttgttcttaagtagttctgagtccttcctgcatatcaggcagggacaaacgggaaagtccctgccttggcaagtgcgggggaaatgaaatgattctgctcagcctcatccattggtctgaacaatcacgtctcatgaccccagggacacggcttcccctgaacgcggatcctagaggccaggcagaagcagcatgcggtttccactcacacggtaggtggctgtgcgatttcgtctggagtccccggacccctcctcatccttcccagggttgctctgaggccattcctcgtcatctaggaggggtctacataaaagcatttataaacagctccaaatgggagcctggcgcgcccacctttggagcacttttctctactgcagatttatctactgctcgtgaaatctctggatttaactgtgatgaaagaccggaggctgaaggagaacttcaatatcatatattttaaaggttgactcacagtttggaacaagaattaaagaaccacgaacttcaaggtaaaacgggcaatggcgttggggcaagcctctctgcatctgtgtgtccagcctctcctgcgtgccagaagtccccaggcaggagtgtggtgggacatccggctggggtaaggacaggcaccctcccactgtgtcagggcccagagagtgggtggagaagctctgcaagagacctgtgcaagggcgccttgtaggagcctgccgtccccacaggggtgtttgtggataacacttggggagccctggccttttggggtcacggagggcttggcctctcacctcagagctgcagaggagacgcttctacatcaggacatcagaagctggaacggggatggccggcgaggggcctcttgttggggtcacagagatgggtcgcagagatggcctgtgtggaaggttggattctcaccccacctctgcccctagatgtcctggtgaccctcccctctgtagtcttggttttttgcaaaacacttatgacctcctgccatactgggtactttgcttatgtattgtgtttactctttactgtgtgtctctcctgctaaggtctacgaagaagggtctttgtgggtggggttcttagaggcatcccaagtaccagaagcagtccctggactaaggggctcaagaaatattttttatttattattttttctttttgagatgcagtctctctctcttgcccaggctggagtacagtggcacaatcttggctcactgcagccttcgcctcctgggttcaagtgatttcaggctaatttttgtatttttagtagagacggggtttcaccatgttggccaggctggtcacgaactcctgacctcaagtgatccacccgcctcagcctcccagcgtgctgggattatagacatgagccaccatgcctggccaaatatttgtcaaattgaatttgtatttccatacaaattttagtctggatgaagtgcttcatgcctgtaatccaagcactttgagaggctgaggcgggcagatggcttgagcccaggagtttgagaccagcctggaaaacatagagaaaccccgtctcaatataagaagaagaagaaaaagaaaaaaaaaaaatcaaaaacgaaaacaacacaaattttagagtaagtattttaagttccacaaaaacctggttaggatttggatagcaatttctttagttctacaaatcaatttggaaaaaattaattaatttgggaagaattcattttgagtcttctaatccatgaacatggtatctccatttgtttagaccatctttaatgcctgctaataacatttctgtatagtgaccttgtacattattcttagattcttgatattttgtgctattatgtctttttataaattttatttttccaacattgttgctaatatatagtaagaaaatggaatgttgcctatggattttgaacccaacaactttgctaaactcctctgaatcctcagaatttccctgtggattatgtagactcttctgcatacacaaccatatcatctgtgaataaagacagttttgttttcttcttcacaaactttacccaactcactgtgcagtctgccacatccaggctgatattgaatagcagcggcaccaataggtgtctttgtccccttgccaatcttgtaaagaaagctttcaacattttcctgttagctgtgttggcagctctgactttttccatagatggccttcatcagcttaacaacgggtcttttcttcccagagggctgagcttttccttaagaacagacagtgagtgtcatcaaacactcggctgcatctgttgagatggtcatacgacttgtgtcttttcctgtgtttgtgtatgaactctctctgggtgtctgagagttcttgtgactttcacagaagaacacaatttaccctcccgtgtgggaaggggaaggaggcagaggaagaaagaccccaagtccccctcatccccactgaccttcctgctggcttcgtccttgatttgtgcctccttagatcctgcgtttgactacttgcggtcatgatgacagggccaacctcctgaccagggctgttggcacctcccctcctgcccagagcccctgctccaaaccacttcattcatcttctgtacccccagccaatatttccctgcccagtgtcaacccaggcccagaaccagaccacaagggacagccccggaacccagaatcagacaaatcagcccgtcccaagctgtctcccctgctctgcccggctttcccaggaagccaacagaggctgtggcttggcctttccctcgctcctttctgcctcctggtctgcctgcggcttccccctgccgccctgcggggcctgccatgtctctcatttctagcgaatgtttccagagcgatgttagactttcctttcaatagcgctgacctctgttaggcacctttatggattaagacctgggcatagatggtttcttcggcatcacgacctgaaggtgcttgggagagacggtgaggaggagaatgcaccctgccatgctctgcactgcacatggatgcagattttaccatgttggccaggctggtctgaaacacacggagcccaagcgcccggtggactctctgacggtcctcgggcgtgtgccattgtaagcagagtattcagctctcatcagggcctcgccagagcagaaatggtctgttgataaatgcatcgtatacaattataaatgtgcacccagcattgctgcttcctctttttttttgatatagggacttgctctgtcgcccaggctgcagcgcagtagggcagtcacagctcactgcagcctcaacctcccaggctcaagcaatccttccacctcagcctcctgagtagctggaactacacatccagctattttttttttttttttggtagacacaggatctcaccatgttggccaggctggtcttaaactcctgcgctcaagtgatccgcccaccttgggctcccaaagtactggcattacaggtgggagccactatgcctggcctgcttcctttcgcaaacaggaatcttgtaaatagaattgatcagaacttgttgtttaatgtacacagacctctagctgtactgcaaagctgtgtgcacatgtgttaagtcatctgttctatgtgttctaattataaataagaaaaaacaaatttcaatcagccatgctggaggaagagcaattatgtttctattccttctatcgtaggtgatgtaaaattctcaaacaatgagatagataaaaagtacgcagccaaaaagtgcaggaagaagtgttatggagatggagcaggcccttcgtaaaaacacgatgttggttttctggattttgtatgtttgctttttttttttcctcatcctaaagaaatattcactgtcatacctaattttgtttttgtaagtttgtattcttttctttatagggaggcctcacaaaacctggatcagactcgcccactgccctgtgtctgccctcccgaccccctctcctgcccagcagggatgtgggtggcagtggtgctgtgtggagggtggcgggaggaccgggaagactgcgaccagtgagccgggaggccttg

SEQ ID NO: 1893 - DNA, 4082 bp, Homo sapiens
agtgtcctgtgagggaggggctgcactgccactttactgatgaggaaattaaggttcagagagatcatgtcatttgttagaggccagacagcctcctcagcccattttaaggttgtttctgtggtatttgccataaagccataggttcattgatttgttcttaagtagttatgagcccttcctgcatatcaggcagggacaaacaggaaagtccctgcctttggtaagtgcgggggaaatgaaatgattctgctcagcctcatccattggtctgaacaatcacgtctcatgaccgcagggacacggcttcccctgaacgcggatcctagaggccaggcagaagcagcatgggtttccactcacatggtaggtggctgtgcaatttcgtctggagtccccagacccctcctcatccttcccagggttgctctgaggccattcctcgtcatctaggaggggtctacataaaagcatttataaacacctccaaatgggagccaggcgtgcccacctttggagcacttttctctactgcaaatttatctactgctcgtgaaatctctggatttaactctgatgaaagactggaggctgaaggagaacttcaatatcatatattttaaaggttgattcacagtttggagcaagaattaaagaaccacgaacttcaaggtaaaacgggcaacggcgttggggcaagcctctctgcatctgcgtgtccagcctctcctgcgtgccagaagtccccaggcaggagtgtggtgggacatccggctggggtaaggacaggcaccctcccactgtgtcagggcccagagagtgggtggagaagctctgcaagagacctgtgcaagggcgccttgtaggagcctgcagtccccacaggtgtgtttgtggataacatttggggagccctggccttttggggtcacggagggcttggcctctcacctcagagctgcggaggagccgcttctacatcaggacatcagaagctggaacaggatggccggcgaggggcctcttgttggggtcacagagatgggtcgcagagatggcccgtctggaaggttggattctcaccccacctctgcccctagatgtcctggtgaccctcccctctgtagtcttggttttttgcaaaacagttatgacctcctgccatactgggtactttgcttatgtattgtgtttactctttactgtgtgtctctcctgctaaggtctacgaagaagggtctttgtgggtggggttcttagaggcatcccaagtaccagaagcagtccctggactaaggggctcaaaaaatattttttatttattattttttctttttgagatggagtctcgctctcttgaccaggctggagtacagtggcacaatcttggctcactgcagccttcgcctcctgggttcaagtgatttccggctaatttttgtatttttagtagagacggggtttcaccatgttggccaggctggtcacaaactcctgacctcaagtgatccacccgcctcagcctcccaacatgctgggattatagacatcagccaccatgcctggccaaatatttgtcaaattgaatttgtatttccatacaaattttagtctggatgaagtgcttcatgcctgtaatggaagctctttgagaggctgaggtgggtggatggcttgagcccaggagtttgagaccagcatggaaaacatagagaaaccccatctcaatataagaagaagaagaaaaagaaaaaaaaaatcaaaaacgaaaacaacacaaattttagagtaagtattttaagttccacaaaaacctggttaggatttggatagcaatttctttagttctacaaatcaatttggaaaaaattaattaatctgggaagaattcattttgagtcttctaatccatgaacatggtatctccatttgtttagaccatctttaatgcctactaataacatttctgtatagtgaccttgcacattattcttagattcttgatattttgtgctattatgtctttttataaattttatatttccaacattgttgctaatatatagtaagaaaatggaatcttgcctatggattttgaacccaacaactttgctaaactcctctgaatcctcagaatttccctgtggattatgtaggctcttctgcatacacaaccatatcatctgtgaataaagacagttttgttttcttcttcacaaactttacccgactcactgtgcagtctgccacatccaggctgatattgaatagcagtggcactaataggattctttgcccccttgccaatcttgtaaagaaagctttcaacattttcctgttagctctgttggcagctctgactttttccatagatggccttcatcagcttaacaatgggtcttttcttcccagagggctgagcttttccttaagaacagacagtgagtgtcatcaaacactaggctgcatctgttgagatggtcatacaacttgtgtcttttcctgtgtttgtgtgtgaactctctgggtgtctgagagttcttgtgactttcacagaagaacacaatttaccctccggtgtgggaaggggaaggaagcagaggaagaaagaccccaagtccccctcatccccactgaccttcctgctggcttcgtccttgatctgtgcctccttagatcctgcgtttgagtacttgcggtcatgatgacagggccaacctcctgaccagggctgttagcatctcccctgctgcccagagtccctgctccaaaccacttccttcatcttctgtacccccagccaatatttccctgcccagtgtcaacccaggcccagaaccagaccacaagggacagccccggaacccagaatcagacaaatcagcccgtcccaagctgtctcccctgctctgcccggctttcacagggaagccaacacaggctgtggcttggcctttccctagctcctttctgcctcctggtctgcctgcggcttccccctgccgccctgcggggcctgccacgtctctcatttctagtgaatgtttcaagagcgatgttagactttcctttcaatagcgttgacctctgttaggcacctttatggattaagacctgggcatagatggtttcttcggcatcacgacctgaaggtgcttgggagagacggtgaggaggagaatgcaccctgccatgctctgcaccgcacatggatgcggatttcaccatgttggccaggctggtctgaaacacacggagcccaagcgcccggtggaccctctgacggtcctcgggcgtgtgcctttgtaagcagagtattcagctctcatcagggcctcgccagagcagaaatggtctgttgataaatgcatcgtatacaattataaatgtgcacccagcattgctgcttcctcttttttttttttgatatagggacttgctctgtcgcccaggctgcagtgcagtagggcagtcacagctcactggggcctcaacctcccaggctcaagcaatccttccgcctcagcctcctaagtagctggaactacacatccagctttttttttttttttttttttgtagacacaggatctcaccatgttggccaggctggtcttaaactcctgggctcaagtgatccgcccaccttgggctcccagagtactggcattacaggtgggagccactatgcctggcctgcttccttttgcaaacaggaatcttgtaaatagaattgatcagaacttgttgtttaacgtacacagacctctagctgtactgcaaagctgtgtgcacatgtgttaagtcatctgttctatgtgttctaattataaataagaaaaaacaaatttcaatcagccatgctggaggaagagcaattatgtttctattccttctatcacaggtgatgtaaaattctcaaacaatgagatagataaaaagtacgcagccaaaaagttcaagaagaagtgttatggagatggagcaggcccttcgtaaaaacacgatgttggttttctggattttgtatgtttgctttttttttttcctcatcctaaataaatattcactgtcatacctaa

SEQ ID NO: 1894 - DNA, 4262 bp, Homo sapiens
agcgtcctgtgagggaggggctgcactgccactttactgatgaggaaattaaggttcagagagatgaggtcatttgttagaggccagacagcctcctcagcccatttctaaggttgtttctgtggtatttgccataaagccataggttcattgatttgttcttaagtagttctgagtccttcctgcatatcaggcagggacaaacgggaaagtccctgcccttggcaagtgcgggggaaatgaaatgattctgctcagcctcatccattggtctgaacaatcacgtctcatgaccccagggacacggcttcccctgaacgcggatcctagaggccaggcagaagcagcatgggtttccactcacacggtaggtggctgtgcgatttcgtctggagtccccggacccctcctcatccttcccagggttgctctgaggccattcctcgtcatctaggaggggtctacataaaagcatttataaacagctccaaatgggagcctggcgcgcccacctttggagcacttttctctactgcagatttatctactgctcgtgaaatctctggatttaactgtgatgaaagaccggaggctgaaggagaacttcaatatcatatattttaaaggttgactcacagtttggaacaagaattaaagaaccacgaacttcaaggtaaaacgggcaatggcgttgggcaagcctctctgcatctgtgtgtccagcctctcctgcgtgccagaagtccccaggcaggagtgtggtgggacatccggctggggtaaggacaggcaccctcccactgtgtcagggcccagagagtgggtggagaactctgcaagagacctgtgcaagggcgccttgtaggagcctgccgtccccacagggtgtttgtggataacacttggggagccctggccttttggggtcacggagggcttggcctctcacctcagagctgcagaggagacgcttctacatcaggacatcagaagctggaacggggatggccggcgaggggcctcttgttggggtcacagagatgggtcgcagagatggcccgtgtggaaggttggattctcaccccacctctgcccctagatgtcctggtgaccctcccctctgtagtcttggttttttgcaaaacacttatgacctcctgccatactgggtactttgcttatgtattgtgtttactctttactgtgtgtctctcctgctaaggtctacgaagaagggtctttgtgggtggggttcttagaggcatcccaagtaccagaagcagtccctggactaaggggctcaagaaatattttttatttattattttttctttttgagatgcagtctctctctcttgcccaggctggagtacagtggcacaatcttggctcactgcagccttcgcctcctgggttcaagtgatttcaggctaatttttgtatttttagtagagacggggtttcaccatgttggccaggctggtcacgaactcctgacctcaagtgatccacccgcctcagcctcccagcgtgctgggattatagacatgagccaccatgcctggccaaatatttgtcaaattgaatttgtatttccatacaaattttagtctggatgaagtgcttcatgcctgtaatccaagcactttgagaggctgaggcgggcagatggcttgagcccaggagtttgagaccagcctggaaaacacagagaaaccccgtctcaatataagaagaagaagaaaaagaaaaaaaaaaaatcaaaaacgaaaacaacacaaattttagagtaagtattttaagttccacaaaaacctggttaggatttggatagcaatttctttagttctacaaatcaatttggaaaaaattaattaatttgggaagaattcattttgagtcttctaatccatgaacatggtatctccatttgtttagaccatctttaatgcctgctaataacatttctgtatagtgaccttgtacattattcttagattcttgatattttgtgctattatgtctttttataaatttatttttccaacattgttgctaatatatagtaagaaaatggaatgttgcctatggattttgaacccaacaactttgctaaactcctctgaatcctcagaatttccctgtggattatgtagactcttctgcatacacaaccatatcatctgtgaataaagacagttttgttttcttcttcacaaactttacccaactcactgtgcagtctgccacatccaggctgatattgaatagcagcggcaccaataggtgtctttgtccccttgccaatcttgtaaagaaagctttcaacattttcctgttagctgtgttggcagctctgactttttccatagatggccttcatcagcttaacaacgggtcttttcttcccagagggctgagcttttccttaagaacagacagtgagtgtcatcaaacactcggctgcatctgttgagatggtcatacgacttgtgtcttttcctgtgtttgtgtatgaactctctctgggtgtctgagagttcttgtgactttcacagaagaacacaatttaccctccggtgtgggaaggggaaggaggcagaggaagaaagaccccaagtccccctcatccccactgaccttcctgctggcttcgtccttgatttgtgcctccttagatcctgcgtttgactacttgcggtcatgatgacagggccaacctcctgaccagggctgttggcacctcccctcctgcccagagcccctgctccaaaccacttcattcatcttctgtacccccagccaatatttccctgcccagtgtcaacccaggcccagaaccagaccacaagggacagccccggaacccagaatcagacaaatcagcccatcccaagctgtctcccctgctctgcccggctttcccaggaagccaacagaggctgtggcttggcctttccctcgctcctttctgcctcctggttgtgcggcttccccctgccctgcggggcctgccatgtctctcatttctagcgaatgtttccagagcgatgttagacttccctttcaatagcgttgacctctgttaggcacctttatggattaagacctgggcatagatggtttcttcggcatcacgacctgaaggtgcttgggagagacggtgaggaggagaatgcaccctgccatgctctgcactgcacatggatgcagattttccatgttggccaggctggtctgaaacacacggagcccaagcgcccggtggactctctgacggtcctcgggcgtgtgccattgtaagcagagtattcagctctcatcagggcctcgccagagcagaaatggtctgttgataaatgcatcgtatacaattataaatgtgcacccagcattgctgcttcctctttttttttgatatagggacttgctctgtcgcccaggctgcagcgcagtagggcagtcacagctcactgcagcctcaacctcccagctcaagcaatccttccacctcagcctcctgagtagctggaactacacatccagctatttttttttttttttggtagacacaggatctcaccatgttggccaggctggtcttaaactcctgcgctcaagtgatccgcccaccttgggctcccaaagtactggcattacaggtgggagccactatgcctggcctgcttcctttcgcaaacaggaatcttgtaaatagaattgatcagaacttgttgtttaatgtacacagacctctagctgtactgcaaagctgtgtgcacatgtgttaagtcatctgttctatgtgttctaattataaataagaaaaaacaaatttcaatcagccatgctggaggaagagcaattatgtttctattccttctatcgtaggtgatgtaaaattctcaaacaatgagatagataaaaagtacgcagccaaaaagtgcaggaagaagtgttatggagatggagcaggcccttcgtaaaaacacgatgttggttttctggattttgtatgtttgctttttttttttcctcatcctaaagaaatattcactgtcatacctaattttgtttttgtaagtttgtattcttttctttatagggaggcctcacaaaacctggatcagactcgcccactgccctgtgtctgccctcccgaccccctctccctgcccagcagggatgtgggtggcagtggtgctgtgtggagggtggcgggaggaccgggaagactgcgaccagtgagccgggaggccttg

SEQ ID NO: 1895 - DNA, 3471 bp, Homo sapiens
aggaagcttttataggaaaaggtctttctggctcaccccatcccctcccaattcccagcttctgatggaattgagcaaggggtggggcttagtcagactgctggagccagcctctcgcttgtcctaggattctctgcctaagcttaaggacctggcatttctcaagaaccagctggaaagcctgcagcggcgtgtagaagacgaagtcaacagtggagtgggccaggtaaggactgtcccaccccacccctgccttaggctttattgcccaacatgctcttgagagtgttaaatggatggtagagatttcttcagcaagtgattattgagggcctattctcagtcaccctaaggacaatttttctgaatggcacatgaactaatatcttaagtagtggttaagtaggtgaagaggggaggaaagaacattccaggcagaacagcatatgtaaaggccttgtggtaggaagtagcattataaacatgaggggtgaaaggaggtccatttggctacagtagttggggagcatgctaggaaatgaggctggagaaaccggcagggctaggggcatctctgaccttgtgtggcggtggagttctatggttggagctttctgaccccagggttctgagattgtgtgatcagaactgcttggttctttttctggccccagaaccttgggaaaaatctggagaaaataccacggttgtccagggtgaggaggagctggtggtggaatgctctaatcccagcttgagtagcccctggacagtcaggaaggagcctagctaagtttccttctgcatttttctctgcaggatggctcgctgttgtcctccccgttcctcaagggattcctggctggctatgtggtggccaaactgagggcatcagcagtattgggctttgctgtgggcacctgcactggcatctatgcggctcaggcatatgctgtgcccaacgtggagaagacattaagggactatttgcagttgctacgcaaggggcccgactagctctaggtgccatggaagaggcaggatgagcagctcagccttcaggtggagacactttatctggattccccagctgtcatccatttgctatctccaactttcctgccaccttcatccttgcctcccttcctgcagattgtggacagtagttcctcagcctgcaccctggattccttcttccccttcctagctccatgggactcgccccaagactgtggcttcaaggaccaccagccccttactcttcaagccctgactgtggagttggtagatgcctctgatcctcagtattctctctggcaatgttccacggcttctccttcctgggagctggctccataacttgattttccccaaacgtgttgcaatccctgctgccccttagccacccagggtcttgtgtgggtatgagtgtagaggatgggggtatgccaggcctgggccgtcccaggcaggcccgctggaccctgatgctactcctatccactgccatgtacggtgcccatgccccattgctggcactgtgccatgtggacggccgagtgcccttccggccctcctcagccgtgctgctgactgagctgaccaagctactgttatgcgccttctcccttctggtaggctggcaagcatggccccaggggcccccaccctggcgccaggctgctcccttcgcactatcagccctgctctatggcgctaacaacaacctggtgatctatcttcagcgttacatggaccccagcacctaccaggtgctgagtaatctcaagattggaagcacagctgtgctctactgcctctgcctccggcaccgcctctctgtgcgtcaggggttagcgctgctgctgctgatggctgcgggagcctgctatgcagcagggggccttcaagttcccgggaacacccttcccagtccccctccagcagctgctgccagccccatgcccctgcatatcactccgctaggcctgctgctcctcattctgtactgcctcatctcaggcttgtcgtcagtgtacacagagctgctcatgaagcgacagcggctgcccctggcacttcagaacctcttcctctacacttttggtgtgcttctgaatctaggtctgcatgctggcggcggctctggcccaggcctcctggaaggtttctcaggatgggcagcactcgtggtgctgagccaggcactaaatggactgctcatgtctgctgtcatgaagcatggcagcagcatcacacgcctctttgtggtgtcctgctcgctggtggtcaacgccgtgctctcagcagtcctgctacggctgcagctcacagccgccttcttcctggccacattgctcattggcctggccatgcgcctgtactatggcagccgctagtccctgacaacttccaccctgattccggaccctgtagattgggcgccaccaccagatccccctcccaggccttcctccctctcccatcagcagccctgtaacaagtgccttgtgagaaaagctggagaagtgagggcagccaggttattctctggaggttggtggatgaaggggtacccctaggagatgtgaagtgtgggtttggttaaggaaatgcttaccatcccccacccccaaccaagttcttccagactaaagaattaaggtaacatcaatacctaggcctgagaaataaccccatccttgttgggcagctccctgctttgtcctgcatgaacagagttgatgaaagtggggtgtgggcaacaagtggctttccttgcctactttagtcacccagcagagccactggagctggctagtccagcccagccatggtgcatgactcttccataagggatcctcacccttccactttcatgcaagaaggcccagttgccacagattatacaaccattacccaaaccactctgacagtctcctccagttccagcaatgcctagagacatgctccctgccctctccacagtgctgctccccacacctagcctttgttctggaaaccccagagagggctgggcttgactcatctcagggaatgtagcccctgggccctggcttaagccgacactcctgacctctctgttcaccctgagggctgtcttgaagcccgctacccactctgaggctcctaggaggtaccatgcttcccactctggggcctgcccctgcctagcagtctcccagctcccaacagcctggggaagctctgcacagagtgacctgagaccaggtacaggaaacctgtagctcaatcagtgtctctttaactgcataagcaataagatcttaataaagtcttctaggctgtagggtggttcctacaaccacagccatgattgtcttgtgtcttctgtctgcgcaactcccctcaaacaattttgttcctctggggtcctgagtatcttaattctgggataacttttagactaagaaaaaattgttttctcca

SEQ ID NO: 1896 - DNA, 539 bp, Homo sapiens
ggcggatgacaaggtgagtggccgtgggggtgatctgcagccgggcgtggtcttcactctccttgacctttttagttccggggagaagcgactctggagcggctcaggagtgaggatgtcccttgtttcttctgcggctcctgtcaactgcctcaacagtgtggagtggtgtggggagagcattcggcgaggcgggaggagccgtggatcccccagatgtcccctcctgggaaccatcacgaacccgttactagcacagactcaaaaacattcacccttaaacactcctcactttaccccattccctagctcccgaaattttcttcccagtgacacgatgtttccaatcacacggacactcacaccaccctcattcaaacactcctttgcatacactctgaatttcatacttatatgcgatcaaaatcactcagtccatttacttacacacttgccgacagtcttttttgtcattctcagtcacatccagtcactcacattcagtttgggatgtccttgggaagaaagaggtaaagccc

SEQ ID NO: 1897 - DNA, 5536 bp, Homo sapiens
cgggacggcgagaggcacgcggcgggaggggaccggaatcccgcagctccggccgcgccatggacggcaacgacaacgtgaccctgctcttcgcccctctgctgcgggacaactacaccctggcgcccaatgccagcagcctgggccccggcacgaacctcgccctcgcccctgcctccagcgccggccccgccctgggctcagcctcgggccggtaccgagcttcggcttcagcccggccccactccgaccccggagcccacgaccagcggcctcgcgggcggcgcggcgagccacggcccttccccgttccctcggccctgggcgccccacgcgctcccgttctgggacacgccgctgaaccacgggctgaacgtgttcgtgggcgccgcctgtgcatcaccatgctgggcctgggctgcacggtggacgtgaaccacttcggggcgcacgtccgtcggcccgtggcggcgctgctggcagctctgccagttcggcctcctgccgctgctggccttcctgctggccctcgccttcaagctggacgaggtggccgccgtgggctgctcctgtgtggctgctgtcccggcggcaatctctccaatcttatgtccctgctggttgacggcgacatgaacctcaggtacggatctgtctattccttgggcatctgtctcatcccagacgcgcgtttacggccgtgggctcacgacgaaggacagaggcagtggaggggttggaattaggcgtggaggaaggaggagaaaaggagaggaagttgatgacgccccggctttagaagtcaaggccgacctgcaggttgtgctgctaggggagcaagctagacggcgagggagctgctccaaggctgggattccatgcgcagcgcggcccttcagcagggtccctcgccgtcctccccgagcgtcggggtggcagcgcaggtcgttgtccagtggaagacaaagagaagggggagtctgaactagaactcgccggcaacgtaaaagtaaaatagggctactggcccgtcagagaaagtaatctcacatagagtgcaggattgttgagtccgaccaacaagtagcagtcagcagctttaccatggcttaccttgcagggggcttgcaaggaagaacgttccttcccctcagaatcatccaggctcaatagactttataatgtcgagggcagcagtaccgagacagggggcttgtttttcctccctgccttgggttcataattccatcggtgttagacgtgctgctctcttggcactctcctcggatgtaggttctgcccagacttcaaccccgggacttgcagtctccccgttccacctctactcaacatacaagaaaaaggttagctggctgtttgactcaaagctcgttctgatttctgcacattcccttttctgcagcatcatcatgaccatctcctccacgcttctggccctcgtcttgatgcccctgtgcctgtggatctacagctgggcttggatcaacacccctatcgtgcagttactacccctagggaccgtgaccctgactctctgcagcactctcatacctatcgggttgggcgtcttcattcgctacaaatacagccgggtggctgactacattgtgaaggtaaggccccctcttccctttccatactagcttggagagcccttgatctctgacccacagcagaaatgttaggaagtttggagaaggcggaaaggaagaaaaggacttggaagtagttgcatggataaaattttttttaaaaagtttatgctacaaagataacttccacttttgggattcctagaatgacagctttaattaagacacagcttaatcaaaaccagcataagagaactatcagtactcattggaaggaaacagatcatagcagggtggggaagatgacagtgtaattaaatggcaacatattttccactaattgtatataattaaacataaaagcagattaaataaaattactttaatagaattggtgcagtattttagaaatgcatggctatcttttcaaaaatggaactctaattctgagaaactctgtagtaggttcctttaacattttattaaatttttaaaagtaagttgatactaataggacaaaaagtaatggaaaagttacattgtagtaatagaacacacaaaatattggctttaaagcacaaaataaaattgggtcctggataaataatggaggttatgttgaccttactaaatgtgtttctttttctttctccattgcaatattttatatggcttataaagctagtgaaaagataggggatttctataatttgtgcaatatttctcctaaggctttgattttttaaaaaatgaatgctttctgtagcagtagagattttaatagtttagtagattctagtagttgactggaggaaaaaaaatctttgcaaaattaagctgtctttgaaaattcaaaaacagtagcaaaaaagaataaaccatgaccaggatgctgacttcaggtaattaatcaaataaaatacgtaactattactgcaaaatgcacaggcaaattcctttagacaaatgaagagaaaaagagccaccctaatgtttcaattatgtagattcaagaagacataatcttttgttttacttattttctaaagtaatttgattatatagagtcagcttttattaatatgaaaagtagagagttcttttctgtgcatatatccaggcttgagtaaaagaaatcctgctccataatacacatgtatatgtgaatgtaaaaatgtatgtgtacatgtaaatatgcatatattaatacctgtaatatatactcatagatactcttgagatgcattaagaacttgttaatcttaatcattaagctaatgctattaatgtgatggcatttactataaaaccttaggaagtctaagagaaagtcaatcaaatgacctatttacacacccaaaacaagaaatatatttaaaataaatatattaataaattaatatatttaatatttaaatataatagacataagattagctacctttgaatttaaggttaacctagccctattctttaattaacacactattaagaaacggtttatataattgttacacctttgcaaacacttcaaaatgagcattcaatgtcaatgcttgcccaaatgatttaaaatagttctaagggactttggagccaatatttcaaaatgaagaaatcagactgtttgtcagcgctttcaatgtgacatactttgaaatggtatgcttttacatgtaatagcctggtttctgccaattatgcatctgtagtatctgtaccttatataataattattgcagcatcctctagggtagaatttgtgaccagctcagataaattttaaataattttttaagagtgtagagttacgccattcccgaagactgcaaaagggatatcccagctatccagggaaccagaagcaacatttaagctgttctctctggctctagtttcctttccctgcccactcctcattaaaaaaaaataagttaactaccaatatgaaggagaacgaggagaggaatttttagatttccgccttacaattcatacagactgttttatttgaatgagtgaaatgtaccagtcagaacatcaagatgacacgttttatacagaagtcagttgtactgtatccgaaatccatctattgtaataatacgtaagcatcattacagacttatagatgggaggtttctcatgaacaaataaaaaaggggaaagttgccaaattgcaaagaattcttcacatatttatttacatttttctctcttacataatctaagagtaggtaattgtttcaatattgcaagcaatcctctgcagtatattttgagggttaaaaagatcacacactgagcttcagacattttaatcaagtttcacaagttttaactcatgtaaaatgagaactaatttcttatggaaaacacggggttcagttcagggaaagtaaacatccacttgtctgctctgatgatcagaccatacctggggtattaggttcagttctaaatgccctgtttttaagaggcacattcacatatgaaacacattctcagaacagtcaggataccaaaacaaagttatgtgatggaggtttaagtttggggatgatctgcctgaagaagagtagccttcccctgataaccagtttttaagcttttgaagagctgtttttcaggaaaaaagcttttgaaggctatttttttttgaagagctttttttttttttttttttttttttttttttggtgaaatggagtgttgctctgtcacccaggctggagtgcagtggcgcgatctctgctcactgcaacctccacctcccaggttcaagcaattctctgcctcagcatcccgagtagctgggattacaggcattcaccatcacacctggctaatttttgtatttttagtagagacagtgtttcaccatcttggccagcctggtcttcaactcctgacctcatgatccacccaccttagcctcccaaagtgctgggattacaggtgtgagccaccgcgcctggccagaaaagctgggtttttttgtttgttttttgtttttgaagagctggtctctgtcgctcctgagagcctatatccaactcaatggctagaggttatagaaggcaaattgtccctggacataaggacaggcctccaaacaatcagagctgcccaatgtggctctggatgcttcctgaagaggtggcctgcccatcttcagaaatattctgtcaaaggtctccattttgtgttggagagcatactagatgggtgttttcttccgtgagcttaggattctctcgcctgagttcatcttcaaccatctcattgtaattttctattactaggtttccctgtggtctctgctagtgactctggtggtccttttcataatgaccggcactatgttaggacctgaactgctggcaagtatccctgcagctgtttatgtgatagcaatttttatgcctttggcagcgtacgcttcaggttatggtttagctactctcttccatcttccacccaactgcaagaggactgtatgtctggaaacaggtagtcagaatgtgcagctctgtacagccattctaaaactggcctttccaccgcaattcataggaagcatgtacatgtttcctttgctgtatgcacttttccagtctgcagaagcggggatttttgttttaatctataaaatgtatggaagtgaaatgttgcacaagcgagatcctctagatgaagatgaagatacagatatttcttataaaaaactaaaagaagaggaaatggcagacacttcctatggcacagtgaaagcagaaaatataataatgatggaaaccgctcagacttctctctaaatgtggagatacacaggagcttctatcttgctgaaatattgcttcatatttatagcctgtggtagtgcacatggttaacataaaagataacactggttcacatca

SEQ ID NO: 1898 - DNA, 6717 bp, Homo sapiens
cctcccagtctgaggctgcatcctccattaccatcgcccttcctgtgggctgggaggccaggtcctttcctgcccagcgatgtcagcgtttcctcaggggccaggcactcatcaggagaaaggaactaattacttgagtaatttgccttgccttgctgagaggagtgtgccctgagggactccatgtgagtgtggtgacgggtgtgggggtgtccctgtgttattttaaaatgggtgccttcaggacgatgagcatgtgaccatttcctctctatttccatcacaagagtattatggtatgagggtctcaggttagattatcctcccaagactcttctctcttccttctctactggaagcccacatagcatttccttatggcttgagggagaggttcggagccacttacaaattagataaagtacatttacaatcttgtacaaagccacacaatgaagtcatttttctcagctttttttttttttttttttttttttttgagcctgagtctcgctctatcgtccagactggagtgcagtggcgcgatcttgcttcactgaaacctctgcctcccaggttcaagagattctcatacctcagcctcctgagtagctgggattacagacatgcaccactatgcctggctaatttttggatttttagtagagaccgggtttcaccctgttggccaggctggtctcgaacccctgacctcaagtgatcttcccgcctgggcctcccaaagtgctgggattataggtgtgagccacagtgcccagccttgtttttgtttttgttttgttttgacagtctgtcactctgtcacccaggctggagtgcagtggtgcgatctcacctcacttcagcctctgcctcccaggttcaagtgattctcctgtctcagcctcctgagtagctgggattacaggcgtgccaccacgcccagctatttttgtaatttcattaaagacagggtttccccatgttggtgaggctggtcttgaactcctggcctcaagtgatccacctgcttcagcctcccaaagtgcagggattacaggcatgagccactgtgcctggcctcagctatcttgaatgctggagaattaaatccttttctgtctagggtgtcagctccctaagggctgggccaaaacagttggatttataagacactagagtcttgcctcagtagctcctttgaattctgcactgaattgatcagtttcttggcccaaagtaaactcagatggcagcccaagagccactctgcagtgccttctttcacatggtcatcatgctctctgatccctcaggttctgtctaagcctcatgttttatgaccgtgctgttctcagcccacctcaccctgccccatgccttctcaatggtttgttcacctgaattccccagatttcatgccagtatccccaaggttccttgacctcttggtgtaagcattcagcatctaaaattcattttattcccgtcaacgcatttctaactgtagaacaagaattataaatgacaaagctcatagaaaattggcaccttgtcttccccctccctcttattttatacataaaagagaatatgggctgggcattgtggccaaggctgggcatgatagctcatacttgtaatccagcactttgggagggtgaggcagatggatcacctgaggtcaggagttcaagaccagcctggccaacatggtgaaacctcatctctactaaaattacaaaaaaaaaattagctaggcatggtggcagatgcctgtaatccagctactcaggaggctgatgaaggagaatcacttgaaccctggaggcagaggttgtagagagccaagatggcgctactgcactccaacctgggcgaaagagagcaagactccgtctcaaaaaaaaaaaagacaaaaattagccaggcatggtggtgccacctgtagtcccagctgcttgggagcctaaggcaggagaatcgttttgacctgggagtaggaggttgcggtaaccgagattgtgccactgcacttgagcctgggcaacagagtgagactctgtctcaaaacaataagaacaacagcaacaaaagagagagaccatgccttgctccaggtctcttagctattgaagatgtacctggacccaggtctccggtcttctagttgaagcaattgtactgccttacaaagtcacattctctttggtgctttttgattgacgtatttatccaactagaaagttactcatgccctcatccaaaaatgtggtagaggccagattagtgctggtaggaataagagatataacctttggctttggaaccacaagcattagcagtctccatgttctttaaagacttggtgatattggtatttaggctggacaccatgcaaagactacacaggctcggttcctgcatgcagagaagttatctaagagatatgaccaggccggaatagaatgctcagaccacgtggaggctgttaaacttttacataatctagggaaagaagggacacaaggtggcattagtctagggtcaggtgggaaaaggttatgctgaaaagtctctgcagctcaggacagctttgtgcaaagaactgaagttcacagctgctagtgcctgggagatcaaatagtataaatgagggcagacaaccctgaggggcagatggagctttccagacaatcttggcatgaggatgagtgagtttcaaatcagtcctgccgaggcagatggcttcctccagctctgcttactgaatgcgaagtcacagtcagtaagaaaactggttttcttcttcccaggcgctgccccatacctgaagaccaagtttatctgtgtgacaccgtaagtggcttcctttccccgttttgccttcatttctaatatcctcagttatccctgggaatgggacactgggtgagagttaatctgccaaaggttggaagcccctgggctatgtttagtactcaaagtgaccttgtgtgtttaaaaagcttgagcttttatttttctgttggagaccagagtttgatggcttgtgtgtgtgtgttttgttcttttttttttttccattgtgtcttgtcaaccccccgtttcccctcctgctgccccccatttcctacagaacgacctgcagcaataccattgacctgccgatgtccccccgcactttagattcattgatgcagtttggaaataatggtgaaggtgctgaaccctcagcaggagggcagtttggtgagtatttggttgacagactttgtccctataagggaagttggtcccctttgtgtgatgctctcacatgtacacaccgagagctggtcactcggaatggtaggagattctagagctttgctttccaaaagagatggtatgaatgccacatgtgtgagtataaatcttctagcagccacactggaaatagacgaacttaatttttacaatatattttatttaacccactaaatccaacatactctcaatttaacatttcagaaaaagttgaggctgggtgagtggctcatgcctgtaatcccagcactttgggaggccgaggtgggtggatcacttgaggtcaggagttcgagaccagtctgaccaaaatctctaaaatataaaaattagctgggcatggtggcgcatacctgtaatcccagctactcaagaagctgaggtgggaggatcgcttgagcctgggaggtggaggttgcagtgagcagagatcgtgccactgcactccagcctgggcgacagagtgagactccatctcaaataaacaaaactaaactaaaaagaaaaagttgagacctttttttattcttttttttcatactaagcctttaaaatccagtgggcttttgacagccacagcacagctcagtttggacaaaccaaatctcaaatgcttggtggccacgtgtgtctcggggctcctgaattaaacagtagatcaagggcagaagatctcaggacagccttagagcttctgtaaacatggagctctgggaatcagttaaggtgggaatgagaaaggacccttcccgaggcagggtcctccagggaggagggtaaatctggcttttctgaccatccctgggccttaaggggcaggagattggatagcagtggtagcctgggccctgtcctctgaagggctgggggcgtggcctgccagttgcagagggtggacaactgaactagttttccctgtctgtccctccagagtccctcacctttgacatggagttgacctcggagtgcgctacctcccccatgtgaggagctgagaacggaagctgcagaaagatacgactgaggcgcctacctgcattctgccacccctcacacagccaaaccccagatcatctgaaactactaactttgtggttccagattttttttaatctcctacttctgctatctttgagcaatctgggcacttttaaaaatagagaaatgagtgaatgtgggtgatctgcttttatctaaatgcaaataaggatgtgttctctgagacccatgatcaggggatgtggcggggggtggctagagggagaaaaaggaaatgtcttgtgttgttttgttcccctgccctcctttctcagcagctttttgttattgttgttgttgttcttagacaagtgcctcctggtgcctgcggcatccttctgcctgtttctgtaagcaaatgccacaggccacctatagctacatactcctggcattgcactttttaaccttgctgacatccaaatagaagataggactatctaagccctaggtttctttttaaattaagaaataataacaattaaagggcaaaaaacactgtatcagcatagcctttctgtatttaagaaacttaagcagccgggcatggtggctcacgcctgtaatcccagcactttgggaggccgaggcggatcataaggtcaggagatcaagaccatcctggctaacacggtgaaaccccgtctctactaaaagtacaaaaaattagctgggtgtggtggtgggcgcctgtagtcccagctactcgggaggctgaggcaggagaatcgcttgaacctgagaggcggaggttgcagtgagccaaaattgcaccactgcacactgcactccatcctgggcgacagtctgagactctgtctcaaaaaaaaaaaaaaaaaaaagaaacttcagttaacagcctccttggtgctttaagcattcagcttccttcaggctggtaatttatataatccctgaaacgggcttcaggtcaaacccttaagacatctgaagctgcaacctggcctttggtgttgaaataggaaggtttaaggagaatctaagcattttagacttttttttataaatagacttattttcctttgtaatgtattggccttttagtgagtaaggctgggcagagggtgcttacaaccttgactccctttctccctggacttgatctgctgtttcagaggctaggttgtttctgtgggtgccttatcagggctgggatacttctgattctggcttccttcctgccccaccctcccgaccccagtccccctgatcctgctagaggcatgtctccttgcgtgtctaaaggtccctcatcctgtttgttttaggaatcctggtctcaggacctcatggaagaagagggggagagagttacaggttggacatgatgcacactatggggccccagcgacgtgtctggttgagctcagggaatatggttcttagccagtttcttggtgatatccagtggcacttgtaatggcgtcttcattcagttcatgcagggcaaaggcttactgataaacttgagtctgccctcgtatgagggtgtatacctggcctccctctgaggctggtgactcctccctgctggggccccacaggtgaggcagaacagctagagggcctccccgcctgcccgccttggctggctagctcgcctctcctgtgcgtatgggaacacctagcacgtgctggatgggctgcctctgactcagaggcatggccggatttggcaactcaaaaccaccttgcctcagctgatcagagtttctgtggaattctgtttgttaaatcaaattagctggtctctgaattaagggggagacgaccttctctaagatgaacagggttcgccccagtcctcctgcctggagacagttgatgtgtcatgcagagctcttacttctccagcaacactcttcagtacataataagcttaactgataaacagaatatttagaaaggtgagacttgggcttaccattgggtttaaatcatagggacctagggcgagggttcagggcttctctggagcagatattgtcaagttcatggccttaggtagcatgtatctggtcttaactctgattgtagcaaaagttctgagaggagctgagccctgttgtggcccattaaagaacagggtcctcaggccctgcccgcttcctgtccactgccccctccccatccccagcccagccgagggaatcccgtgggttgcttacctacctataaggtggtttataagctgctgtcctggccactgcattcaaattccaatgtgtacttcatagtgtaaaaatttatattattgtgaggttttttgtcttttttttttttttttttttttggtatattgctgtatctactttaacttccagaaataaacgttatataggaaccgtc

SEQ ID NO: 1899 - DNA, 418 bp, Homo sapiens
aaaggtgtcagagtggaggcctccctccccggccccctcctaccccccagagcggcctcgtcctgtctggggtcagataagccacctaagcggggtggggggtagatactcccaccgcaccaaggcctccccttccacagttggctcctttatcactttcccttcagttcacccagcggggacaacacgcagacacccggtggtggctgcagggcccccggcagccagcggtgataatgcagggaaaggcgccccaacctcagctacgcgggcgcccacagggcttctccccacccctacacgtgccccagcgccctggagaccgcgcctgggagctacgagcgagcaccttccctcgcagagatggatcagattagccccctggggcggtggcacctgcccgtcccctcccctcctc

SEQ ID NO: 1900 - DNA, 4126 bp, Homo sapiens
tgcagtgcagagttcctttatttgggggcagtgcccaggccagttggtggaaagaggcaggcatacaacccactgtcaggctggggggcccagcaggggcgatggaggagacgaggtggttgagggattttctcagctgcaggttccaggcccaggacaggaggagatgtcaggcatcagacactgagcctgcttggtgcccgcaggagccaaaaactggcggccagagtttttcccgcccccgccccccgcttacccacaagggtgcccagaggccaccctctgcatcctcctttcccctcaggatggagtccaggcccaaaggggtcagattctgcagaggccaaagaggacactcaggaaggtgacactgcctcagccagccaaggaccccctgcctcgagaggaggcagcagaggaagagcaaacactttaacacaggctgtggcgacccgccccacagcacacacggcacacagagggcctcaggcacagctccccttctcagagcaaaacccaactagacacaaggcccagctcctgcccacagccacagaaacgcgggccacaggcttgcctgggctggcacctactggttctcttccctgctggcagcatgaagggaaaagacacaggagggctcagctgggctcctagactggcccaggctgagtcctggtcccagccaacatctgacaaaggaaacaccccaactggaggagacaaaaggggtgtggctcacatggagcacgctgtcaccgtcctgagggcttgcccatggagaagacagcaccctgggtactgaaggggaacggtggggcaggaaccaggaggtgagctgggactcaggtacttgctgctggccaggtactcacagcgtctggtaggtgctgtccttggccttgaggaagtgcagcacaaagaaagccaccgcctgtaggctcaacaccagcacgacacctccgataaagctggccccgtcaaatccagggctgtgggcctcagggactggggggctccctgcaggggtgaggcagggcaggggtcatagcagtcactgtgaaccaggatcccagtcctaccctcataactggcacaagtaacctggaggccccggtcctcaatatggggtgcttaaaccctgggctccgtttagtccagatcccgcaggcagttgggaagcgcctggtgggaggaacagtggcaggggagggtggggtgctgtccagccctggctctgctcctggcttgctctgtggcttttatgccacccacattctctctgggcctcatgatcacatggtccaattggtggcttggaccagtgactgggctcccaccctccctgggcctcaccagcccaatagggtgaagacagagccagaactcagaccctcccctgctcacaattcctttcagccttggacctcagggttcagagccaagatgcagacgatatagtcccttttcaggactcctaagccctaagacctcagtgtcacccaatgtcagagccctcagagagggaaggagcagggggagaagtggaggccccaactgtcaccctgctaagtgggtaagcgaggactggacagtgtgtgtcagggggaacatggctgagggacaggcttggccaaagtcacctcacaggacatagccagactcacacagggtcccctgaccatctcctctgccccttagaaggtagggctttagggccatggttgccaggctatgcctgggtggctcccagctgtgccacggtacctgtccactcctagcagggatttgatttcaggccctgggctgggtgcccagaacagggcagggctggtggatggaagatcattctgggacagtggaaaggggcccagcctgaactgggtctccctcccagaaggtgtaaggggtggaaggagtctgacaatatgaagggcaaacagtggtcccagctcccgctcagggagccccagagaaggaagctgggggatgaggagcagaagaggggagaaatgagccacatgaggctgatccggggctccagctgagggagctgagccatcaataattcagcttctgagatcggtttctggctttaattaaccaagggcctcttcagccatccctgccaagtctggtgacctccagcccctgagagggagtgggaagcaaagggtggcattcttgcctctactccgccaggaacccgccttgtgaccctctctgggcctggagggtgcagtaggcaggcactgaggatgtctcctgagcaactcgagccacacaccctcacctccaaggacaagtcccgaggagtgaccttgagttcccagaactggcaatggggaggagggatgggaactgtcatttcttgattgccttcagtgagtcagacactgaagtgggcactgtacagcttctcataaaacctgcagagcaactctatgagaaaggcatcatccaacccatttcacagatgcggagacaggctccgagggagaaggcgcagggccgaggtcacagagcatgtcagtgcctgagcccagagctgtcttcccctgcacctctgctcctcccactgccccgtctccagggagtactcacctgttgtgactgtcttcggttcataggtggggtggtggtgagcagctgaggagacaggtgatccatagcaaagcagccttcccaccccctgactcccatcaagaccccagcccccactcaccgctaaacttccgattcagatgcagccctgtccctactctagacatccaacatacttgcaagccccacacagttccctccaccagatgtgctctctctccatctctaccttccaggctcattactgatgccacctcctccaggaagcactccctctcattccctctgaacttccaaagtccttgctatgccttaaactagaagaagagctaacactcccatcccctccacacacctgtactaattttcagatgaggaaataggcagagagaggaggggacttctcagtgagctaaaggcagaactgataccgggcccaggtatgggtgagcaaaatccaccgcctgagagaggctgtttcctcctggggggcaggctatggctggggagacccatgcaacttggcttaggtgcaagaacccccttacctggacatgcctctgagcggttgtagatggagcaaccttccttgaccacctcagattgggccacacagtgtcctggtgagagaaggtgcaggggggaggtttggggagaggggccagggccttggggttcagagctgggggcactcaatctggggagggctcagctccatacctggctcctctggccggcactgctcccacatgcagctggagagattgcgcgctctgtctccctccacgcagtgctcacagacctccagctgtttgcaggccccttggaccgccggccagatattcaggcggatcagggctcccctcccaaagcctcgagctcctttacctggtagtgcggtggagtgggaagggagaattcctcgaagccaagctgtggcacccgcccaccctcccacccaacactccggtggccctcgcccctctgcacacatctgggctctcacactcacccctggatccccaagccccagcgcacacctggagcttccacagcagaggtctacacacacctagagcctccccacattcacccagagcccctccctttgcatacacccggggttcccagattcagttggagccacctcccccagaccacctgaagctccctaggcccccacacctggggcctatatttacacacagggctccacacagagctggagccccctctcccacccctggaggcctgcacttggccggaaagccccctcccctcaagcccaggctgctcctggggagacggctggctgaggtgcaagctccatccgtccccgtcgagcccctagccagaccctgccgcgagttaccagccacagccagctgggcacataggaggaggcagcaacagccgccacagagcgcagtccgcaaggcgcggggtcccggagcctccatgggctcgcggggtgggggtggccgggggcggtggccgggatcggtggacagctgccgggcgc

SEQ ID NO: 1901 - DNA, 341 bp, Homo sapiens
tttagtagagatagggtttcactatgttggtctggctggtctcaaactcctgacctcaagtgatccacccgccttggcctcccaaagtgctgggattacaggtgtgagccactttgccccgcctaaatttttattttttgtagagatgggttctcactatactgcccaggctggtctcaaactcctggcttcaaacaatcatcccgcctcagtctcccaaagtgctggaattacaggtgtgagccactatacctcctggccagttttttattttttaatatatacagggtctcactctgtcacccaggctggagtgcagtggcatgatcttggctcactgc

SEQ ID NO: 1902 - DNA, 142 bp, Homo sapiens
agggaggagggatagcattaggagatatacctaacgtaaatgatgagttaatgggtgcagcacaccaacatggcacatgtatacatatgtaacaaacctgcacattgtgcacatatactctagaacttagagtataataaaa

SEQ ID NO: 1903 - DNA, 890 bp, Homo sapiens
ctggagtccatgcccctaggatggggtgagggagtatcactctgtggggtttcacagcaccctggatcctgccttccagcccctgccaaggtaaacagtgctgcctgcctcctgtggggaatgcaggatggggcaatgccctggcagcagggtcttgcctcagctgatgcaactgtggctgctcctgtgtgcacagatcatgtgcctggaaggccttcctgcagcaggggcagtgtcagaaagtggaagagtggtgtgagcagcttccccggggaaagcctggctgagcaactgaccttgagcaagcactgcagatggcccttgttcctgccgggctcctccagctgggagctctcagcccctggtaaattctggcagtgaaagacacattagcacctccccctacaatgaggcacctagctagacaacttggctgtccgggcttaacctgcgtggcagggaaggacgcctgcccagccttagcctctacgcaatggtggaggcagggagggagagaaccacacagctcccctcatttcccagcagcccccatggagcctagtcaacagggtgtggtcacaggctaaatgagcaaagatgtgagctaatatactggtaggtgtcatgggggctttcagagctgggtaaggagggaaagagatggagatactggttccccactccttaacctgccacctgccttccctgtcctttaccctccctcattctgctggacctgaggaaaatgcaagggaggctaggcctagtggctcatgcctgtcatcccaacactttgggagactgaggtgggagaatcacttgagcctaggagtttgagaccagcctagggaacatagtgagacctcgtctctacaaaaaaattttaaaaa

SEQ ID NO: 1904 - DNA, 891 bp, Homo sapiens
ctggagtccatgcccctaggatggggtgagggagtatcactctgtggggtttcacagcaccctggatcctgccttccagcccctgccaaggtaaacagtgctgcctgcctcctgtggggaatgcaggatggggcaatgccctggcagcagggtcttgcctcagctgatgcaactgtggctgctcctgtgtgcacagatcatgtgcctggaaggccttcctgcagcaggggcagtgtcagaaagtggaagagtggtgtgagcagcttccccggggaaagcctggctgagcaactgaccttgagcaagcactgcagatggcccttgttcctgccgggctcctccagctgggagctctcagcccctggtaaattctggcagtgaaagacacattagcacctccccctacaatgaggcacctagctagacaacttggctgtccgggcttaacctgcgtgggcagggaaggacgcctgcccagccttagcctctacgcaatggtggaggcagggagggagagaaccacacagctcccctcatttcccagcagcccccatggagcctagtcaacagggtgtggtcacaggctaaatgagcaaagatgtgagctaatatactggtaggtgtcatgggggctttcagagctgggtaaggagggaaagagatggagatactggttccccactccttaacctgccacctgccttccctgtcctttaccctccctcattctgctggacctgaggaaaatgcaagggaggctaggcctagtggctcatgcctgtcatcccaacactttgggagactgaggtgggagaatcacttgagcctaggagtttgagaccagcttagggaacatagtgagacctcgtctctacaaaaaaattttaaaaa

SEQ ID NO: 1905 - DNA, 155 bp, Homo sapiens
cacaacctgagagagatcacaggcaagcaaaaaacactcaaacgtgtgtaaaaccaaactttcatctccacctttccgtgttccacctctgttaagggggacagcaagcagcttgaggctaacgcttgttctttgatgacctcctttcacttctc

SEQ ID NO: 1906 - DNA, 155 bp, Homo sapiens; identical to SEQ ID NO: 1905

SEQ ID NO: 1907 - DNA, 13255 bp, Homo sapiens
ggttgtttactgaatgcttctggtatctgcagccccgctggggttcggacagggggtctggaatagggcttcacaactacagcagggctaggaccctcttgggctggaaggagctggagaggcctctgcaagctgtcacaggctcttggtgctggcactggctcaggctttcacacacacacacgcgcacacacacacacacacacacacggacaggcacccccttggtggccttcacagtttcaccttcaggtaaatgggctcatcctttgagccatgaggatgggaagcgaagcaaggaatgaaaaagctagtgtgtttgtgtgtgtgtgtgtgtgtgtgtgtgtgtgtgagcgcgcgcgcgcgcgcgcgtgtgtactcgtgcgtgtgcctgtgtgtgcctgggagtgacctcacagctgccggaacataaagactcacaggtccgcctcccaggctcaaagctggctctgcaggggacatgagaggcacaccgaagacccacctcctggccttctccctcctctgcctcctctcaaaggtaaggaggcccgggccctggaatgcactgctgactatttgggtgtggagggggtggggatgtaaaatcgcagccaaggacccccttggcagaattcctccagggccccacattgggcacagtctggcccccatgcctaagcagggcttctctccctggaactcagagctgcctccggccagccctgctgtgtgacctcagatatgtgtcttgccttctctgggcctcagcatcttcccaggtgaagggtatacagtttgtgaggcctctgtgaagaccattcatgatcattcatcaaacttaccaggcaaattgaagaggactttaatgtatcctcattatgaatgggggcactcaagacatgacatgcttggcctaactctgagccagcatttggatggatgcctagctgattggaaggttcattctgcaagggcatcaatgctgttggactcttaggcagtgagtgacccgcccgccctagctagaggggaacaggagacacctctgtggagtaatggccttatccctgaatgctgcatgggacattcaccaaagagcctgtgggacatctaccttgtctaacatgcacaacaatcccataaggaattttcagttaagtgaggctcagaaagggtaagcaacttgcaaccccagttttcagtcaagtgaggctcagaaagggtaagcaacttgcccaaagccacacagcaaagaaaggtcagagcaatagaggagagccatggtggagcccagaatgacatggatgtagggggagaagcactccagtctgtgcctccccaagcccaaactggaccaaggccacagctgctaagccttgtcatcccctcggcaaatgctgagttcccagagccatggaatcggccccaccacaagccacgatctcactgtattttcacgctcctttgaggagcacgggcaggagcttctctccctcaggctccaagtcttcgtgcctgggaagcctgagaaccacgctggcatcctgtcctgctgtttgttcttccaaaggggatgggtagggcatgatgccagtgtgggtggcttgggtagttggaataggggacttggggctctaggagggagaaggggcccaggattatacgagaacaaagtaaagctgtcctagacttgccattagggtgagacttacgggaccattcttccctggtcccaggaagcagggactgcacagaaacacagggacttagtcaccacaacatggaaagccacagcaaccctcagagggagaactgtaagtcttccaggctggccgttggctccggggctcctggctgtggaccggggcaggaggcagacacctggacacaagcaaaatcacattgatcaaggactggccagaacctcatttaatctccatcatcactcagaaacaggttgtctctactccagtttacagaggagaaaactgagcttcacctccaccttccaaagccgtttgtccacatgttcagtcacgtagcaagtcactggcagaacttgaatctcaactcttgcccaaaaaactccatgcccagtactcctgccccagatatcatgagccttgccccccaccaccagatatcacagcaaggccctggggaaactgaggcacaatgggacaacttgagtttgggccttggatgtcaacttgaacttggatgtcaatcctgattctgtctcttactggctgtgttactacacggtttgagctccagttttctcatctttaaaatgggcataatgatggcacctcacattggaggggtaaatgagacaacagcacttggcacatgacatacatatggtatcacatgagataattgtacactagaatagttgatatcattaatagcctctcctgggtatcggggcctacagagtcctgccccctgacaagcatggccagtagaggggtccacagtgggagccaaggtgcacagctgctggtctatttcctggcactcctgttttcaggtgggagggacctgagagtcatttctgacagtcctccctccattgcccacaagccaagggagctgaacctctgacttagaagggaacccaaaagcctagaccgtttctatgtgaatcacctgtggatttatgaaaatgcagattcgggctgggcgtggtggctcatgcctgtaatcccagcactttgggaggccgaggtgggtggatcatgaggtcaggagtttgagaccagcctggccagcatggtgaaaccccgtctctactaaaaatacaaaaaattagctgggcatggtggcatgcacctgtaatcctagctacttgggaggctgaggcctcccaagaattgcttgaacctgggaggcgaaggttgcagtgagtcgagatcgtgccactgcactccagcctaggtgacagagcaagactccatctcaaaaaagaaaaaaaaaaaaaagaaagaaaaagaaaagaaaatgcagattcggatttattatataaaaattcagcttcggatttatagaggggctccagatgctgcctctctgacaagctcctagatgacgctgctgctgctagttcagaccacaccttgaggggcgaggctaggccatcgtctctagaatctgaacagcctgcagcgatgggatccactcccttgtgaggcagccagacacctagctccgtgtgtccatctgctactcagtgctgtctcagtgggggctgtgatcgcctcctactttgtggcccccaccagaggctggtcagccagtttgcaatggctcctagtggccggcgtgggagttgccgggaactgaaagcaggtttgcaggattgtgggtagtgggggcactgggcggggcagagggtgaggcagagcaaaggggtcattgcctgctttggggctgcacaggagatatgaggtcattaattccatcattataaactgcaagcctccattcctctagatgaaaccctcatcccctaaggatcctactaaactcaaacttggccccccaaagatggggccactggaagcatcttgaattatacttccttcttggtccccaccttcaaatgggcagacagggagctcacggcacctgctgtatgctttggttgtttctctgatgtgggtggcgagggtcaggcaggccacatgggctgataccctgatcctgtctctggggagtgggtccctggcttacggacacagtctacccccatcccgtgtccctgagtcctcacttgggaagcaggaccggggacgctcccagccctgaatcgaacacactgacgtgtgctaagttcctgtccctctctggagctcagtttccccatccgtacctggcagggggaggaggttagactggggcagaggtgctgaaaacctagctgagcttcagaagccactggacagcttattaaaaataaagattccaggtccctgactctgggacttctgattttgtaagccccagagtgggttgggggtctgtattttcccaagtctcctggctgatgtgatgtacctccagagctgggacacatgctgaatggatcgaaaggccaaaaacatccatgatatggttcaatttattcagtcctaagataagtatccgtatgctggaaaatgtaccagaccctaccattttcatccttgacttgttgcttttgcctttctgtaagctcccagagggctggggctgagccctctgccaccattaacaacaaggatcatcaaagctaagtgcagtgagcgcctactgcatgccaggccctgtgctgagggtttgctgtgcagcatttcatgtactcctcagagcaatcctctgagttagatactttgaggaaactgaggctcagaatgcttaagtaacttcctcaaggtcactcagctaataaggggcagaattagaactggaagtctagccaggtgcagtggctcatgcctataatcccagcactttgggaggccgaggcgggcggattgcctgagctcaggatttcaagaccagcctgggtaacatggtgaaaccccatctctattaaaaatacaaaaattgccaggcatggtggtgggcgcctgtagtcccagctactcgggaggctgaggcacgagagtcgcttgaacccaggaggtggaggttgaagtgaggctgggatcgcgccactgcactccagcctgggcaacagagccagactctgactccaaaaataaaaataaaaaataaagaactggaactctagtccagagtccttgcccataactacatgccatactgcctcttagggcatgttgtgggactactggcctttgaggccaggtctgcatggctctgaggctaaggtgtggacaccacactacccagcctggcagagaagtggctggttgtgagggtctcactgcccacctcgaaagcccgtggctgagtgaggtctctgtctcttcaggtgcgtacccagctgtgcccgacaccatgtacctgcccctggccacctccccgatgcccgctgggagtacccctggtgctggatggctgtggctgctgccgggtatgtgcacggcggctgggggagccctgcgaccaactccacgtctgcgacgccagccagggcctggtctgccagcccggggcaggacccggtggccggggggccctgtgcctctgtaagcaggtttgcaggactgagtgggggcgggtgtgagcgggaggtcaaggccgtggtgtcctggatcaaagtgcagccctcctctctctacctccttgggtgctcacttcaggtatcccatccattccagctgaacttggtgtcccaaagcccactccccactccctcctctcccttcttggcctctgcttaaaccatctcactaccccaataacctttccccatccctacctgtccaaatcattgccaactttcaaagccaagttcaaacagcttctcccctgagaagcccccccagattcttcaaaccagatgccaccactcccttctcaggatccttacaacactttggggaaaataaaagtgcaaccttttagggcataatatgtgtccagaactgtgctaagcacttactacacaagtcacatcatcctcacaataaccctatgatgggaagtactttcagacctattttatgaatgaggaaacaggttcaccagcattaagggacatgcttcatgtcacacggcacgggaccagatccaacgggctctaaggaacagtttattctgtcttctcccatagtgggggccctcggagcactgctgggatcctgggtttgccatgtattcagcagtcacccgagcatgtgacattcctcaccactcttctaggccttggtattctctgatgcttcggggcagggctttgcaagctggctccagtgactgggtgccagagaattagttgttgtgggagggctgtcctgtgcatggtaagacttctagcagcatccccgaactccacccactgtatgccagcagcactccccatcccccaagtcatgacagtctgtcttcagacagtgccaaatttccccagggggcaaaatctccagttgggaaccatcactttagagaaatgcaaagaggcaagagattgttcttcttttttcttttttaataataagccttgtagaacaatttgcctctttcatctatgtgcatgtcacacttttataaaaataagaacgaaagagagagagagagaagctcatgaatcattgataatgaattcatctgtaggaaaagccttgttaaaaaacaacaggccaggcacagtgactcatgcctataatcctatcagtttgggagactgaggcgggacgaccacttgagcccaggagttctagtccagccttggcaacatagtaagatcctctctctatcaaaaaaaaaaaaaaaaaattagccgggtgtggtggcacatgcctgtggtcccagctacttgagaggctgaggtgagaggctcgcttgagcctgggtgtttgaggctgcagtgagccatggttgcgccactacattccagcccgggcaacagaccaaaccctatctccaaaaaaaaaaaaaaaaaaaaaaaaaagtaataactccatgtgaaatgctttatttacaagtactgtaaggataaggagggtgattcgttacactgactgagggatgattgcttatgaaaatgtatctgaagaacaattgagataagtaacacttcgcttacaaagctgttatttacatttgctgtgacacgtgtaaacagcacccacagagtttattttacacttgcacagcccttaccacgtgtaagacactgagggtttcacaaatataaactcatttaatctcacaaccacatgaggtaggtacccttctcttataaatggaaaaaaggggtacagagaggctaagcaacttgcccaaggtcacacagctcataagcggcagagctgagatttgaactcagggagctggctccacaagctccattgctcaactgcctgacatgcagcagttgattagtacataggctgtgattgttaataactgtattaagggatttttcttattccatcttaattcagacttcaaacacctgcaggccaaaggcgtacttgggtccctggtccttcctgcaacttcccaccttggtctgtcaacatgatgggtgctcaacagtgtttaatgatttaaactgaatttagaggccgggaactggtgaaccccaaagagtccagctaagacatcacaaaggctcagtctagggctttgcagggaacatactgccaaaaacctctcccatcacttactcgttgaacgctcttctctaagggccaactctgagctgtgagatgtgctgcagattcaccatcgtgataacagcgcatccaatgccgggatcctgatcttccgccccccagaacggcctccccagtctgttgagagcacctccatccttctcatggctcagactcaagacctgggagtcgttctagaggtctctctatctctctctcttttttttttttttttttttgagatggagtctcactctttcacccaggctggtgtgcagtggcaggatctcagctcactgtaaccccatctcttgcgttcaagcgattctcacgcctcagcctcccaagtagctgggattacagacacataccaccatgcctcgctaatttttgtattttagtatttcagtagagacggggtttcaccatgttggccaggctggtctggaactcctgacctcaagtgatccacccgcctcggcctccctaagtgctgggattataggtatgagccaccacagccggtctagacatctctcttttctcacctcccacataccacccaccagcaaattcatcgtgtatttccagcatccgacactcccatcccttctggtctgagccccgtcatcattggcctggattttgcagtagccccataatcatctccctccttctgtcgttgcccctggtctattcacaacacagcagtcagagagctcctgggaagtcataagccagatcacctccctcctctgccccaagccttctggtggcttcccatctcagaggaaaagccaaagtccccacagtggcctacaaggccccaacaggatcctgttcatgcttcctctctgacctcctctcctcctgctctctgctccagccacattggccccttgctgttccttaaataccccaggcacactcgtgcctcagggcctttgcactggctgttccctctaccagcattatttctcagcaaggccttccctgctggaggattagatgagctaggggacttacagcattttgccccaagcctggcacatagcagatgctacgtggaagcataaccctctcctgtttattgagcatctgctatgtgccaggcttggggcaaaatgctgtaagtcccctagctcatctaatcccccagcagccctgtgagccgggtaccaaggctcagagaggcaaaataacttgccccaggccccacaagtgggagccagagttggaacctaagtatgtgtggttttggttctgaaacccctgtgtgtgtacagacctactggaaggttttctcagaagatctgggagaacttgtttgctaatgagtcctttccccagacgtagctcagtggccacccaggtctcacacacacgctgtttcccgtctgcacttcctgagcagctcacacgcttcaccagcgctcttacttcattctgtcttggagatgatgccctcacacccgtccccctttcccaagcccatgagtccctcaaggcaggaactgtcctctttctgtctgggagcacagtggttggcacacaggcgggaaacagtaaatatctctggaatgataaggagtagggctattttatcagggtctctcatgtgccaaggcttatgccagctattcactgaaggggcattcctacagtactgtgtgtcgcacctaggctctgagcccaccggagggtgcagagacgcacactggccgccccagccctcaaggagttcatgtccagtggaggaagtggcaataacacccatatcttgagggcttcattgaaagagtgttccctgagcacctaggccatgcctagcactgtgtgctagagggtacggacatgtcatcccatggaacctgaagttacgattactgagctcatcattgctgtagttcaggccactcagagaagttaagtaacttactcaaagacacacagccagcaagttaagccctgacctgacagtgatgacagcacaagtggacaacgactttgttgcatgaaatctcagcgtgtatagaatacttaaactttattaatatatagtaactatactaatgataataacagagtagctaggacctatggaaggtctcttttatgttgtgatcattacgcctatcattccgagtagtctctaccaccctggaaaataagtaccattatatcccagcttgcaaatgtggaaactgaggcaagaagaagtgaaatcacttggcccaggttcacagctaagaaagggcagagtttggggggtcaatccaggcctgtcttcttgcaatccctgtgccgggatccagggtgccccagcaggctggtggagggctggggagaggtgcatatcctgggctggagccctgggcagggcccagctactgtgaggcagctgcctcaggcagcgggatctgggcagctctgcagagaaggctgtgccgctttgcgggtcaccgatgggggtgcggtttttcctccgcagtggcagaggacgacagcagctgtgaggtgaacggccgcctgtatcgggaaggggagaccttccagccccactgcagcatccgctgccgctgcgaggacggcggcttcacctgcgtgccgctgtgcagcgaggatgtgcggctgcccagctgggactgcccccaccccaggagggtcgaggtcctgggcaagtgctgccctgagtgggtgtgcggccaaggagggggactggggacccagccccttccagcccaaggtgagcgcagcggtggtccaggtcagggcaggactgcctgggggcgccaagggccacctagggggtggggtggggggcggcttcctgggtaccaggacccagggacacatcagaagctgggaggggcggaggctgaggagggagataagaaagaggagtggagggccgggcgctgtggttcacccttgtaatcccagtacgttgggaggccaagacgggcggatcacctgaggttaggaattcgaaaccagcctggctgacataggaaaaccccgtctctactaaaaattcaaaaattagcctagcatggtggcgggcatctgtagtcccagctacttgggaggctgaggcaggagaatcgcttgaacccgggaggcagaggttgcagtgagcccagatcacaccactgcactccagcctggccgacaagcacgaaacttcatctcaaaaagaggaaaaaagaaagaggagtggagggtcaccaggcctccctctttaaaaccaataaacaaaaagccactgcctttgagatgtgtaatttaaaaccataaataattaaaaataaaaactgggtgacagagccgggagaggaaaggtgggttagggtatgtgaaccaaattctcacatttcagagatataatagagctaagctcttagaatatataatattatcgtatttataatatattgatacatattaatatatttagtaatttattattatttgggcttactaaaaaaggaactcaaaactgaacgaggcaaagtggctgctctggaatgtgggccgggggtgggctagagatggagaaaagacagttacctcccaccgtcccactataaatcttcaattttagagatttttgttgttgctgtgttgctttttgaaaattatcacatgaatgtgactttctaaaaaaggcaactgaaaagaggaggattgatttcataaatgctgctgccacccacaagaggtagtcacgtgttatgggtcaggtgcacggcatctgcaacagccccgccatcccctttttgctgtgtgactctgagaaagttgcttaacttctctgtgtctcagtttctccagctgtaaaatggggacaataagagcatccacttcatagcgttgtgagaactacttgagtttgttcaagttaagcagctgtagcagtgcctggcacatggtactatatcagaggtagccgttattatccctgtgatggaatatgatatatccatttaaatacataggaaaacaccagtgagttcaccttatggataaaagcaggataagaaggtgtatttccaactcgatctcaactaagtgtgtccctatgcacgtatacaggtatatctacacatacacatgcatacacagcacacacatgtgggtagaaatcagggtttctcaacgtcagcactagtgacaattggggcaagtaattatttgttgggggggttttcctgtgcactgcagggtgcttagcagcattcctgacttctactcactagataccagtagcatccccccagttgtgatcaccaaaactgtctccagatattgccaaacctttcctgggaggcaaaattaccctagttgaggacttctagtgtaagactagaaggaaggacaccaaaatactcacagagggagacttggagcagagaaaaagctagaccatggtgaacctgccatcttgttcctggcacaagaatcctggaatctttagcatccttgccactgggccaaagcaccactccacacaggctgggcaccccctgcctgtaaaatgctgtttatccaaagagacgagaaaaccatggttcactgagggaccatcgtgaccaacacactctggttgccaaataactaatatttatggaaatcttacaagtaccaggtactgtgctaggcacttcatgcccattattttattcaatgccatccactgttaagaaatttacataacaagaaactgagatgcagagaggctgagccatttgaccaagattgccgtggccgctggcaggtgggttgattgagctgctgagccctggctgctcagtgctaactcttgttctttcccccctaggaccccagttttctggccttgtctcttccctgccccctggtgtcccctgcccagaatggagcacggcctggggaccctgctcgaccacctgtgggctgggcatggccacccgggtgtccaaccagaaccgcttctgccgactggagacccagcgccgcctgtgcctgtccaggccctgcccaccctccaggggtcgcagtccacaaaacagtgccttctagagccgggctgggaatggggacacggtgtccaccatccccagctggtggccctgtgcctgggccctgggctgatggaagatggtccgtgcccaggcccttggctgcaggcaacactttagcttgggtccaccatgcagaacaccaatattaacacgctgcctggtctgtctggatcccgaggtatggcagaggtgcaagacctagtcccctttcctctaactcactgcctaggaggctggccaaggtgtccagggtcctctagcccactccctgcctacacacacagcctatatcaaacatgcacacgggcgagctttctctccgacttcccctgggcaagagatgggacaagcagtcccttaatattgaggctgcagcaggtgctgggctggactggccatttttctgggggtaggatgaagagaaggcacacagagattctggatctcctgctgccttttctggagtttgtaaaattgttcctgaatacaagcctatgcgtgatcttgtgtgtcaggcctgtgttttctgagaaagccctcccattatccggggcagaattcaggggcagagttctctgtgaacctcacaaggtgaaatcacatggtcttaaagaaagccagaagacaggccttcaagtgatccaagaaacccaattcatattaataataattaacttttttatttatttatttttttgagatggagttttgctcttgttgcccaggctggagctggagtacaatagcacgatctcgactcactgcagcctcccgggttcaagtgattctcctgcctcaagactcctgagtagctgggattataggcgcatgccaccatgctcggctttttttttt

SEQ ID NO: 1908 - DNA, 559 bp, Homo sapiens
aggtaatgggggccccagacagcccttgacatcacctcttttatctttgccaaattctacaaacaaagcccatgtctttctgtcccccgcccccatggctggcacatagtagatgtccccaaatcttggtgatgtgaacttgtgtgtctcacccttcacagacatcaccatttcccgttgcacagaaggctccactcataccaggcgctttggctcccagaataagcaggctatcatgctatgtccgacatctaggcgttggtacgtactgttcccttggcctggaacattctgccctctctcaccctctcttttcttggctttctgaaatggcacctccatcagaaagtgtccctcactcttggtctgagcaagggaccttgcctggtattcctgaacttccacctgttttccctctgttttctccctctctgggccttgtcctcaggtcagtgttgtgcctccagctcctgcagaggcgaactcagaggcggccgaatgaaaccaaatggatttggcttgaccccatcatctagcggtgcccagcaagcgctggcac

SEQ ID NO: 1909 - DNA, 26166 bp, Homo sapiens
gccacgtctgcaagtcagcgtttattgctcaagcgtattaaacaaaaatgtagactgaaagagacagttcttttaaaccccatttttccggattttttaagcgctctaaaataagaaaataagaaagtgcaagccagcaaaaacgctccaagtgcctaattctgactctgaaacttgagctctctggtctgcccccaagaagacatcagcccgccccgggtcgtccctgtggctcccaccccattcccaggagcagaccccgccagcctcaaagctgcagggaggtgggggtggcctgcagacagggtggggtctgcatccggtaccagtgacagcagcctctcctctcccacggtggcgcttgtttggggctgtggccaaagtgtttgcccggcccctgactgtgtccttccggagctgccgaggactgcagagagggcctggcttgtcccctctaggagcagctgggaaggtgtcttgcctgcatcccccttcaatggttgaaaataatgattccacttgtcatgaacaccatgaaggtatcttggcagccagagtcactcctgttccgcagtgggaaacctgggagggtcctcaaaccccctggcagggtctgcaggccgccccatccagctgcatctcccaggcctcctggttctttgatcttgatggccccaggccacagatgcatctccgggcctttccagcagcccatgggggaccagtcaatacaccccacggcggtgaagagaaaacgttcatgtcttctcagatcagaaggaaagaaacaaaaccattgtgaaggaaaacacctgctggaaagtaattatcaaagtaacagcattccagtttcacagtcgccccaactcactgtggatttactgccgtcagctgggaggacccaggcgccctcgggacgaggagacgcagggaaacccactcctggccatggcactacccaaagccagtgttattctcacacccaactgtccctgcagcctggcaggtgggcagtgaccgcctgggctgtaccctaagaccccaaaacagcggagatggagaagaccgctgccctggggccttctcagtgaggatcaagacaaagtacttgctaggaggtagagggcgctgggtgaacctgtgagaattcctgggctctgacctgatctgtcctgcattttgagtaatgggagcaaacacaggagggaggggctcagcttcccccggtcactggggccagggagacgtggtccagccggtttacaaagccttggatgcagccccacccccaagaacactgcctgtcacagcagcggccacgtggcactccaagctgggcatgacagtgcccgggacgtgggcagcggccatgtggcactccaagctgggcatgacagtgcccgggacgtgggcagcggccacgtggcactccaagctgggcatgacagcacccaggacgtgggccggccagtgtggcggtggatccctctagaatgactgggtctaagtagggagacagggcaggcgacccggcgtggactggtgtggatttcacctgggagagcagcggcagcctgtgtcgcttgcgcccaggctctggaggaggggcccctgcggctcccgggccaggacagaggcgcccagccctgctctcactgtccaggaagagccgctgggcagcctgagcctggggcaggtgcaccttgcagggaagtgggtaagatcccactgggctgactgagtacccgggacagaccctaagcgtggagggaggaagcccggtcagagtgggcaggagacgcagggacccacagtctggtcaggtccagagagcccactccagcccaagccatgagagaggcaggaagaggagctggggccagttcaggggtggggctctcaagaggccgagccgggggcccttcctcggcctgggaagttgcggccatgctcctgctgttacgacacgggagccactcggagctgactgatctcactgaggcacagactagccaacattggcctattttaaaattaaactaccctaggaagtgaaaaccccacctgcagcctggtttgccctcacacaagggaaaagaggtgttagaagcagtagctcagggcgattaggggttgtgcgtttccatgcttggggccaggctgggcgctgccacccggtttccgcgtctgggggtcactgggccatttgcaccacgacggctctccaggctttctccttgtcgaactccttcagggggctcctggccacctgcaaccgagacaggaaaggtgttacttcaccagggccacctgtgcggcgggaaggtggacacgccactcggccacaggcagcgagcagccagcgttcagaagttttcttcgaatgtgaaggaagtggggaaactaacccctgggcctctgtggaaagagataaaagccttcacttcctcagtgtcccagaaacgcctgcatccccccccgcacacacggtttctaccgagcctgggatggagcagcccttcactcggccccttgccctggctctggggcggggagcggggggaggccgcccaaggttgggcatgtgcctgacggctgaggaagaaaacacttaaggcagaggtaaccagatgcctccaggcaaaagggaggacagcgccagccccagctgtccaccctgagccccagttgtccaccctgagccccagctgtccaccctgagccccagttgtccaccctgagccccagccacccaccctgagcccctgggccccagccgtccaccctaagccccagccatccaccctgagccccagccgtccaccctgagccccagccgcccaccctgagccccaaccgcccaccctgagcccaagccacccaccttgagccccagccgtccatcctgagccccagccgcccaccctgagccccagccgcccaccctgagcccctgggaccagcagttctgggatctggggagaacacctcatgcgtctgactctgggccttgctggtcacaacagaaacccaggcgggtctcatttcaggcccagggactgccgtcctagcagggagactgaccacagccaggaaaaatggcagcaaagcaactgaggaggcaggttaagggaacagcagtagggagggtggagggtgggggcgacggggtcagctgagaaacgagccaagggcaagagagcgtcctccgggacttagcgggcactggaggctctgcaccaaggttctgaggccggtggtgtgctgaacacaggagggcagggtgtgcagggcaagagcagcggccggtccgcccaggatggcctagaggtggggcaggactcagagccccgctgagtggctgcccaggtgtttgggcatcaaggtgacagtcctagtggtcactgcacctgagggtcagcgggcaggtttgcccaggggagcaccaccaggacccgtagctcggtggggggaagacgctgagcctctgcctttcagatgtgggggcagcaagacagtaggcagggcccgggggaacattgttcaggcagtgacagccagaagttgttgacaccccagctttacggagccccatgtgccaggctgggtgggcattgccttccctgcagaaccgcgtccccaccagagaccagggaaggaaacttcaggacctgtgggagtcctcacaaagccctcttctgtgtctctaagagcaaatctgaaagcattaagtccagaatatttcccagggatgggtctgggtttacccaggctttgtgtttgtatttttaaaagacattttacggctgggcgcggtggctcacgcctgtaattccagcactttgggaggccaaggcaggcggatcatgaggtcaggagttcgagaccagtctaaccaacatagtgaaaccccatctctactaaaaatagaaaaattagctgggcttggtggcgggtgcctgtagtcccagctactcgggaggctgaggcaggagaattgcttgaacccaggaggcggaggttgtggtgagccgtgatcgcgccactgcactccagtctgggtgacagactgagactccttctcaaaaaaaaaaaaaaaaaagaaaagaaagacattttacttcttcggggtttttctggggtgtttttaaaaatacaaagtggcacaatgaatcttcgagggccacgtcgtgtggccctcggaggccctcaccaggacaggagcccccaccgcaggcctctcacctccccagcgggtgctcctgtgggccactcacctccccagcacccctgaaacccacaggcctctcacctccctggctgagcacccctgtgggccactcacctccccagtgcccccaccccacaggcttctcacctccctggctgggccccccatgggccactcacctccccagcacctgcaccgcaggccactcacctccccggctgggcacccctgtgggctactcacctccccagcaccccctccccctgcaggccactcacctccccggctgggcacccctgtgggccactcacctccccagcttccccccaccccacaggcttctcacctccctggctgggcacccccgtgggccactcacctccccagtgccccctccccctgcaggccactcacctccccagccaggcgctcctgcgggccgttctgggtgtcccaggatgcaccctgcagccttgcactgaccttgaagcgcacgcactggatggcggtgcccgtgttgaggccggcctgcagcaggagcactagcagcagcagcagcagcagcacatcgtaggatggctgcaggcggaaggaggtgtgagcagagtggcccagccgccctccagcccaggagaccaaagctccctcgtgcccacggccttcacaaagagcaggtgccagggctcgagtcggagccccagtaacccaaacgcattgctatttcaacaacctgatgataatcattctagctcaattaatgaggtcaattctgctttaaattccatcagcttgtgttcaacatacaggaataaaagtgaccgagccactgccaggccccgtggacagtgctggctgctagtggtcaagtcgctccacccctcctgctccaacacgcgcaaggctcagtcccagagccagagagaatgtccgcgggaggcagaagcgctgaccgttccgtgtcagcaggatcctgagcggaggagacagggggcagccgtcctggggggatggggtgcacagacccccaacagcttcacccctgagcaccagctgctaggaaggaaggggcaggaggcagcgcggtgagctcggcagggaagaggatggagggagcggccgaggatgcagggggccagagagtgaccacggagcacccaaaaccctctgtgcccatggatagctttcccgtgttggctcaagaaaaacaaagcaactaaatgttaacacacaaaagagccaaacatctatccaatgtcactgctacaaaaagtaagagaagaaacagaacgaacagctcttctcaagttaacataaaacttttttttgcgacagtctccctctgtcacccaggctggcgtgcagtggcgcgatctcggctcgctgcaacctctacatcccaggttcaagcgattctcctgcctcaacctcgccagtagctgggattacaggtacccgccaccacgcccagctaattttcgtagttttagtagagacggggtttcaccatgttagccaggctggtctcctaacctcaggtgatctgcctgcttcggcctcccaaactgctgggattacaggcatgtgccactacgcccggcctggattttaagtaattattagaaagtctggtacttgtgttcccagctggagtttaccctggaggatggtaaaggcatgggccccatgtggtctttgctcttcggttgttgagacaccatttattgcaaagcctatgctttcctcagtctcaaaaaaaaaaaatccagagccattaaagaaaatattaatcaacttaactatttaaaaaaatagctttcacataacaaaaatcacaacaagcagaacaagaaatagccgccaggctgagaccaccatttgtatcctccatcacagatggagctggtctcccccggcaccagggttagcggaaaatggtcaggagacatgagcagagtccactgaaaaagcaatgcagacgtcctcatgctttgtaagaggtcctcgtcctcacccacattgagacggaggtgctcccacccgtgtcaccgaactccagcgtgacaccctctgtggggggctgtggagaagtgagcaccttcacgccattggcaggagggaaggtggacggcccccattgaggaggtcgccgagatttatcagcatgacagctgcacctaccctctacccagcagtctctctcctagctggatatcctaaagatgcgctgaggattcaaaaggaagatgcgtgcaggttgttcacggaggagttatttatagtagcagacggttggaaataactcagtttccatcactagggactggctgggttgaccgggcagtcaggagcgatgaaggaattcagaagagctctgatccccttgggtatcgagaaaacaccaggataaattattaagtttaaaaaaacaagcaaggggctgggcacggtggcagaagcctcctcatcccagcactttgggaggccaaggtgggcggatcgcttgagcccaggagctcatgaccagctcaggcgacagagtgagaccctgtctctgaaaaataaaataagtaaatacataattaaaaagcgaggtacatggctgggcacagtggctcacgtctgtaatcccagcacttcgggaggccaaggtgggcggatcgcttcagcccaggagctcatgaccagcccgggcaacagagtgagaccctgtctctgaaaaataaaataaataaatacataactaaaaagcgaggtatatggctgggcacggtggctcacgtctgtaatcctagcactttgggaggccgagacaggcagatcacttaaggtcaggagttcaagaccagcctggccaacatagtgaaaccctgtctctgctaaaagtacaaaaattagccgggtgtgttggcatatgcctgtaatcccagatgctccggaggctgaggcaggagaatcacttgaacccaggaggcagaggttgcagtgagccaagactgtgccactgcactccagcctgggagacagagtgagactctatcttaaaaaaaaaaaaatggcaaggtacagaatagtgattctagtatacaagctattttgtaagaaagaaaaaaaaattatcatctggttgcccataagaggagcaggtcagtcaggcatgagaccacagcttttctgagctcgtcttttatagtttggcttttgaaccacataaatattttatatattcaaaaaataccattttaaaaagaaaaaaagcaccaagccctaaaatggaatacaaccagaggccattaaacttaatggggtatcgaacccagaggataaccccacacagaaaggggccgacttcgatggcgtgtggccgtcccctgctagcagaatgcatgctgaagataaaagggaagcctcaggctcactcaggagatggcccctgggtggtaatattgtctcttgtaatcgtgaacaattatatgcatattgtaagacaacatgaagtaggagatatattaaatgtcacaggaaacaaaataattggagtaggagtgggtgaagcaaacacaagagaagtgaagaaaaaaccctgggccgggtgttgtagctcactcctgtaatcccagcacctgtgggaggccgaggacgctatcccccttcagacagtgactccatgcccccatcagacagtgactccatcccccatcagacagtgactccattaccccattagacagtgactccatcccccgtcagacagtgactccatcccccgtcagacagtgactccatcccccgtcaggcagtgactctatcccctgtcaggcagtgactccatcccccgtcaggcagtgactccatccccccatcaggcagtgactctatcccctgtcaggcagtgactccatccccctgtcaggcagtgactccatccccccatcaggcagtgactccatccccccgtcaggcagtgactccatcccccgtcaggcagtgactccatcccccatcagtgactccatcccccatcagacagtgactccatcccccatcagacagtgactccatcccccatcaggcagtgaccccatcctccatcagacagtgactccatccatccatcagacagtgactccatccatccatcagacagtgactccatcccccatcagacagtgactccatcccccatcagacagtgactccatcccccatcagacagtgactccatccccccatcaggcagtgactccattccccatcagcacacgcatgttgacctggagcaaacagcttaatacaggtcttctaatgatttgggtgcaaaaccacttatactggaaaaaaaaaaacaaaaaaacaaaaaaacactaggtatctaagaaatacatctagctacacgtgcctgagcctcagaagtcgtgttggagataagctcctactgggtcagctcaaagtaacaggactttgaattctccttaaattcacctgttaaactcaatgcagttctgatgcaaatccgaaaagcatgtctcataaacccaggacagattctaaaatgggctcagggacagagtgggtcccaggtccctgtgaagcaggtggtggccccagatacagggcggaatcgaggccccgaggccctggggccaggctggcattggggagcacggtcaccgctgcccaggaacagcggaggaggtgcctcctggagctgtccctggagccagcgcccccagagtcccaggcaaagccagcaagggccaggccaacacgcagagcaccacatgtctggggggctctgaaataaaatacaactcacttttatggctggcgggtaatccttaaacatctccacgattctcatgatgctgaatgacagatatccagaggctgtgaacagcagcggagacgtgaggctgcttatggcaatcaggacctccacctggaaaaaaagcgcgggttgcaggaccacggccggagcctgggagcccaggacagcgggcgtggccagggctgggggggcgggcatggccgggcactcatgggcatagtcccaagctggttccctgcatgactcctgctgaaacctctgccttttcttttttctttttctttttttttttttttttttttgagacaagtctcgctgtgtcgccaggctggaatgcagtggcatgatcttggctcactgtaacctccgcctcccgggttcaagtgattctcctgcctcagcctcccgagtagctgggattacaggcgcccgccaccacacccagctaatttttgtatttttagtagagaccgtgttttgccacgttggtcaggctggtcttgaactcctgacctcaggtgatccacccacctcggcctcccaaagtgctgtgattacaggcatgagccaccgcgcccggcctgcctttctttcttttttgagaggcagcctagctgtgtagcccaggcaggagtgcggtggcacaatctctgatcactgcaacctctgcctcctgggttcaagcaattctcccgcctcggcctcttgagtagctgggattacagacatgcgccaccacacctggctaattgttttgtatttttagtagagacagggtttcaccatattgtcaggctggtcttcaactcctgaccttgtgatccacccaccttggcctcccaaagtgctgagattacaggcatgagcagcctgccttttcattcacagcacagtgccacaagttttgaaatacttaccatctaggcaaggtggctcacatctgtaatccaagcactttgggaggccgaggagggcggatcacctgaggtcacgagttcgagaccagcctggccaacatggtgaaacccccatctctactaaagatacaaaaactaagcgggtgtggtggcgcatgcctgtagtcccagctacttgggaggctgaggcaggagaatcgcttgaacccgggaggcagaggttacaatgagctgagatcgtaccactgcactccagcctgggtgacagagcaagactctgtctcaaacaaacaaaaccaagaaacaaaaaacatttacctgcaattctccactcttgaaaaaatagcccttccgcatgggtcacctccttcactgctctgaagtctgtccttttaacccaccccaaatcttcctgtttgacccatcaagtctcagagacagccttcactcatgccaagcatgggcagtcaccttgcaaagcactcagggtccacattttggcagcagtcattaacgatcgaccagttcaattgtttgcggtcagtttgtggcagtttcggccgggcgtggtggctcacaccggtaatcccagcactttgggaggttgaggtgagtggatcacctgaggtcaggagttcgagaccagcctggccaacatggtgaaaccccgtctctactaaaaatacaaaaattagccgggcatggtggcaggcgcctataatcccagctactcaggaggctgaggcaagagaatcacttgaacccgggaggcggaggttgcagtgagccaagatcgtgccattgcactccagcctgggggacaagagcgagactgcatctcaaaaaagaaaaaaaaacaatcgaccagccttaggaggtgcagatgatgctcagacactggtctccttccaagggttaggcacagagagcgcttccagtgtctacaccaccttgttcaggtctgcctgtccctgagaacagtccctgctgagcgggccagcctccacctcccacaaccccaccttcctcattgtgcaggccctgcagcccagtcactgcgctctcttgggctggagcctggtcacatggcaccaagggagggctaggccaggccctggccccgctcggtgggtccctggcacccagggctgaggggttcacccaccagacacttgctgggacactctgctgccacatgactggcaatggcacttggaaagcactaagagaaaagaaaaaggaaagattttagaggaaatagtcgaagaagtcgaattccaaacatgtgccctcccaccagtgacccctccatgcaggctgcctggctggcttgctgtggggggcaggggggatggtgcagtgcccaaaggcgcagctggggcagggacgggtccgcagggaagcaggggtagcctctcagaggttttgtgtgctctctgttcctcaaccattggtttaaaattttaagcctgtagaaaagctgcaagagcagtggagggggcatctgaggccccaaaatcaccagagtccttgacattcatatctgtgctctctccagctctcccagatagcctgatgcctgaacacctgagagtgctggctgagcccagggcacactcttgcacacacccaaagcaggaccacgctcgagagactccacgtggggccgatgtggtccatgcccagattcttccagttgtcctcatcatgttctttctttttaattttttaataatttttctttcttcttctcctttttttttttaagatggagtcttgctctgtcacccaggctggagtacggtggcgcgatcttgactcactgcaacctccacctcccaggttcaagcctcctgagtagctgggattataggcacccaccactacaccaggctaatgtttgtatttttagtagagacggggtttcgccttgttggccaggctggtctcgaactcctgacctcaggtgatccgcccgcctcggcctcccaaagtgctgggattacaggcatgagccaccgcacctggccctggtcatgttatttctagagctgtttgtttgtttgctcctgatccggattcggtctgccattgagctcgtagtctccttgtgggtccctgttaatcggggagtccctcagcctctgtcacctccgttacctggtcgcttctggggggtgcagcccatcagctgcagtcgggcctccgtgtgggacaggatttcctcatgatgagccttggggagcctcggaggagactctgcagtgccccagggtgtggactgccccttcctgatgacgctgacttgactcactgggttagggggatctgtaggttcctctgttggatgggcacctcttcctttttataaccaagaaatgcccttttcccacttattgtgaggagcctgccttagttccgcacaatgtaggcagagggaggatgcatgctcttcatcctcttcatctccccgaaggtgtccaggtgccagcaccccagcccggcctgctggggagggggctgcatcagccaggggctgtggtgagagggtgggcaggacagagatgggctccgagcaggggagcctgggcagcagggagaagactggggagctgaggggctgccagtgcaaaggccccaagccagctgctgaggtgggtgtggccctggccagggaggctgaggtgtcaatacaggggtctctcctgggcttggtgcttctgaaagggccttctagctgtaagcagcagtgagggcacaggaagggatggtggcttcagggtggcctattcagggccccagtgagccatgggagggcgggagtttccccgttcacccagcatggccactccggcccctgccctagagggccaggaagctcagccataggggctggggcagctcaatcaagggccctgccctggaagggtccaggcctgcagcccagcccccaactccagccccgagcacctgcctccagcccatggtgcagggcctgggcccctctgccgcacccaggccagactcaggcaggtggagctgggtccctcaccacgcatgcctcagcgctctcctctcctcctggggtctcctgccctgaagagagggttgggagtgtgggtggatttaggggcgcccagggggcagcacctgatgggcagggggtgctctccgggaagatggagagagcagagccacccccgaggcaggaggggtctgcgggatgggaggggcctctgtgatgagggctgactgcagggacagggaagggggtagggcaagtgcctttcattctcaactttttggaggtatgtggtctctgtcctccctcagcttcgggatgtaatccctgcgtttcagaccccagggtcagttgtacacacctgcaggcgtcattctctctgtcacagacccgcttgggtgggcacccatgtgagttctctgtctcagtagctgggcctggtcctaccccttccgggggtgtggctctatcccagctcggtcctgcctgggtctctttccctctctgagcgcctcagcagcccactaggtcgggcactggtgccctgggggcattgctctgtgcctactcgcccccacagggagctgaaacacagctgctgccaatgggatgtgtccacctggcaggcgtgggccccttctcggcagtccacccggccacaccgttcccgggcaggcgtgggccccttctccgcagtccacccggccataccattcccgggcaggcgtgggccccttctcggcagtccacctggccatactgctcccaggcaggcatgggcctcggcagcttcaggaagagccccactgctgcccaggaggagcctgtagctgatgctgggtgctcaccattcctgctcatgtacataagagagcaggggcaaaatctaaaagtccacacagcatgagacaaaccaggggctggccgtcaacaccggtgtgcaggccactacgcggcaaggtgctgagaacctcgtggggtctgcgtccggaggcaggtgggtggtggctctgggtgggctacaggctgtgaggggatctggggtgtggaggggttgctctagactcactgttctgagggaacacacctgtaatcccagcacttttgggggccgaggcaggcagatcacttgaggtcaggagttcaagaccagcctggccaacatggcaaaacccggtctctactaaaaatacaaaaaaattagctgggcatggtggtccacgcctgtaatcccagctacttgggaggctgaggtgggcaaattacttgaacccggggaggggcagaggttgtagtgaggtgatattgagccactgcactccagcctgggtggcagagtgagactccatctcaaaaaaataaataaataaaataaataaaacaatgcccatgtattgagcatgtggcatgtgtcaggtgctgtgtgacacatctgctgcagtaacatttaatgtaaagtaataacagaaatatgctgcattgtatgaaacacatagtgtaatataaatgcattatatattagaaaattatatagaataataaacatctacagcctgacattcatatgttaaaaagattagaataataaaaataattggtatttttttcaggaaaaataatataaaataatcacacaaactaatataaaagcagttaatactttgactcatttaatccttaactccccagttcttctgaagttgggggccagcgaggaccctctgtggtgactctctgtctgaatgcaccaagactgagctcggggcccagccacgcaggatctgagcagtgtggcccagagcggcggcgggcgggccagaggggttactcacggccactaggatccaaaagaacgtcactgagaggtgtgggcctgaaactgagtcatccacgttcagggcaatgatccccccgaggacggcagagatgcctgcgattacctcgacgacctggaggggacaggacagcatcggctcataaggaagtggagacacccccagattcccagaatgcactgtgcagacatggacccccaggagcagggtccagtgggctggccccagatctaaccgtggaggagcccacctggatggacccccagcctcacctggcccagaccccctctgccctcagctgcggcttttcacgtccctcctggagtaaaatagccaaagaggtgtttcccccactgctgcttttgtccacagaaactgagggtattgacctgacagtggtgagggcagaaaaccaagaccctcagactcccttccctgtctcacagtgtggcaggcggcggtgctcagaccctggaccccatcgaagggactcgggaaaacaggcctggggcagaagtagcttcccataggacacacccacccgtgccatgtgggtttgccattgccacggcaacactggacgtcaccacccctttccgtggcaatgatccaaccacctggacgttagcaccccttttctagaaatttctgcataatctgccccttaattagcatatacttaaaagtgggtataaataggaggcagagctgtctctgagctgctgctcgaggcacctgccggttggagagccctgctatactgccactgcaaacaaagctgctgtctgtcacctccagctcgcccttgaattctttcctggacaaagccaagaaccctgctggcctaagccctggttgtggactcatctgcccggcaccatcagggccgcaaccagcaccgccagactcagggaggggccgcaaccagcaccgccagactcagggaggggccgcaaccagcaccgccagactcagggaggggccgcaaccagcaccgccagactcagggagggctggggaagaaacacacgcccgaaaacctgctcccgtgaaggatctctgtgagtcgcaaacacagagctgtggccagcaggaaagccaggcataaggagtgggccagcaagggcttgggggccggaagggacctgggcagccaggccttgcgtccagaaggcacaaaactccagatgcacaaataaagctgaattcccagccaggcacggcggctcatgcctgtaatcctagcactttgggaggccgaggcagacggatcgtgaggtcaggagtttgagtacagcctggccaacatggtaaaccccgtctctactaaaaataacaaaaattagctgggcgtggtggcgggcacctgtaatcccagctactcgggaggctgaggcgggagaatcgcttcaactcaggaggcagaggttgcagtgaaccaagatcacaccactgcactctagcctgggcaacagcaggactccatctcaaaaaaaaaggaaaaaaaaaaaagaagcagaacggaaatggaacctaagagaggactgaaatgctaaataaggggaagtgaaggcactgggaaacacacacagacacagtcaagcacacaggaggctgtcccattgttggagtaaaaaggcaaaatgtcactaaatgtcacaagctagacaacaaggccaaggcggagggaagggggacagaccccgcatggtctgtttatcaaggagcgtattagaatatgaagggcaacccccaaaagaatactgaaaaatttcccatccaaaattagagggaaaaggaaggacggagcctctgccaattcaaaagaaggcagggaaggagggaaaaaggcaaaatcagggaaaatggaaaactcaaaagatggtaaaaataagtagaaatttatcagtaataactctcagaggaaatgggctacattcaaaaagctagggagagagaatgacaagataaagaacaaaatacagttacgtgctgcttataacaattataccaaagtacaaggcaagaaaagttgaaagtaagaaggagaaagaggccaggtgcggtggctcacacctgtaatcccagcactttggaaggcctgggtgggtggatcacttgaggtcaggagttcgagaccagcctggccaacatgccgaaaccctgcctctactaaaaataaaataattagccgggcgtggtggcatgtgcctgtagtcccagctcctcaggaggctgaggcaggagaattacttgaacctgggaggcagaggtggcggtgagctgagatagcaccactgcaccccagcctggctgatggagtgagactccgtctcaaaaaaaaaaaaaaaattcctcggggacaacagtgtcaactcacctacggcagtaacaaactccccctaaaaattacaggacaccagcagcacctttcgcgataaggaaggttattaccaatgataccaataacagactagagtctccacagatgaggcgcacgccgccatgcggtgtagacagccaactcttcgccaactcggaatcgaaacgtgacgtttaatccagcctcagtcacccccgacagagtatgagagaaaagagaaagaagggaagttttcttactgagtaagatttcaggacccgagcaggaaatggcacttcgtccagaatgttggcgctgtcagacatggagccctacgaagaaacagaactgtcaccccgggtgcacgggcacagggactcagcactgccgctggcatccggccgccgtgggcagtgggtcaggtcagcctgccgtgtagatgcgagaccgccttggaggcgcccgtggatctttgggcttgaggaaatgttcacacacattgtccttgcatatgaaaattagcagatgtggtgtctcctggtgatcccctggggacgagcactggactgagtcaggcttagggggaggggagggtacagcatctgtcttcacctccctgtagccagcggccgccaacccctcacccagctccagagcccctcctggccggggtttctgagacccaggagagaggggtctcatgggaatgccctggagcagcccagatcggccctccgagggtgacgctgagacccacctcgctcaccctggggtgatgcctctgcaccccctgccctgcggggtcagaagctgcacccaccttctttttcttgcagtcctcctcgctggaccgtgcagcgatgatcaccgtggccgccatgagcagctccagcaggagcagcaggatgaggttgaagttgatctgccaaggggcacacacgcttcagcaccgggcccgcctttctcacgccaccgcgcttcagcgtccaccggaccacctcacgggcaggctgcgcaggactctcagccacggtccccacttttcccatccagggccagctgtgaggcactgtgggctgcacactctcctgcctcacatgggcctttggggtcttttagtttttaaaaccattcttagtgcaaaggctgtacaaacacaggccagggctggatttggccttgggctctggtctaccgaccccattctgaacgctccttgttcccacaaaagccttcacggaatgtttagagtagcttcatgcatgattgtcaagcactgagaacataaggttttttggagggtaatgaaacgactgcaggccctgaccgtattggcagtgacatgaatttatatgtgtgttaatattcatagaagcatacattttaaaaagtcagtgtagctgtctgacaattttttttttttttttgagacggaggttcgctcttgttgcccaggctggagagcaaatggcgcaatctcggctcaccgcaacctctgcctcctgggttcaaatgattgtcctgcctcagcctcccgagtaagctggggttacaggcacctaccagcacgcccggctaattttgtatttttagtagagaggggtttctccatgttggtcaggctggtctcgaactcctgacctcaggtgttccgcccacctcggcctcccaaagtgctgagattacaggcgtgagccaccgcgcccggcctgacaatttttaaaatacatttaaaaaagaaagagtgcagaaccacattcaactaaaaacagagcctcgaaatatatgatgtcataacagagccacaggaagatgtagatatatcagtagaggtggggaaggacttgaaacacttttcttagaaactgacagatcaggcagagggaggcggctcacgcctgtgatcccagcactttgggggaccgaggcggttggatcacctgaggtcaggagttccagaccagcctgaccaacatggtgaaaccccttgtctactaaaaatacaaaaatcagctgggtacggtggcgcacgcctgtaatcccagctactcgggaggctgagacaggagaattgcttgaacccgagaggcggaggttgccgtgagccgagatggagccactgcactccagtctgggcgacagagcgagactgtctcaaaaaaaaaaaaaaatgacagatcaaaaagacaaaagcataaggagaactctaaaattcagaaaagtgtgacattaaccttgtcttttattttctgtatttctggtgctttgacctctggctccttcctgatcctgaagagacagctcctcccagggccagccgacagctacagtgagtaacttgcctctgagcagttcagatacaagccactgacccagggaccacaccccatctgctctccgtcttaataaagaagcgtcacaggccgggcgcggtggctcatacctgtaatcccagcactatgggaggccgaggtggatggatcacctgaggtcaggagtacaaggccagcctggccaacatggtgaaaccttgtctgtactaaaaatacaaaaattagccgagtgtggtggcacacgcctgtaatcccagctactccagaggctgaggcaggagaattgcttgaacccgggaggtagaggttgcagtgagccgagatggcgccactacactccagcctgggcgacagagcgagattccttctcaaaaacaaaacaaaacaaaacaaaaaggcagtgtgggtgttcccactgggtcctcctgtgtctgctcatttttcctgcccaacgagagtggccaggacatactcaagcctcctccagctttccccaatcatcaagtgcattccacatgtcacacaaagcaggaggccctccttgcagtatctcggatgaggtcctggtttcctttgggatttttgtctttttttttttttttttttttttgagacggagtcttgctctgtcttccaggctggagtgcagtggcgccatctcggctcccacaacctctgccccctacaatttcacatttttgtttagaggtgcattgaacaactgtcttacacagattggatgaaacatagtattatgtcactgttaatttttaaggactgttggaaaagacattgtttaccaataaatctgtcccgcagaatcacgagacttcaataaagacaattattttctttggatgcataaatctctcaactttagtcaaactcacgagctgtgaataacatttaccacctatttccagctcaacaaacatttgctgacaccattcgtgggagtggggctgtgggtgtcaggcgtctgcgcgaagctcgtgtgaactcacgtttattgctgatgggttcaggactagtttgcatccaaaccaaattaaacacgtagtggtcacagcaaacgtggaaacaaacaatatctgaaagttgggaatctgaaaaacaaggcaggaggggttttccttctttgaataataaaagaaaaaaggtaacagataaaccacacttcaggccattcactaaaaattatcctgattaggacataatggtggggagtcctgcgtgctcagcccgctctcccctctgtgcggcaaaggctgggctgggcaggagctttactgtctggggggcaacctcgggggcccctctcggtgccacaacgtctgtgcgtgggcacacacacaagcacacatgggcacactgtctgtcagcccctccggctttctccctggcagaggctgcctgcaagctagactcaccacattggcgttcctcctggagacggtgaagctcacaattgccgaggggatgcactggaatgaaaccggaatcccatgagcctgccgctcacctgagcaactgagactctgaaatactctaacatttgcgcttccagaaggatctgaatcatattcacaaaacagtgttgccagtccatgcaacacagtgggttggcttgactagaaggcccccaggtacttctcagttttaattttttcttgagatggggtctcactctgttgcccaagctgatcttaactttgggctcaaatgatctgttcacctcagcttcccaaagccctgcgattacaggcatgagccgctgcgcccaacccccaggtacttcaaaataatttattctgaaagaagtttttatttttctgatgtgctaaaaagatatttgttaatgaaggctcttctagctggataagctttgaagcctagaatgtaactcacgcaggcacaagacctggtctttgctgaaaattacccaaaaaaggaaaaagtatcagccgggtgcagtggctcacacctctagtcccaactactccggaggctgagctgggaggatctcttgagcccaggagttcgaggctgcagtgagctgtgaatactcggtgatagagtgagaccttgtctcaaaaaaagaaagaaagaaagaaagaaagaaagaaagaaagaaagaaagaaagaggaggtctggtgcagtggctcacacctgtaatcccagtactttgggaggctgaggcgggtggatcagagtcaggagtttgagaccagcctggccaacatagtgaaaccccatctctactaaaaatacaaaaaaaattagctgggcgtggtggcgggtgcctgtagtcccagctactcaggaggctgaggcaggagaattgcttgaacccaggaggtggaggttgcagtgagcagagacggcgccattgcactccagcctgtgtgacagagcaagactccgtcaaagaaagaaagaaagaaaaaaagaaagaaagaaagaggaaggaaggagcaaaggaagtagcaagactctgcatgtgagggaggcagaaaggagtcccacagccttcttgtcctcagccttcttgtccccacagggccacaccaaggctaggagtccagggccagggagggaggttgggacgtcagggacagggaggtggatggagtcgggccagcccaggcctgtggcccttgccgtgcagggccttgctcctgcagccatgggaccccgggccctgagtcgggggtgcaggccctgaggggctgagcacagcagtgctgggtgaggaggcagaagaagccccgtcggggcctgagcgaggggcagagctagggccaggacagccaggctcagctcagcacccactcaggtgccacgagggcccagggtagagaagaaaggccgggggcagggccgagtggggccaaggctgggcgggggtgggcacttgcccatatccggcagccgctgaggctgaaggggcacagctcacagctccactgggacaagggcggctcccatggtgaggataaaggccacggagaagcttccagagagggcagcagagtgggacgggtcacctgccccaaagggctttgttctaagggagcagagacccaggacagcacggggcggggcatccactttgtttttaagacatttcgggggcgctgctggggacagtcaccaacagtgtccctagagaaagggcaggggccagagacccagcaggcatgtggaagcgagaggaggggagagctcgggaccagctgaagcaggaggggcgtggggtccgcggcttgcgggccagaggggcatggggtccgcggcttgcgggccagaggggcatggggtgcgcggcttgcgggccagaggggcatggggtccatggcttgcgggccagagcccaggggtcagccagcatggtgctctagctgccgggacgctggggaggcagtggccggggttcacagaggaccaggggacagcggttgtctgtcctcccttgctctgaggatcagtgggtgcctccaccggccttggcactgtgtaagtttctaaaaacacaacatgaagctttgggaggatgtggggcacaggtcccagtcccctgagggcagatgctgccagctctggcaggacgcagccgcaggctcagaatcaacacgcaattccctgcacaggcgtctgcagagcaaggttcaggcctgcttcatcagtaattctcaaaggtgatgaactctacgtgaaactaaagtcatatgaagagttttttgtttttttcttgttgttgttgttttgagacgaagtttcactctcattgcccaggctggagtgcagtggcacaatctgggctcactgcaacctccgcctcccaggttcaagcgattctcctgcctcagcctcctgagtagctgggagtacaggcacccaccaccgcgcccagctaatttttgtatttttagtagagatggggtttgtccatgttggtcagactggtctcaaacacctgacctcaggtgatccacccacctccacccctcaaagtgctggcatgacagccatgagccactgtgcccggcccatatgaagaggtttgaatgaggtacaggtgacagaaacctgcacatctcagaacaaagaaaccagagcacgtgccggcgagcttgggcactggcagaggcgtggaggaagctgcttacagagcctgcagcacagcgcaagtaatccatctcagccgggaacacgttccccaggtacagcgaaaaccccgaggtcaccaggaggcagctctgcaagacagcgacagaatcccaggttacaacgcgccccgtccccaggctggaccctgacccttcaacttctgcttcactgtctgtgtattggtgactcacccacgtcccccagcatcaaccacacccgcacctgggacccgcccatcctggactcctcctgtaggacagacgcagccccgccgcagcccaggacatggaccagcctcccccagccatgtcggagcatggaccccccacgctgttatctggaggagagaagaaaggggatctgccaatatttagagcaaggaatggcacctctccccacaaaatactcctgccccaacatgttgtgcgtgcagtcttccagatcccacacccaggtccagacacgagactggaaaacaactgcccatccccctccgtctgcagaacctaatttccagatctggaagaagatccctccaggcaggggctccaggcccaggggctcctgagcagggaagaccctagcaggaggcagggagggtgctctctctcacgcacagcactgcaggggtgcggtggggagggggctctctctcacgcacagcacccccggggtgagtctgaggggagtcagtatcaaaggtcactgggacccagggtcctggcagaggaagcgaggtctggggcagaggggatctggcctgggcgggggaggggctgcgaccaagtccagggcaccaggtggaggagggcagagcccggagatggccaccaccacccgggagccgcctctgtccccagctccgaggcagacgcctgtcttggtggggcatgctcaggccacgggaggtgggcaggaccactgtgggtgctgcaggggctgccggcggaggccagggcacagggaggggagaaatcacagcctggatctcattctcagcccaagctacacggaaccgggggtccctgcatagaggcctgtcctgcagcatggctctgagcagctgcacacactcaggcccaagtggctcctccaatcatctctgtgcccacgactgtgcagggaatggccaggaccccagggaaatccctcggacatctggcgctgcccgtccaccccagacctgttcctttgttccccagctccctcccagccggcccctgaggccctccctaggaggaggaggtccctgaggttctctctgtgagggccgacctgaaggcctgagacgcctcctcccacctttgcaggtgacccctcagaggaccctgggcccccagagccgagggtcatggagactcctggggcccattcatggccctgggactgtccctaccctggtgggactaagccacaacctggagcagctcaaggctggcacaacagacacccataaattaataaaaataattgtgaaaacacaagcaaaacaagctcgtcggcatccaagagttctgcagcagcagggttagtctgagagttgctctctctgtcccacctggggctccagggcgctgcagtccgtcaccagagggaccagatgctcgtggccctccaagggcttagtgtggagctactcacccccatcagcacagagaagacccacgtcttgtggctgaagcaggggggcagtctcttcgacagctgcaggtcgctcggcttcgcgtctggggcatagctggcggggtcttgccggccccgctccagcgtgggcatccggtcataggccagctcctctctgaatggctcctgggtcatggcacttggggacaccacagctgtgctgaatgtacagccacgtgtcaccagttctttatctggaataaaattatcatcggctttggccactctgaggaaacttcaataagttgtttccaagaaatattttttaacaaaagaaatattgttcatactgaagtgctctaaatttgaagaagaaaatgagcacttgaatctaaaagtgaaaaagaaataactttcctagaaaaacggacctgaatagtctgggttcagggtgagattctacactttaaatgcctcattgatccatctgggccctccaggtgcaacacctgacaacatccatcggcaacttcgtccatgaacacatcacgccggggactcaagcacgttaaactgctccaattggtagctaaacgagagattgcaaaacatgcctctactcaacggcttaatgtctgagcacttacctcccccgctgctctgccgttgggagcactggtctctgggtgagggacttccagcaagaagtattcacaaatgaaacaaaagctcagcaaacttgagctgaaggcaggggaaggagagctgcttcctgaatatcaatgaggggaggaatcgggtggatcgtagaaatgtttcgtgttggttgtgtaaaccactgcctcgg

SEQ ID NO: 1910 - DNA, 3878 bp, Homo sapiens
gggaccatcttcctgtggatcttctggcctagcttcaatgctgcactcacagcgctgggggctgggcagcatcggacggccctcaacacatactactccctggctgccagcacccttggcacctttgccttgtcagcccttgtaggggaagatgggaggcttgacatggtatggggaagaggacttcagagaggcagagggggtggcctgggcaggggaggagaggtctgagaccctcaagaaagattctcccggggaacagataagggcacaggcataggggctccatctgtgctggtggctatgggatcagaatgggaggcgatatggtagcaggacaatgagaggttagatggcagagggacttccagaagcagtaggtgtcactgtggtgtgtagggttgggttgctgtgggtgtgacaatctgaaagggcctccaacaccttgctcttcccttaggtccacatccaaaatgcagcgctggctggaggggttgtggtggggacctcaagtgaaatgatgctgacaccctttggggctctggcagctggcttcttggctgggactgtctccacgctggggtacaagttcttcacggtatagatgcctcttggagcctgggcagaacatggagtctttggtacctttcctcccgcctctccaacaggatgaggtggtggggagtgggcacaggagactcatgatctgtcttgccctccagcccatccttgaatcaaaattcaaagtccaagacacatgtggagtccacaacctccatgggatgccgggggtcctgggggccctcctgggggtccttgtggctggacttgccacccatgaagcttacggagatgggtgagtttcctcccaacccgtactgcagtcgtcatccatctggaatgacctctgtcattctctttcactgtgtgtgaccaagaaaaaagaatgaattcattcattcatccatattctgggagcaaaggaaattggagttaacaaaaccaacccagaaactgccttcctggtcctctatcaagtgcagcagaaggtcatggaacaaatgacttcaagtagtgttacttgttactgaagggtcagtaagagataatgacctttaggatctatttttgcacatcaagggtgggcaaaagcaacccgcaaatggagtcttaaaaggtgcctaggtgtctgctggcctacaagggtgggaaggtgttccaggctgtgggcctggcttgagcagtggcctggaggtgagactcagcctggcatgcaccctcgagaccctcttggccacttcctgttccccagtgtgagttccagtgccatgagcagccctggccccgggctgcatccctctctctccctacccctgcctttcctctatctggtctccctgcagcctggagagtgtgtttccactcatagccgagggccagcgcagtgccacgtcacaggccatgcaccagctcttcgggctgtttgtcacactgatgtttgcctctgtgggcgggggccttggaggtgagtaaccttggattttctagaggaaggggcatgggatcctataagcctgacatgaattcattcactcatagatatttatggagcatctactttgtgccataaagtagggattgggttgtgggttaaggggtaaccaacctcctgcaggcacagaggtgcatgcaggtgcttgctcctttctggtgccgagggcagctggggagtccgcgaggggtgagcgaggccctctcttatgggtctatgcttgcctgtgctgctccctctgcccactagagggaagcccaacctcaggctgaggcctagaaggggatggctgcgccatgtggggcagggacaaggaggggaggagatggcctgccacttccagaccccagtgcgaaaaccttccacagaggcacactgtccatggccctgggtcaggcagtcgctcttcatgtttggccttagtctttttggccttcaaaataaaacctgattcagcatcccctctgtctcccgggttcaagccattctcctgcctcagcctccgagtagctgggactacaggtgcctgccaccatacctggctaatttttgtatttttagtagagacggggtttcgccatgttggccaggctggtctcagactcctgaccttaggtgatccgcccgcctcggcctcccaaagtgctgggattacaggcgtgagccaccgtgcctggcctagaatctacactcttttaaaaagagattcccaggtgatttgattgcatgttaacgtctgcaaagcactaggttagatgtgaatacaggcacccgccaccatgctgggcttattattattattttgtatttttagtagagatggggattcactgtgttagccaggatggtctcaatctcctgacctcgtgatccgcccgcctcggcctcccaaagtgctgggattacaggcgtgagccactgcgcccggcctattttttttttttttttttttttgagacggagtttcgctcttgtagcccaggctggagtgcaatggcatgatctcagctcacttcaacctccacctcccgggttcaagcgattctcctgcctcagcctcccaagtatctgggattacaggcgacccccaccacacccggctaatttttgtatttttagtagagatggggtttcaccatgttggccaggctggtcttgaactcctgaccttaagtgacccatctgcctcagcctcccaaagtgctgggattataggcgtgagccactgcgcccggccacaataagcatttcctgtgcccctcctgtgtgggaggccatagaaagctcagcagctgtggttcatgatggaatcaggaactggtctattaccaactgcacacacttgagcaaattatttaacttctctgagtcttgtttctttgtttgtaatacaggaataatattggccttgcagggttgttgtgattactcaggaaagcaagactagtcaagcactttgcacagggcctggcacatagtagatgctcaacaaatactgctgtgttttgcctgcacaggcatcatattggtcttatgcctcctagacccctgtgccctgtggcactgggtggcaccctcctccatggtggggggcagagaagcctcacagatcctcccctaccaccaccagggctcctgctgaagctaccctttctggactccccccccagactcccagcactacgaggaccaagttcactggcaggtgagacattgctgggctctcacaccctctgagtctcccttccctgcctcgcctcctgtggcccaagttgccttcttccttccttgctgctccttctcctctggggtacacccctgaactgtggcttccaggctcctggagctaccctttcacctctacccactcctgccttccaggtgcctggcgagcatgaggataaagcccagagacctctgagggtggaggaggcagacactcaggcctaacccactgccagcccctgagaggacacgctccttttcgaagatgctgactggctgctactaggaagttctttttgagctcccattcctccagctgcaagaagggagccatgagccagaaggaggcccctttccacaggcagcgtctccacagggagaggggcaacaggaggctgggaaatggtggggagtggggccgtaactgggtacaatagggggaacctcaccagatgcccaacccgactgccctaccagcctgcacatgggtagaagaggccaaattgaggcacccaagtgatccactggccccacgtcacacagttacagtgaagcccaagccaggcctggttgagggtgataaacgccactgtctctaagg

SEQ ID NO: 1911 - DNA, 14918 bp, Homo sapiens
gtgctccatcgtgggtggggtaaagcggggtgggagccgatggtccgtttcctgaaggcacaggccagcttagcctgggtgctcagaggacctcggctggggtacacgtttgggggctgggagaccgttgctgaaggcagcgatcatgtggcggcggcactaggcggagtcagacggtcacgtgattgggaggggatcacgtgacggagggcggctgaggagcgcggggtggctgcctttaagtcacgtgacatgaggagaggtgggcgggtacctggaggaagctcgcggcgtcggtggcggtggcgcgcggcggccgctgagaccggggctttgagtcgcaccccgcggcccgccccccgccgccaccctcgcagatccgtgctttttcccctttgcttctctcccgtactgggtcagtcctgtccgcgctcgcgcgtcggtttgcgggtgtgcgcaggcgcggcaggggccattagccctttgggtgggcggtggagcccgggagcgcgcgggcgagaccatggcgggtagcagcactgggggcggtggggttggggagacgaaggtgatttaccacctggatgaggaagagactccctacctggtgaagatccctgtccccgccgagcgcatcaccctcggcgatttcaagagcgtcctgcagcggcccgcgggcgccaagtactttttcaagtctatggatcaggatttcgggtgagcgcaaggcctagataggaccggcgggggctttgctagagtggattgggcgacatggaggggcacacgtctactttgggccacactgggattttctggcctatggtggagcagattgtactatgctgaggtaggttgactatcccaggatggacaaggttatgcttggatagattgaggcacacggacagactaggatatcctaaaccagattagacaagattaggctttactggaataggtgggggcatactggtttatgttggagtattctagtctgtactgagtaaattgatccattgtctggttgtttagtacgttctcaggagtcctgtaacgcctgtaatcccagcactttgggaggctgaggcgggcggatcacgaggtcaggagatcgaggccatcctggctaacacggtgaaaccccatctctactaactaaaaatacaaaaaattagccgggcgtgggggcacgcgcctgtagtcccagctacttgggtggctgaagcagggagaatctcttgaacctgggaggcggaggttgcagtgagccgagatcgcgccactgcactccagcctgggcgacagtgcgagactccgtctcagaaaaaaaacaaaaaacacttgggccattatggactctactgggttgtattggttaatcctggtttctcttggggcaagacttggttttattggagcactcggtataggggcagacaaggctgttggggcctgtgctagcacaggcagccgtattgggatgttccaatctagactggtgcagacagctgcgtgtgggggcattgtaggctgtgctagaatagattgggctatcctagggtaatttgggacattcagggctatcttggactagattggcgtgtaaataatgcagagaaagcccttttgtgtttatggtctttggggctgagccttctgggtcctcaacctctgcttttttttttttttttttttttttttttttttttttttgagacagtctcgctctgtcgcccaggctggagtgcagtggcgcattctcagctcactgcaagctctgcctcccgggtccacgccattctcctgcctcagcctcccaagtagctgggactacaggcgtccgccaccacacccggctaattttttgtattttttagtagagacggggtttcaccgttttagccagactggtctctgacttctgacctcgtgattcgcccgcctcagcctcccaaagtgctgggattacaggcgtgagccaccgcgcccggcccaacctctgcttttttgaaggcaggctggattaagttgggatagcatgggttttagaagaactgaacaaactggactctagctagaaagattgtttgacatggggatgctgatactatcttgggagttatcttggctttaaggcaaggtttttctagttgtcagcaatgtaatcttggacaatttatttaaattttgtgtcttgatctcatctgtgacatggagaaaatcacagaatgaaatggttagttcacgtgtgtggcacacgggaaattcttggtgaatggtaattgtaattagcattgaggctgaccactctgtaaagtaggttatggtgatacagaataatttgcctcagagtggaccaagctgtgctgagattgtgttatgttgggaagaatcctacattatgctgagacgggttagtagtgactgggctgtgttgtcacgttgacagcaaatggattatgttgatatatatcctggctcccatgaccatattaggctaacgggttaattagacaaggtgtcctaatttggggctaaggttgtgtgtggaaagagagagaggaacaactagggtagagagtctgatgctttatacgtttattcatttagtcgacagtatttgttaatgcttaagtgtcagtgtgtggtgtgtggctaggacatggtgttgaccagagtaagtgttcatggtttgatgtcatggtcaagaagaaggggcaagtccggtccaccacagggaacccattggagagatgaccccaaggctgggctttgggatctgtcaggttgagcagattgctttgtgcagaattttgtgcccagtgaggcacaggggaatgggaaccccagcttgccctctccttgggagctttcagtctaatgaggaacttccattgtttgtttgatccaatgggtggtttttttttttttttttttttctgaggtggagtctcactctgcccaggctggagtgcagcggcgcaatctcagctcactgcaaccttcgcctactgggttcaagcgattctcctgctttggcctccggagtagctgggattataggtgtgcaccaccatgcctggctaatttttatatttttagtagagaaagggtttcaccatgttggccaggctggtcttgaactcctgacctcaggtaatctgcccactttggcctctcaaagtgctgggattacaggtgtgagtcactacgcctggcctctaatgggtgtttttactcaagaaaggacagtcttctagaaatgaattagagaaaactaaaggaaagtataagagtagaggctttgatgaggaccaaagccttttttggaaggtttttttttttttttttgagccgcccaggctggaatgcagtggcgcgatctcgacttactgcaaccactgtctcccgggttcaagcgactctcccatctcagcctcctgagtagctgggattatagacacccaccatcatgcccggctaatttttgtattttagtagagatggggtttcaccatgctggccaggctggtcttgaactcctgacctcaggtgatccgcccgcctcagcctcccaaagtgctgggattacaggtgtgagccaccgtgcctgacctttttggaaggtttgtaaggaacaggggtggggttgagaggaggccaccagccagtctcattagataggtatctcaggcagccgcatcagcgtgcgggattgcttttgaaactggactaagaggtttgagtcagactcaaggaagtctttggagcagcactgtgcccctgagggtgcgttagggagaggagaaataaggaaaggggattgagtttggagatttcttaggtgtcggagtgagttctttcaatgtaagagaagacctgaacagggcaggagaaagtcaacatcctggagccaggtgaagattgggagaaagtttgatgggggtcggggtggggatggttggtccagctcactgacctctaccttgtcgcttggcagggtggtgaaggaagaaatttcagatgacaacgcccgcctcccctgcttcaacggaagggtggtatcctgggtaagaggttctgacaccgaggaccaggccccctcagcattgccaagctccctcaagcctcagtctgtttctgtatcctccccaggccgcgcgttagcagccctggctctttacctcctgtctgtttggagagccggcgagaggccctcagccttctccttctggagtctctaatacttgctaggtttttttgctcttctccagctctctgagaccctttctcattctttcacttactgccacctgtcacaccctgactcccaagtgagccactgtttatcatttgcacccttctagctggtgtcctcagataatccccaacccgagatggcccctccagtccatgagcctcgggcagaactggcgcctccagccccacctttacctcctttgccacccgagaggaccagcggcattggggactcaaggcctccatccttccagtgagtccttcagattcttgactgcaggggagggaggtgaggagggaacccaggcctttggtaggggacgcctaggatccggagccctgttctcctgatgtgggttggaaaccatctctgcctgtccagccctaatgtgtccagcagccatgagaatctggagcctgagacagaaaccgagtcagtagtgtcactgaggcgggagcggcctcgcaggagagacagcagtgagcatggcggtgaggggcaggcctgggggccgggaagggctgggccagaccccagccttggtggggtgagcagggggaagcttggttcttgagcttcctgtccatatgtagctgggggccacaggactggtggcccctcaaggctggagcgccacctggccggatacgagagctcctctaccctcatgaccagcgagctggagagtaccagcctgggggactcggacgaggaggacaccatgagcaggtgtggctccgcacagctctccccagcgcacccagccccgtctcgtcttccagtcaatcctcttgttctttctcttggccccatgaccactttggcctacgtttgctctccttcccaacctcctggtaggttcagcagctccacggagcagagcagtgcctcccgcctccttaagcgccaccggcggcgaaggaagcagaggccaccccgcctggagagggtgaggggttcctacaggaaggctggtgctgggagaaggtggggcatgggctttggtttgggcggtgccaggacaccggcagcaccccagggttgaccctgggttattgaagggcactctggctccttttcccaccacagacgtcatccttcagcagcgtcacagattccacaatgtctctcaatatcatcacagtcacgctaaacatgggtatggggagagcctgtggctagggcgtggggagggcctggtctctagggttccgggcgtcctgtggcaggggctcctcttttcacatggcctctctccacagagaagtacaacttcctgggtatctccattgttggccagagcaatgagcggggagacggaggcatctacattggctccatcatgaagggtggggctgtggcggccgacgggcgcattgagccaggggacatgcttttgcaggtgtgctggggtagggccactgagctgccctgcacgggggccctcagcctctcccaccgtgtctctgacccacttgccgtcgcttccaggtgaatgacatgaactttgagaacatgagcaacgatgacgctgtgcgggtgctgagggacattgtgcacaagcctgggtgagttgccaagcaggttgccggtcctcagtcctctttttttttctctttcatgttttgttttggaattttaataagtactaagacagccgggcgtggtggctcgagcctgtaaacccagcactttgggaggcccagatgggtggatcacctgaggtgaggagttcgagaccagcctgaccaatgtggtgaaaccgtgtctctactaaaaatagaaaaattaagtgggcatggtggcacatgcctgtagtcccagctagtgaggtggctgagacaggagaatcacttgaaccctggggggtggaggttgcagtgaaacgagatcacgccactgcactccagcctgggcgacagagcaagactccgtctcaaaaaaaaaaaaaagtgctaagacataacgttcaaagtacatgaaacaaatgcatgacatagcaaataatactagagtaaatatccatgtcactgccatctagatcatcaaataggagattgctgataccctagaacttcctcctcagatgtcccttcctgctcccaaatgcctcactgccccaggggtagtcactctcctgacttctttggccatcaccataacaaagaaaagctttgcctcactggatagttaccacccttgcacgtatccttgaacactgcagtttcgttttacctgtttttggactttctgtgaatggaactgtacagcgtgtactctcttgtctcacttggcagtatgtttttaagagttttccatgttgatgagtcatccacattgtggtgccttccaccctcaccttctctagcccagccgcgatgtgcttgcttctccccctctttgtgtctcttaatccatccttgcttcagacccccgccctcctgaggcctcctcttcccctgcgcccttgactggacttctcttccccatagccccattgtgctgactgtggccaagtgctgggatccctctcctcaggcctatttcactctcccccgaagtgagtgacactcagggaggggcctgaagttgggggtgggggctgcccaggaggctggggccgggcctgtggtcatggggaatgggtgggaggagggtccaggcagaggtggaacaggaggctgagtcagggagggactgggctggcttttggggactgagaatgggtcattttggtgccatctttgtcccagatgagcccatccagccaattgaccctgctgcctgggtgtcccattccgcggctctgactggcaccttcccagcctatccaggttcctcctccatgagcaccattacatctggatcgtctttgcctgatggtgagccgccagcccacctcatcccaccctcccagcagaaggctgtcccgcagtggtctgatccattgcccttgtgggagcgatccctgactctggttacccgttgtctcctctgccaggctgtgaaggccggggtctctccgtccatacggacatggcatcggtgaccaaggccatggcagctccagagtctggactggaagtccgggaccgcatgtggctcaagatcaccatccctaatgcctttctgggtatggctgggtcctgggcaggtggctggagaaggggaggaggtggtgaccaaagccaggaatggcacaggcagaggcgagagcaggagttggaagaagaacctgaggcctttttccactgtgggtgctcccaggctcggatgtggttgactggctctaccatcacgtggagggctttcctgagcggcgggaggcccgcaagtatgccagcgggctgctcaaagcaggcctgatccgacacaccgtcaacaagatcaccttctctgagcagtgctattacgtcttcggagacctcagtggtggctgtgagagctgtaagtccccctgccccaactctgggagtgtggctttgcctaccttgttctgcctctccaaccctagacctagcccagaaaccgcagccagggccaccatggatggtcgagcagtgtgtgtcccgcactaggtcctgcactggccgaggatgggggctgacgtccacccatgtgctgctggacaagccatgtgccaggtgcaggactgtgtccaccgggggaaggtgcacctcttacctgagtcccgcaaagacgtgggctagtggctgtgcccctgccctcatggcagaagtagatgggagtttcttgtcagagacccttgtgaacccctgttttgagccccatcgtgggtgggtctgggagaactgttcccagttcctctccattcggtgtcttggggccctagcctcttgaagcagtgatttcttcctctcctcccttgctttccagacctagtcaacctgtctctcaatgacaacgatggctccagtggggcttcagaccaggataccctggctcctctgcctggggccaccccctggcccctgctgcccactttctcctaccagtaccctgccccacacccctacagcccgcagcctccaccctaccatgagctttcatcttacacctatggtgggggcagtgccagcagccagcatagtgagggtaagtcatccccacatacctgtacggccaggatctgagggtggatgagaggggagccagggaggagcctgggtgaggactcagttgcccctcccctccctccacaggcagccggagcagtgggtcgacacggagtgatgggggggcagggcgcacggggaggcccgaggagcgggcccccgagtccaagtccggcagtggcagtgagtctgagccctccagccgagggggcagccttcggcggggtggggaagcaagtgggactagcgatgggggccctcctccatccagaggctcaactgggggtgcccctaatctccgagcccacccagggctccatccctatggaccgccccctggcatggccctcccctacaaccccatgatggtggtcatgatgcccccacctccacctccagtccctccagcagtgcagcctccgggggcccctccagtcagagacctgggctctgtgcccccagaactgacagccagccgccaaagcttccacatggccatgggcaatcccagcgagttctttgtggatgttatgtagcccactgtggggccaggctgggccgggcgctcctggtgtgtgactgggtgtcctggccgtcatgtgcttgctcttacagtgcctgggctcagcctaccagctgctgccatacaggagattgtggccactgtgactctcaccagcagtgcctggttcctcccccttccctcaggggtagacaagggacctttgattatttttagctttgtttttttataagcctttttgggggttaaaatagagtttcttacatttttgggacttttttaataggcatttcctcttttatatgaagaattcccatccattgggccccttctaaccccagaatgtgacctcctcctccagttacccacagccctgccctttgcagggttgggggtggtcagcggtaccccggggttaggcatcctagacagcagcctgaggaagctgggagatttgggccatgtagctgcctttgttactctatttattttagtcacttgtataaaacaccaaataaagcaatagaggcaaactccccacgcctctggctcctttctttgggagggaggcaggcagcagggggaaagaaccgtcacacaggagcaaagcatgactggctagaaatttttattatttgcgaggcagtaagtgctcttgagagcaggcacagtgctgggaacactaggccccttcgggacaaaccagggccttaaggaaaggggcttcggctttggcttgagggaaggcacataactgggacaggccctggccgggagtattcagaagccaagtgggttgctggtgaccacaccaccccgctccaccaaggccttggagatgcttttgaagttgcggtagagctcttgctgccaggggtcagactgcagggcggccatgccctctcggatccgagctgcagcctggggagagggaaggaggggttgggcctgcacctccagccctcacctgagcttggcagccccgagtctcacctcgatacaccaggtgtcacagagcattttctcatgctgggccgtggggtggccctcactcagggatcttgaggccctggcaggaagcaggagatgaaaataaatctgggccggctgggatccaggcccaggccccctgcggctcaggcattccctgcctgcctcctcacctcgagagaaccaccaccatggcatagaggtcgatggccccgtctgccagccgctgcagcagaaactgttcatctgtccggtaggtggggtgggggtgggggtgggggcattagtctcaaggagaggaaagggaggggcggaatggtgtagagctcacttactgacaatccccttcttgtgttttatcagcttggcctccaccacagtggcaaactgctccagagcccgtactgccttaagagatggggacagtgcggggctcagaggggccatcggctgcagtccctgatgcaggctctcctggacccctggccgcttaccagctcgccactccgactcaactccgggtggacaagtccgctgagactcaggccgctgcccagccctgcccgcctgagaggaagagggagaatgactggttagttgccatacaccaccctgccctcccctggctctggccctaagcctaccgcctcagctgtttgcctgcctctcctagcaggaggccagcattcccaaagggattctttagagcactgccaagcccagagagctcctttcctttgtcctatgggggaagagggtccagcagtcaggactcactgtcctccccacctctacccccacccaattctctgtcttaccatacagccctgcagagccacaaacagccgaagaatgtcatttgtcccctcaaagatccggaagatgcgaagatctcggagcacacgctctactccaggttcctagcacagggccacacaaattatatgcccgtgctgagatgtgcctacccacccctggcccagccgaggctctgcagaagaccgtcctgtaccttcatgaagcccataccccccatgatttggatgcattcatctgtcaccttccaggctgcctcctagggacaaagaacagatgagactggttttgggagctgagcacccaaactggactccctcccagcatgcctgggacctcaccgagccaaagattttgctgatggcggcctctatctggaagtccgtggctccctggtccatgttagcactcaccatgtaagccatggactgaggttgcatagttgggacatgggaaggaaaattgcaaagggctttgtcagacttggcctcatcacccagatctccaagataagggctgacctagcttgtcaggtcaggcagatacttgttctgggtcagttcatcaggtgcttccaggtatttgttttcttaaaaggggtggatgtaagggatgaggtagaattaacttctggtactgctggcaggcacctgagcagaacatcattgctgtctctcttcgcagaagctgagctgactatgcctccccgcatcccctagggcattggtgtaaagctggagacccactgccccaggtgctgctgggggttgtagtctgacccgactgggaagaaagccccagggctccagggagaggggcttgggaggccctcacctcagttacatactgcagcataaccatccgtgccagcttctcctggatcagcccaaagttgtgaattttctccccaaactgggtacgattagtggcatgatctacctggaagagggtccacacatcccgctgtggttcagtgtggttctgcagtctccctaggagaggggctgggcttgcgccagagggatgggttttgcatacaaccagagttcagtctacgctggatggagacctaagctagcaagtcgggctgctggtaggggaggagtttctagtgtagggagtgcctgcaagtgatcagggacacatggcaagggggacagtgagacttctgtttgggttacctagggactcgggcagggtactcaccgccttagcaatgatgcctctcatggtacctgccagggccgcagccatgccaaaccttccattgttgaggatgtgcatggcaaccttgaagccactcccaacctcacccagcacgttctccgatggcacccgtactccatcaaagaacacctctgctgtgtttgaagccttgatgcccatcttcttctcagggggcccactgtgtcagggcagtgtgggaaagcagaggtgtgttcaacaggttgtcactgggggaaaaactgctccttcgctccttatgcaccagggaggaatgacgaccactagactattagaggctacagccaccacttcccctcaggccctgagggctaaggaggcctggctatgtcctattttgtgttggacttggttgctggagccaaaactttagctcagttgcatacatattagtcccaaaggccacattcagtccacctgctttggcttttgcacacgtccccagggtgacttgcaacagccatctgcccaggagcccagtcctgcccctcagtcctaagctcccccaacccaaattcactcactgggtaatgcccccgaagcccctctccaccacaaaagctgtgatcttctccttcacggctcctgtggctggatctgtaactggtgtcttggcaaagaccgtgaagatgtctgctaggcccccattactgtggaagaatgggatattcagggcgtggaggacggggagcagtggggcctggaattgggcggaggagaaggggagaaatgggaggcaggttgcctgatccaaagcttgcttccattgagggtatagtattttccacaggggctgggcacagcagaggttcggatggaggctgcatctgacccgcttgagggctcggttagacagaaagcggccacagtctcccctgttggggagagagctactttaccccaagttctgatgagcttcaaagtcccctcggcccacttccccatccctccagcaggcagttcccccttaacacctgggagtatccagttcttttgcatgtcccaaccagcacactgtgatgcctccccaaaaccttcccccaactgaaatgctcagccatctgataatctaagtgccaactggcctaatctgtgccaagcccagtgtgccccccaatccctggctctcctagggttgcctcaccagatgccagcttggggaggtatttttctttctgggcctttgtgccaaagagcaggatgcctttgaaaccgatgctctgatgggcccccagggtaatgcccacgccaaggtcatgcatgcccacgatctccaccaaacgggcgtactggaggggaagcaggaatctggggttgtcactggctgcagggggacctgaccttaacaggagagtgtgggcaacagggcagttcctggcctagggcagtgcctgacctgggccatccccagtgtgtagaaaagaagtggggtgtgcaaagggcacagcagagaatgctggtctgtcttaggtctaggtaggagggtgacttgctactagtcagtctattgttaggcaatccccaacttagagatttgtaaggacttgggaaccagggtgaggcccatggctcaggcctaggggactgcatgtaaattgtgttatgtttggacagttaacatccatcccacaggcacccagggcaggtgcttagaagagaccttagccctagtctctaggtctatggcaaaagagctgagtctgccaagctggggtatggcatactgggatgtggcgatagggcgccctcacctgggtgttgcaaaggcccacaccacccagctcactgggcacttgcagaccaaaggcccccagctccttgaggccctgccaagtggtctcctccaccatctccagagcgtcattcttggcgggatcgttcacttcctggggaaggcacaggatcccacatccaggctccttttgagcttaacatctccaaacacctcaccagggaccaagccccgagtcattccttacctcgaagaaacgggacacaggctccaccagctctttaagaaactgtgtctgctcttcgttgagcactgcagagggtgggggacaggctggtcaggccaggctggcaggggaaaccaccctggccccacccagctctgattatcccttcccttaccggacgggtatgggaacacctgatctgtggtgagctggcctttgaacattcccacagcaaaggacttagattcctgggcagagagaggcaaatttcagggctctggttgggtctggctaaggtccacctggcctcggggctacctaccgccttggccggttttttcctggtcagagcgtcagaggggtgggaatctgacttgtccagagccagctgggaaaagagacggttagcaagttcagggaagggacttccgctgtgtcaaggggagaacaggcgagagccgcgcggggaggcggcgcgaagcggtgacctttcccctagtttcgccctagggcaccctggcttgccctttcccctactttcggcgactgagcagtaggcaggtacctggcaccaagagggagatccctgccgatggcgggcgccgaagcggaccgccgctcccacacccccttgccaaggctgcggtgacttacctgagcggcacccccggcatagggccgccgggcagggccgggccggggctgccccaggagcgccgtgagccgcgagctgtggggagtgggggttcagtgccggcccggtgcccagggccgctgcccaccgtccctcttgtcacacacagaccttccgcccccgagcctcagcagctgccgccccaagctcgcggccatccgagccgcctgcatctccgaatctctccgggcgccgctggctcgagctctgacccagctctggcgtcctgcacgcccgcgtcctgcacgcccacgtcctggcgcccctaaccctgactcatcgtccacagtgc

SEQ ID NO: 1912 - DNA, 4456 bp, Homo sapiens
ctgccaggctgtgaaggccggggtctctccgtccatacggacatggcatcggtgaccaaggccatggcagctccagagtctggactggaagtccgggaccgcatgtggctcaagatcaccatccctaatgcctttctgggtatggctgggtcctgggcaggtggctggagaaggggaggaggtggtgaccaaagccaggaatggcacaggcagaggcgagagcaggagttggaagaagaacctgaggcctttttccactgtgggtgctcccaggctcggatgtggttgactggctctaccatcacgtggagggctttcttgagcggcgggaggcccgcaagtatgccagcgggctgctcaaagcaggcctgatccgacacaccgtcaacaagatcaccttctctgagcagtgctattacgtcttcggagacctcagtggtggctgtgagagctgtaagtccccctgccccaactctgggagtgtggctttgcctaccttgttctgcctctccaaccctagacctagcccagaaaccgcagccagggccaccatggatggtcgagcagtgtgtgtcccgcactaggtcctgcactggccgaggatgggggctgacgtccacccatgtgctgctggacaagccatgtgccaggtgcaggactgtgtccaccgggggaaggtgcacctcttacctgagtcccgcaaagacgtgggctagtggctgtgcccctgccctcatggcagaagtagatgggagtttcttgtcagagacccttgtgaacccctgttttgagccccatcgtgggtgggtctgggagaactgttcccagttcctctccattcggtgtcttggggccctagcctcttgaagcagtgatttcttcctctcctcccttgctttccagacctagtcaacctgtctctcaatgacaacgatggctccagtggggcttcagaccaggataccctggctcctctgcctggggccaccccctggcccctgctgcccactttctcctaccagtaccctgccccacacccctacagcccgcagcctccaccctaccatgagctttcatcttacacctatggtgggggcagtgccagcagccagcatagtgagggtaagtcatccccacatacctgtacggccaggatctgagggtggatgagaggggagccagggaggagcctgggtgaggactcagttgcccctcccctccctccacaggcagccggagcagtgggtcgacacggagtgatgggggggcagggcgcacggggaggcccgaggagcgggcccccgagtccaagtccggcagtggcagtgagtctgagccctccagccgagggggcagccttcggcggggtggggaagcaagtgggactagcgatgggggccctcctccatccagaggctcaactgggggtgcccctaatctccgagcccacccagggctccatccctatggaccgccccctggcatggccctcccctacaaccccatgatggtggtcatgatgcccccacctccacctccagtccctccagcagtgcagcctccgggggcccctccagtcagagacctgggctctgtgcccccagaactgacagccagccgccaaagcttccacatggccatgggcaatcccagcgagttctttgtggatgttatgtagcccactgtggggccaggctgggccgggcgctcctggtgtgtgactgggtgtcctggccgtcatgtgcttgctcttacagtgcctgggctcagcctaccagctgctgccatacaggagattgtggccactgtgactctcaccagcagtgcctggttcctcccccttccctcaggggtagacaagggacctttgattatttttagctttgtttttttataagcctttttgggggttaaaatagagtttcttacatttttgggacttttttaataggcatttcctcttttatatgaagaattcccatccattgggccccttctaaccccagaatgtgacctcctcctccagttacccacagccctgccctttgcagggttgggggtggtcagcggtaccccggggttaggcatcctagacagcagcctgaggaagctgggagatttgggccatgtagctgcctttgttactctatttattttagtcacttgtataaaacaccaaataaagcaatagaggcaaactccccacgcctctggctcctttctttgggagggaggcaggcagcagggggaaagaaccgtcacacaggagcaaagcatgactggctagaaatttttattatttgcgaggcagtaagtgctcttgagagcaggcacagtgctgggaacactaggccccttcgggacaaaccagggccttaaggaaaggggcttcggctttggcttgagggaaggcacataactgggacaggccctggccgggagtattcagaagccaagtgggttgctggtgaccacaccaccccgctccaccaaggccttggagatgcttttgaagttgcggtagagctcttgctgccaggggtcagactgcagggcggccatgccctctcggatccgagctgcagcctggggagagggaaggaggggttgggcctgcacctccagccctcacctgagcttggcagccccgagtctcacctcgatacaccaggtgtcacagagcattttctcatgctgggccgtggggtggccctcactcagggatcttgaggccctggcaggaagcaggagatgaaaataaatctgggccggctgggatccaggcccaggccccctgcggctcaggcattccctgcctgcctcctcacctcgagagaaccaccaccatggcatagaggtcgatggccccgtctgccagccgctgcagcagaaactgttcatctgtccggtaggtggggtgggggtgggggtgggggcattagtctcaaggagaggaaagggaggggcggaatggtgtagagctcacttactgacaatccccttcttgtgttttatcagcttggcctccaccacagtggcaaactgctccagagcccgtactgccttaagagatggggacagtgcggggctcagaggggccatcggctgcagtccctgatgcaggctctcctggacccctggccgcttaccagctcgccactccgactcaactccgggtggacaagtccgctgagactcaggccgctgcccagccctgcccgcctgagaggaagagggagaatgactggttagttgccatacaccaccctgccctcccctggctctggccctaagcctaccgcctcagctgtttgcctgcctctcctagcaggaggccagcattcccaaagggattctttagagcactgccaagcccagagagctcctttcctttgtcctatgggggaagagggtccagcagtcaggactcactgtcctccccacctctacccccacccaattctctgtcttaccatacagccctgcagagccacaaacagccgaagaatgtcatttgtcccctcaaagatccggaagatgcgaagatctcggagcacacgctctactccaggttcctagcacagggccacacaaattatatgcccgtgctgagatgtgcctacccacccctggcccagccgaggctctgcagaagaccgtcctgtaccttcatgaagcccataccccccatgatttggatgcattcatctgtcaccttccaggctgcctcctagggacaaagaacagatgagactggttttgggagctgagcacccaaactggactccctcccagcatgcctgggacctcaccgagccaaagattttgctgatggcggcctctatctggaagtccgtggctccctggtccatgttagcactcaccatgtaagccatggactgaggttgcatagttgggacatgggaaggaaaattgcaaagggctttgtcagacttggcctcatcacccagatctccaagataagggctgacctagcttgtcaggtcaggcagatacttgttctgggtcagttcatcaggtgcttccaggtatttgttttcttaaaaggggtggatgtaagggatgaggtagaattaacttctggtactgctggcaggcacctgagcagaacatcattgctgtctctcttcgcagaagctgagctgactatgcctccccgcatcccctagggcattggtgtaaagctggagacccactgccccaggtgctgctgggggttgtagtctgacccgactgggaagaaagccccagggctccagggagaggggcttgggaggccctcacctcagttacatactgcagcataaccatccgtgccagcttctcctggatcagcccaaagttgtgaattttctccccaaactgggtacgattagtggcatgatctacctggaagagggtccacacatcccgctgtggttcagtgtggttctgc

SEQ ID NO: 1913 - DNA, 4682 bp, Homo sapiens
gccgctccccgggggaggggagcggcttggtgcgcctgcgccagcctgtggctttctgggaatcaaagttccggaggttcatgcggtcccttttccgctgttcccggacggactacaaaacccttggtgcactgcgcctcggcgccggcggggggaggagggagagaagaggagggagggaggagagaggaggaggaggaggaggaggagggagcaggcggccggcggcgcggggggagggggcccggtccgggagtgcgggaggcagtggtagagggaggtggcggcagcggctagcggactcgagtctcaaccgggctgaggcggacacttctgtggagcgaagcagtgggagcatcgagcactagaggcggcaccgggatccccggctccggggaggggggcgccggaccgggaggaggggagggggcgatgctggaagccatggcggagcccagtcccgaaggtgagctctcgaccggtgcagagcgctgagccggcggggggcgggcgaggaatcaattggcaaacttggaggtcgagccccggagcccagcgggggagttcggggagggggtcgggaggctggccctggaggtgggagagcgacgagttgagagaccttggagaaagaggagtgggaaactgggctggggtagttggagatcagacggtgtgggggtgcgggggataggagcttgaaacccggagcctcgggggttagggcccgaaagggccaccggcagattggggccctggaactggaaggttaggggaatccagtggccggagagttgctcaggagggaggacgtagaagaggctgagtgaggggcccggtagttcgccgaggtggggtagtttgtggcggtggtaccggagctccgagtagttgccgccggagaatgcccggtgattgtcggagaggtgggcaggtagttgtggggagaagagggggtctgggtattgtctacggcagacggacctgtaccggggggtagttgtggagagagcgagccaggaagcgaggcgagctgggtagttgtagggggtggtggggcggggtggggggggttaagaccggcgacttgtcgggcgggggggtagggttggtccgcgagggttaagagcctgggagttgctgagggtgaggggggcatcggcggcagcagcggtggctgctgtggagagagagagagagtggctggttggggggaaggggccagagttgaggggtccatagcctagtaactgggtggtgagtacgggggcggaggggggggcggcggccggagagggctaggaacagggccggggggcccggtggggagcccgaaaagctggagacggggaggggccaaagccccggatgggggcggagggacggcgaaattgtggggagcgcggtatgggcgggtgggggggcaggtgggggccgcgtccgggttagagctcccgggtctgtcccggccgtgaagtagcgttggatgcgtgtgcctgtgtgtgtctggggtgggggtgaggggcgcgccgggccgcgtgctcgagtagaaggggccggagggcggggagcggttcggcgtggtcatcctggaccctgggggctggcgggcggcgtgtgcggtctcggagggcccgaggcggtggagcgcggccgggtaggaactcggggctccgggcgcgtgtgaaggacgggggcggctggcggcggcccggacgcggccccgggagcggtacggtggggtggggcgctgagggatccgagtagactggagtcgagagagaccgtgagttgggggggcggggcgccgggcctccggttgggggaaggggagcgctatagcgaggcctcagagggcgccgcgcccaggctccgcccctcgcggggcggaagggggagccggggcggatccaacacagctgggggcctgctggcctggcagagggacctgggagagcagggggttcacttaggaacaacggggtttagagggggagttttacacagattgttcctagtgtcttgactcagcttttattgcttttccagatccacctccgacccttaagccagagactcaggtgaggtttgccttacctttgcagcctagtagccctgcctgacaacgccccccgccccccttttctagacctcacttagggactgtgtttctgggaatgccattcttaaactgtgtggctttgcatgtgatccatatctccttcctttcagccaccagagaaacggcggagaacaattgaggatttcaacaaattctgcagttttgttttggcatatgctggttacattccccctagcaaagaggtaggggcaagagaattactgacttgaggctggtgtggtgggactatagagtgactgttgttcaaacagaactgtattgctttatagaaggaggcccctagaaattatatgtaagaccagggaagttggagactcttagggctgtggtaggaaagctggtatgcggggagtggatggccgggatagctagcttgaacagcagtgaaaaggaagggggatttggagtcgctggttgagattttggcatagtcttgaggtgctgtgaatggaaggtgtttatggataaattttagggagatgaaaatggtaacaaatgaggctatacagaaaaagagctaaggacataacggctccggtctgggtgatacagtgttccacaggccctgggcaggggcagcggtgaggtgtcagacttgagggtagaggtaacacggactggtcaagaggacatgctgatgggaattggggtggggagaagtttttggagtacagtgggatttagtggttgaggtaggacattttggggtaaatccagtcactccttttcaagctgggtttgtggaggggctgagatgacactggggttctgctgaccctggtctcttcccccttttaaggaaagtgactggccagcctctggctccagctctccattgcgaggagagagtgcggccgacagtgatggctgggactcggccccctcagatcttcgaaccatccagacttttgttaagaaagcaaagtcatccaagagaagggcagctcaagcaggtcccacccagccaggacccccaaggtccactttctctcgtctgcaggcccccgacagtgctaccttgcttgagaagatgaagctcaaggactctctctttgatctggatgggcccaaagtggcatctcctttgtcccccacatccctgacacatacctcccggccccctgctgctcttacccccgtgcccctttcccagggggacctctcccatcctcctcgaaagaaggaccgaaagaaccgaaagttggggccaggagctggggctggctttggggtgcttcggaggcctcggccaactcctggggatggggaaaagagatctcgaatcaagaagagcaagaagcggaagttaaaaaaggcagaacggggggatagactcccacctcctgggcctccccaggcaccccccagtgatacagactctgaagaggaggaggaagaggaggaagaggaagaagaagaagagatggcaacagtggtagggggtgaagccccagtccctgtgctgccaacaccccctgaggctcctaggccccctgccacagtgcaccctgaaggagtccctcctgctgacagtgaaagcaaggaggtgggcagcactgaaacaagccaagatggagatgccagctccagtgaaggcgagatgcgggtcatggacgaggacatcatggtagaatcaggtgagaggtttgggctggggcgaggggtttgagggtgttgtggatccaacagctcaggcagaataccaaacaaacctttttttccccaggtgatgactcatgggatctgatcacatgttactgtcgaaagccctttgcagggcggcccatgattgagtgcagcctgtgtgggacgtggatccacctctcctgtgctaagattaagaagaccaacgtccccgacttcttttattgccagaaatgcaaggaactgaggccagaggcccggcggttaggggggcctcccaaatctggagagccctgatggcaccaactttagcctggaacttccaaatgacaacatgatttgggaactgagcctcagggtcctcagcctatcccctggagcttggatactgtctgcacttcaaggcaggaattctcaagggagacttgtttgaaaatgagtgtctcactttcccaccctatccttcctccccactctgtggacttgaaattgaatccattacggttggggatgggaggctgtctgtgtcccgacacataatctctgtctcttggacctgccaccatcactttctgggtcaggattggaattgggatggaatgggacagttgtctataaaactctagtgtaaatattagcactcccctccctcatcttttcttctatttcactccccatttattttcttctacaccggttgtatttttaattttggacttcccctattgggcatggcagctcaaaggtggagtactagagcctggccaagtgaggaaggaaagcagaaaggtgacgattctcactcacctcttttgtttttaataatatcggccgctgtttgtacagacagcctgcgtgttgtaaataaagcagagtgggctcttttgtgtttata

SEQ ID NO: 1914 - DNA, 242 bp, Homo sapiens
tcacgaggtcaggagatcgagaccatcctggctaacacggtgaaaccccgtctctactaaaaatacaaaaaattagccgggcgaggtggcgggcgcctgtagtcccagctactcgggaggctgaggcaggagaatggcgtgaaccccagggggcggagcctgcagtgagccgagattgcgccactgcactccagcctgggcgacagcgagactccgtctcaaaaaaaaaaaaaaaaaaaggc

SEQ ID NO: 1915 - DNA, 5754 bp, Homo sapiens
aagaccatcctggctaacacggtgaaaccctgtctctactaaaaatacaaaaaattagctgggtgtggtggcgggcgcctgtagtcccagctactctggaggctgaggcaggagaatcgcttgaacccaggaggcggaggttgcagtgagccgagatcgcgccactacactcagcctgggcgacagagtgagactccgtctcaaaaaaaaaaaaaaaattacttagacatggtggcacattcctttaatcccagctacttgggaggctgaggcaggagaatcgcttgaacccaggaggtggaggttacagtgagccgagatcgcaccactgtgctccacactccagcctgggcaacagagtgaaactctgtctcaaaaaaaaaaaaaaaaaaaaaaaaaaggaataaaggggatgggtttgacatctgacaaaatgctgctgctgccatccgcttctgcaaaacctcaagaatgaaatgtccttcccatggcccacacgaggccctgcacgagctgcttcatccccttccaaacctcctctcctctctcttcccctcctcactctgctcagacacacgggcctcctcactgttcctccaacacgccacgtgtggtctgccccagggcctttgcacaggccatgcctctgcctggaacacctgcccccagattctcctatggctgacttctcacacttgggtcttagtgcatgcatcacctcctcagggagggccccctgcccacccccagtgaatctagccccattcaggacagtcatctttattatgcactgattgtatactaagcccagagacttcaactgtggtttctttttcatcctcccaataaatccatccatccatccgttcactcagacatgaaattctggaccctccaattcaggatctgggccacccagtgcctagcttttttttttttttttttttttttttgccgacagagtttcattctgtcacccaggctggagtgcagtggtgcaatctcagctcactgcaacctccgcctcccgggttcaagcgattctcctgcctcagcctcccgagtagctgggattacaggtgtgccaccacgcccggctaatttttgtatttgtagtagagacggggtttcaccatattggccagactggtcttgaacacctgacctcaggtgatctgccctcctcagcctcccaaagtgctgggattactacaggcatgagccactgcacccgtcagcctacttcttgtgttcattcattcattcattcattcattcatcattcagcaaatgtctatgagcgcctactctgagccactgaaccagctgggctggccctgggggagaatcgacttcccctgcaaattcactctcatcagatccccaggctggtctaggattgtttagatgccctcacgttggggaactcattccttactaagaataaccaccaccaataccaaacagtctcaagtaccaccaatagtgctgagttctcagggtgactacagcatctgctcccaagcccagcccagcccatatggtgtgtgctgtgtcaaagaacctgggttcaaatcccatgtccttttctaacccttggacaagcccctacccattttgtgcctcggtttccctagctgtaaaatggagatagtagtgcctctcttgtgggctcagcaccaggcctgttacacagctggtgcttaataaatgtgtcctgttacttaaggtctgatatgtgtagctcctgtcgtcgccgtccatgggggtgagtggggtggggaaggggtggtttgagtttctgcacatcaggacacgaggcgcggtccatgcaaatgaaatgcaaatcccatgcaaataaatctctgggtggtgcaaggctggaggtacaaggtgcacgcatttggggggcgcctgggaaccccatgaatcgagcccaggcccggaggtgctgacccgcatccagcccggctttcagtgctcggtgtaaatgtttacacctggccggccgccaggctccacgccgccccacactaggcagccaggagggggaatgtaaactcgggctgggggccgcgggacgctcgggaggagcccagacggagtcgagtgtggtgggtgtgtacacgtgagttattaaacaccgactgtatgcagtgaggaggatgccaccaggcactcacagcaccaagtaactggtgcccgaatgggtaaagctcagggcattcctgggggcccactagcgcccctgcaccagccagaggttgaagtgaatagggtaggcagccatggaaggctccctggaggaggcaccctccaaggtgagattgcaaggggagtgagagctaggtacatgtgacttcacagcctgtaatcgccagctctttgggaggccaaagtggaaggatccttgagcccaggagtttgagaccagcctgggcacgttgtgagattcccctctctattaacaaaaacaaaaacaaaaaaaattaaaaattagccaggcatggtggctcatgcctgtagtcagtcctagctacttgggaggctgaggtgggaggatcgcttgagcctaggaggtggaggctgcagtgagctgtgatcacaccactgcactccagcctgggtgacagagcaagaccctgtctcaaaaaaaaagaaagagagagagaaagaaagaaaggaaagaaaggaagagaaaagaaagagagaagaaaaaggaaagaaagagagagagagagaggaggctgggtgcggtggctcatgcctgtaatcccagcactttgggaggccaaggtgggcggatcacttgagttcaggagcttgagaccagcatagctaacagggagaaaccctgtctctattaaaaatacaaaaattagccagtcatgctggcaggtgcctgtaatcccagctactcagggggctgaggccggagaatcgcttgaacccgggaggcagaggttgcagtgagctgagattgcgccactgcactccagcctgagggacaagagtgagactccatctccaaaagaaaaaaagaaaaagagaaagaaaggggagtgggagtggggagggagggaagaagtgttctccatgcaaggacctatctgtgcaaaagcccagagctgggactccatgtccagggcagctctggtccattgctgcccacttctgggcctgcttatccatctggatgggaaacaggctcagagaggggcagagtcaatggaggacaccagcatgtagggaacagtgtcagccccagattcctgcctccagactgtcctaaacaccaccctccccgcgcctttgtcccacactgccacctgccgggaatgacctctcctcctttcactcttccccctggctcctcagctgcagccgctccggcctccttgctgttcctgggatacgccacactcagtctggcctcggggcctttgcactggctgtgtcccctgcctgtgatgccattctcctctgcctggccaactcctacgtttattcaagtctggaccttgtcatcggctcctcaggaaggcactccgggacccccagatgggggcggttccctgtgactcctggcacggaggccaaccccttccttgttcaatggttccttgagggaccattcccatgtgattatcgaccattcggcaggcgttcaaagtcaaaggccccacactgagtcctggcccagcgccctgtgcccgttggctgctggagggacagacggggcgtgcggctgaccatcccgtgcccgcaggctgaggatgcagcgctggaaggcggcggccttggcctcagtgctctgcagctccgtgctgtccatctggatgtgtcgagagggcctgcttctcagccaccgcctcggacctgcgctggtccccctgcaccgcctgcctcgaaccctggacgcccggattgcccgcctggcccagtgtaagctcctcctctgtgtggggtcagatacccccaacgtaaggggtagaatttcaggcagtggagtgggaggtggggggggtgtcataggttttttaaagatagggccagccagcccccttgcagggaggcagggacagacatcctaaaagattattcagggcaaggcatggtggcgcctgcctataatcccagcactttgggaggctgagacaggaggatctcttgagcccaggagttcatgaccagccagggcaatgtagcgagaccgccatctctacaaaaaacttcagaaattagccaggtgtagtggcgcacgcctgtagttccagctacttgggaggctgaggtgggaggatcacttgagcccaagagttcaaggctgcattgagctatgattgcaccactatactccagcctgagcaacagagcaagattctgtctcaaaacattataataataaatacattttctaaaaaaagatggggtggagggaggttgcaaattcccccaatggcctggtggagctagggtgacttctgggaactggggtctttcggctcagctgtcacaaggaattaggctctgccctgaggtcccgtgggggccagatggagattagacctgggcattcgcctggttggcccccgcggcgcagcagggggggcggtgggaggagagagaggctggatctgaggtcccagtgacctgccccaggggacagggaccaaggggaggcgggagatggagcaggagctaaaaaccggaagaaaggcccagagattcgaaggggtgaggaggggtggagagaggagagacggggctgggggcacagacacgggcaaaagtgctgctatagggacacagaaatgcccaccctgagggcaagaccctcgcccaactccccaccaatccctaatgcctgccccaccgcaggtgctgtggggtgagggtggtgcgtgggccctgacccctgtgcccacgcacatgtccatgcgtgcgcctgcgcgggcatctgaggcgtggatgccggcagggtgcgtgtgcagcgcctttgggtgtgggccacgagtacgcccatgtgcgcgtctgcgcccgcccctgccagcccacacaatcctcttttcttgtccttacaatgcacaagggtggcctccagcacgagctccacttctgtcctcccaccacttccctctctgcaagcggcgtgaagtccttcctaggactctgggacagagacccgggcgggacccccaaaatccagtgctccaggacttggggtgcggggggcaaagcacgaatggaggaatttcaggcactgcggagggtcagggcccatgggcgggtgcctgtctgccctactgcaaaaagcgagtggccactgactccccaagtccccatgttctaggctcctggtggaatttcaggctggggaccttgtgttctagcccctgtgcaagcagccagcccccgttgcagggaggcagggacagacatcctaaaagatgattcattgttgccaggtgcggtggctcacgcctgtgatcccagcactttgggaggccgaggtgggcggatcacgaggtcaggagatggagaccattctggctaacactgtgaaaccctgtctctactaaaattacaaaaaaattagccgggcgtggtggcgggcgcctgtagtcccagctactcgggaggctgaggcgggagaatggcgtgaacccgggaggcggagcttgcagtgagccgagatcgcgccactgcactccagcctgggcgacagagcgagactccgtctcaaaaaaaaaa

SEQ ID NO: 1916 - DNA, 294 bp, Homo sapiens
gcgcggtggctcacgcctgtaatcccagcactttgggaggctgaggcgggcggatcacgaggtcaggagatcgagaccatcctggctaacacggtgaaaccccatctctactaaaaatacaaaaaattagccgggcgaggtggcgggtgcctgtagtcccagctactcgggaggctgaggcaggagaatggcgtgaacccgggaagcggagcttgcagtgagccgagattgcgccattgcactccagcctgggtgacagcgagactccgtctcaaaaaaaaaaaaaaaagaagt

SEQ ID NO: 1917 - DNA, 196 bp, Homo sapiens
  misc_feature (106)..(106): n equals a,t,g, or c
tctactaaaaatacaaaaaattagccgggcgtagtggcgggcgcctgtagtcccagctacttgggaggctgaggcaggagaatggcgtgaacccgggaggcggacntgcagtgagccgagatcccgccactgcactccagcctgggcgacagagcgagactccgtctcaaaaaaaaaaaaaaaaaaaaaagaaata

SEQ ID NO: 1918 - DNA, 100 bp, Homo sapiens
ctgaggcaggagaatggcgtgaacccgagaggcggagcttgcagtgagccgagatcgcgccactgcactccagcctgggcgacagagcgagactcccctt

SEQ ID NO: 1919 - DNA, 2364 bp, Homo sapiens
ctcactcctgtaatcccagcactttgggaggccgaggcgggcggatcacgaggtcaggagatcgagaccatcctggctaacacggtgaaaccccgtctctactaaaaatacaaaaaaaaaattagccgggcgtggtagcgggcgcctgtagtcccagctactcgggaggctgaggcaggagaatggcgtgaacctgggaggcggagcttgcagtgagccgagatcgcgccactgcactccagcctgggcgacagagcgagactccgtctcaaaaaaaaaaaaaaaaaaaaaaaagaataaagtataagagaacatgagtgaatgcctgtcatctttttttttttttcttcaaaaacagggtctcactttgtcacccaggctgcagtgcagtggcgcaatcatggctcactgcaacctctagcacctgggctcaagagctcaagaggtcctaccaactcagcctcccaaggagctgggactacaggtgcatgccaccacaccctaaggtaaatttttgtgtttttatagagacaggttttaccatgttgcccaggctgttctgaaactcctgggcttaagggatcgacccacctccatctcccaaggcactgggattataggcatgagccaccgcgcctggcctatcatcatttattcatttattcatctatgcaaaaatattctttgagtgcctaattgctaagcaatgggacaagcactggcaagtcacactggcaaaatatcatcccgccactcaaggagcttataggtcagctggggagacaaagaagaacatgggcccttgtaatgagctaagtatggtgctaggggaaatatccataagttatgggaacccagaggaattcattcatttattcgtttagtaaatatttatgtgccaaactcttgggacccaatggtgacctaagcagacaagacacatccacctacagtgtttacagagtagtgtgggagacagacattaatgaaatgctcttacagacctatcattacctattgtcatatgagttatgaaagaaaaataacaggccgggcatgatggctcacgcctgtaatcccagcactttgggagaccaaggcaggtggatcacttgaggtcaggagttcaagaccagcctggccaacatgatgaaaccccatctctactaaaaatacaaaaaaaaaaaaattatctgggcatggtggcaggcagctgtaatcccagctactcgggaggctgaggcaggaaactcgcttgaacctgggaggcagaggttgcactgagctgagattgcaccactgcactccagcctgggtgacagagcaagactctgtcaaaaaaaaaaaaaaaaaagaaaggaaggaaaggaaggaaggaaggaaggaaggaaatagagtgtaagaggggggcctagtgtagtctaagatgactcaggagaagctgtttgagctgatgcctgaagacgggttgcatgtaagtagttgagtaggtaaaagagaggggtactatcatatcagggattcgggagaaaaaaaaagagagagagagaggggaagagtgctgtggacccattgagctccagcccagctccaactctgtgggtcaggaaagactttccagcatctaagctgagtccagaaggatgagtaggagtgagccagctgaggaggagctggggtggaaggaaagcattccagagcagcagatagcttgtgcaaaggcacacaggcagctgggtgtggtggctcacacctgtaatcccagcactgtgggaggccaagatgggtggaccgtttgagcccaggaattcaagaccaacctggatgacatagtgaaaccctgtctctaccaaaaaaaaaaaaaaaaaaattgaaaaaaaaaaagaagctgggcatggtggcgtgcacctgtggtcccagctacccaggaaactgaggtgggagggaagtcgaggctgtagtgaaccatggtggcaccattgcattccagcccgggtgacagagcaaggccctgtacaaaaaaaaaaaaaaaaaaagcatggaggcaacagaacatagtggattggaaggaaaaacaagtggttcagaccaggtgcagtggctcatgcctgtaatcccagcactttgggaggccgaggcgggcagatcacgaggtcaggagatcaagaccatcctcgctaacacagtgaaaccccgtctctactaaaaatacaaaaaaattagccaggcgtggtggtgcgtgcctgtagtcccagctactcaagaggctgaggcaggagaatggcgtgaacctgggaggcagagcttgcagtgagcggagatcatgccactgcactccagcctgggcgacagagcaagactcca

SEQ ID NO: 1920 - DNA, 5755 bp, Homo sapiens
aagaccatcctggctaacacggtgaaaccctgtctctactaaaaatacaaaaaattagctgggtgtggtggcgggcgcctgtagtcccagctactctggaggctgaggcaggagaatcgcttgaacccaggaggcggaggttgcagtgagccgagatcgcgccactacactcagcctgggcgacagagtgagactccgtctcaaaaaaaaaaaaaaaattacttagacatggtggcacattcctttaatcccagctacttgggaggctgaggcaggagaatcacttgaacccaggaggtggaggttacagtgagccgagatcgcaccactgtgctccacactccagcctgggcaacagagtgaaactctgtctcaaaaaaaaaaaaaaaaaaaaaaaaaaggaataaaggggatgggtttgacatctgacaaaatgctgctgctgccatccgcttctgcaaaacctcaagaatgaaatgtccttcccatggcccacacgaggccctgcacgagctgcttcatccccttccaaacctcctctcctctctcttcccctcctcactctgctcagacacacgggcctcctcactgttcctccaacacgccacgtgtggtctgccccagggccttggcacaggccatgcctctgcctggaacacctgcccccagattctcctatggctgacttctcacacttgggtcttagtgcatgcatcacctcctcagggagggccccctgcccacccccagtgaatctagccccattcaggacagtcatctttattatgcactgattgtatactaagcccagagacttcaactgtggtttctttttcatcctccccaataaatccatccatccatccgttcactcagacatgaaattctggaccctccaattcaggatctgggccacccagtgcctagcttttttttttttttttttttttttttgcgacagagtttcattctgtcacccaggctggagtgcagtggtgcaatctcagctcactgcaacctccgcctcccgggttcaagcgattctcctgcctcagcctcccgagtagctgggattacaggtgtgccaccacgcccggctaatttttgtatttgtagtagagacggggtttcaccatattggccagactggtcttgaacacctgacctcaggtgatctgccctcctcagcctcccaaagtgctgggattactacaggcatgagccactgcacccgtcagcctagcttctttgtgttcattcattcattcattcattcattcatcattcagcaaatgtctatgagcgcctactctgagccactgaaccagctgggctggccctgggggagaatcgacttcccctgcaaattcactctcatcagatccccaggctggtctaggatttgtttagatgccctcacgttggggaactcattccttactaagaataaccaccaccaataccaaacagtctcaagtaccaccaatagtgctgagttctcagggtgactacagcatctgctcccaagcccagcccagcccatatggtgtgtgctgtgtcaaagaacctgggttcaaatcccatgtccttttctaacccttggacaagcccctacccattttgtgcctcggtttccctagctgtaaaatggagatagtagtgcctctcttgtgggctcagcaccaggcctgttacacagctggtgcttaataaatgtgtcctgttacttaaggtctgatatgtgtagctcctgtcgtcgccgtccatgggggtgagtggggtggggaaggggtggtttgagtttctgcacatcaggacacgaggcgcggtccatgcaaatgaaatgcaaatcccatgcaaataaatctctgggtggtgcaaggctggaggtacaaggtgcacgcatttggggggcgcctgggaaccccatgaatcgagcccaggcccggaggtgctgacccgcatccagcccggctttcagtgctcggtgtaaatgtttacacctggccggccgccaggctccacgccgccccacactaggcagccaggagggggaatgtaaactcgggctgggggccgcgggacgctcgggaggagcccagacggagtcgagtgtggtgggtgtgtacacgtgagttattaaacaccgactgtatgcagtgaggaggatgccaccaggcactcacagcaccaagtaactggtgcccgaatgggtaaagctcagggcattcctgggggcccactagcgcccctgcaccagccagaggttgaagtgaatagggtaggcagccatggaaggctccctggaggaggcaccctccaaggtgagattgcaaggggagtgagagctaggtacagtgactcacgcctgtaatcccagctctttgggaggccaaagtggaaggatagcttgagcccaggagtttgagaccagcctgggcaacgttgtgagattcccctctctattaaacaaaaacaaaaacaaaaaaaattaaaaattagccaggcatggtggctcatgcctgtagtcagtcctagctacttgggaggctgaggtgggaggatcgcttgagcctaggaggtggaggctgcagtgagctgtgatcacaccactgcactccagcctgggtgacagagcaagaccctgtctcaaaaaaaaagaaagagagagagaaagaaagaaaggaaagaaaggaagagaaaagaaagagagaagaaaaaggaaagaaagagagagagagagaggaggctgggtgcggtggctcatgcctgtaatcccagcactttgggaggccaaggtgggcggatcacttgagttcaggagcttgagaccagcatagctaacagggagaaaccctgtctctattaaaaatacaaaaattagccagtcatgctggcaggtgcctgtaatcccagctactcagggggctgaggccggagaatcgcttgaacccgggaggcagaggttgcagtgagctgagattgcgccactgcactccagcctgagggacaagagtgagactccatctccaaaagaaaaaaagaaaaagagaaagaaaggggagtgggagtggggagggagggaagaagtgttctccatgcaaggacctatctgtgcaaaagcccagagctgggactccatgtccagggcagctctggtccattgctgcccacttctgggcctgcttatccatctggatgggaaacaggctcagagaggggcagagtcaatggaggacaccagcatgtagggaacagtgtcagccccagattcctgcctccagactgtcctaaacaccaccctccccgcgcctttgtcccacactgccacctgccgggaatgacctctcctcctttcactcttccccctggctcctcagctgcagccgctccggcctccttgctgttcctgggatacgccacactcagtctggcctcggggcctttgcactggctgtgtcccctgcctgtgatgccattctcctctgcctggccaactcctacgtttattcaagtctggaccttgtcatcggctcctcaggaaggcactccgggacccccagatgggggcggttccctgtgactcctggcacggaggccaaccccttccttgttcaatggttccttgagggaccattcccatgtgattatcgaccattcggcaggcgttcaaagtcaaaggccccacactgagtcctggcccagcgccctgtgcccgttggctgctggagggacagacggggcgtgcggctgaccatcccgtgcccgcaggctgaggatgcagcgctggaaggcggcggccttggcctcagtgctctgcagctccgtgctgtccatctggatgtgtcgagagggcctgcttctcagccaccgcctcggacctgcgctggtccccctgcaccgcctgcctcgaaccctggacgcccggattgcccgcctggcccagtgtaagctcctcctctgtgtggggtcagatacccccaacgtaaggggtagaatttcaggcagtggagtgggaggtggggggggtgtcataggttttttaaagatagggccagccagcccccttgcagggaggcagggacagacatcctaaaagattattcagggcaaggcatggtggcgcctgcctataatcccagcactttgggaggctgagacaggaggatctcttgagcccaggagttcatgaccagccagggcaatgtagcgagaccgccatctctacaaaaaacttcagaaattagccaggtgtagtggcgcacgcctgtagttccagctacttgggaggctgaggtgggaggatcacttgagcccaagagttcaaggctgcattgagctatgattgcaccactatactccagcctgagcaacagagcaagattctgtctcaaaacattataataataaatacattttctaaaaaaagatggggtggagggaggttgcaaattcccccaatggcctggtggagctagggtgacttctgggaactggggtctttcggctcagctgtcacaaggaattaggctctgccctgaggtcccgtgggggccagatggagattagacctgggcattcgcctggttggcccccgcggcgcagcagggggggcggtgggaggagagagaggctggatctgaggtcccagtgacctgccccaggggacagggaccaaggggaggcgggagatggagcaggagctaaaaaccggaagaaaggcccagagattcgaaggggtgaggaggggtggagagaggagagacggggctgggggcacagacacgggcaaaagtgctgctatagggacacagaaatgcccaccctgagggcaagaccctcgcccaactccccaccaatccctaatgcctgccccaccgcaggtgctgtggggtgagggtggtgcgtgggccctgacccctgtgcccacgcacatgtccatgcgtgcgcctgcgcgggcatctgaggcgtggatgccggcagggtgcgtgtgcagcgcctttgggtgtgggccacgagtacgcccatgtgcgcgtctgcgcccgcccctgccagcccacacaatcctcttttcttgtccttacaatgcacaagggtggcctccagcacgagctccacttctgtcctcccaccacttccctctctgcaagcggcgtgaagtccttcctaggactctgggacagagacccgggcgggacccccaaaatccagtgctccaggacttggggtgcggggggcaaagcacgaatggaggaatttcaggcactgcggagggtcagggcccatgggcgggtgcctgtctgccctactgcaaaaagcgagtggccactgactccccaagtccccatgttctaggctcctggtggaatttcaggctggggaccttgtgttctagcccctgtgcaagcagccagccccgttgcagggaggcagggacagacatcctaaaagatgattcattgttgccaggtgcggtggctcacgcctgtgatcccagcactttgggaggccgaggtgggcggatcacgaggtcaggagatggagaccattctggctaacactgtgaaaccctgtctctactaaaattacaaaaaaattagccgggcgtggtggcgggcgcctgtagtcccagctactcgggaggctgaggcgggagaatggcgtgaacccgggaggcggagcttgcagtgagccgagatcgcgccactgcactccagcctgggcgacagagcgagactccgtctcaaaaaaaaaa

SEQ ID NO: 1921 - DNA, 183 bp, Homo sapiens
gaaaaatttagccgggcgtggtggcgggcgcatgtagtcccggctactcgggaggctgaggcaggagaatggcgtgaacccgggaggcggagcttgcagtgagccgagatggcgccactgcactccagcctgggcgacagagcgagactccgtctcaaaaaaaaaaaaaaaaataataatgaa

SEQ ID NO: 1922 - DNA, 292 bp, Homo sapiens
tggctcaagcctgtaatcccagcactttgggaggtcgaggcgggcggatcacgaggtcaggagatcgagaccatcctggctaacacggtgaaaccttgtctctactaaaaatacaaaaattagccgggcatagtggcgggcgcctgtagtcctagctactcgggaggctgaggcaggagaatggcgtgaacccgggaggtggagcttgcagtgagctgagattgcgccactgcactccagcctgggtgacagagtgagactccgtctcaaaaaaaaaaaaaaaattaaaaaa

SEQ ID NO: 1923 - DNA, 181 bp, Homo sapiens
caaaagttagccgggcgtagtggcgggcgcctgtggtcccagctactcgggaggctgaggcaggagaatggcgtgaacccgggaggcggagcttgcagtgagccgagatcgcgccactgcactccagcctgggtgacagagcgagactccgtctcaaaaaaaaaaaaaaaaaaaaaagatt

SEQ ID NO: 1924 - DNA, 123 bp, Homo sapiens
aggcaggagaatggcgtgaacccgggaggcggagcttgcagtgagccgagatcccgccactgcactccagcctgggcgacagagcgagctccgtctcaaaaaaaaaaaaaaaaaatgctgtta

SEQ ID NO: 1925 - DNA, 270 bp, Homo sapiens
tgggaggccgaggcaggtggatcacgaggtcaggagatcgagaccatcctggctaacacggtgaaaccccgtctctactaaaaatacaaaaaattagccgggcgtggtggcgggcgcctgtagtcccagctactcgggagactgaggcaggagaatggcgtgaacccgggaggcggagcttgcagtgagccgagatcgcgcccctgcactccagcctgggcgacagagcgagactccgcctcgaaaaaacaaaaacaaaaacacaaagtc

SEQ ID NO: 1926 - DNA, 303 bp, Homo sapiens
ggttgggggctgcggccttgcgggctgcgcgagctggaggtgcgcgtgagcgagctgggcctgggctacgcgtccgacgagacggtgctgttccgctactgcgcaggcgcctgcgaggctgccgcgcgcgtctacgacctcgggctgcgacgactgcgccagcggcggcgcctgcggcgggagcgggtgcgcgcgcagccctgctgccgcccgacggcctacgaggacgaggtgtccttcctggacgcgcacagccgctaccacacggtgcacgagctgtcggcgcgcgagtgcgcctgcgtg

SEQ ID NO: 1927 - DNA, 8680 bp, Homo sapiens
cctcagcggccgggcccacggccccgagcagccatgctgggcgcgcgggcctggttgggccgcgtccttctgctgccccgcgccggtgcaggcctcgccgcgagccgcaggtacgggcgggcgagcgggcccctagggcactccctgcgcctgcctgcgggcccagtggagggtcttccggacaccggtccccagtgccagtctggaccacccctgcatgcctggcccttcccccacccccacctccggtctgctcctgagacctggctctggctgtaaggccctcctcccctcctctcccgtcctcatcccttccctcctctccccttccttccagtgcagtgccagctcctcagggactgttctgacactgcttccaggaagccttccttgcaccccagtgctggatgctgggtcaagggcctttctccaatagtaccctgtgccctgtcacagtcctttattgctgcatggacctttcgttatttaggtctgcctgcagtcccacttccaggctgaactccctgaggtctctgattccctaggtgtcctggagtctggcccaggacctggccccacaggagtcccagcaggtgggcgctgagtgagggagtccccatgtctggtttcctctgtttgtccctcacctggtcgagtcccagaccctactgatcttggcctgtccagccaccaacagtaggctgccttccagtggggccacacccaggcctgccagagagatgcctccaagcagctgctccaggaagggccgggggaggggcctggggaggggtaagaatggagccccaagaaccattctgcccattgtgacccgccctgacctcacagccatccttcccaccgccaggcccaggaggttgggggagactaacctggcaaggagcccccaatgagccacctctcctcaccccccaaaaaacataagggggagcacaaaggccacagtctcccccatggttcagaaaggtgggttgggctgggagcaggggtcctactggggtgctgagtgaaatggagcaggtgctggggggcctgggagaaggtgggtggaggcccctggcttgcctgatgcaccagtcctcgccaggggtagctcctcccgggacaaggaccgaagtgcgacggtcagtagttcagtgcccatgcctgctggagggaaaggaagccatccttcatctacaccccagagggtccccaaccgcctgatccacgagaagtcaccatacctcctacaacatgcctacaatcctgtggactggtgagcacctctcctggggccctgcctggaatcgctggggtcctgggcccctcccagaccccctgggctactgagtgatgccccaccctgctgggtctaggtacccctggggacaggaagccttcgacaaggccaggaaggaaaacaagccgattttcctctcaggtaatgctcccaccttccctgatgtgggggtgtgggcagggagtggcagtggatgggggagggtcctctcggcctggcgggtcttccaggagactagaggccaggacgtcttccatgtagccagggccacttggccagcctccctctgacccgttgctggccccctgacctctccccatggccctgttcagtcgggtactccacctgccactggtgccacatgatggaagaggagtccttccagaatgaggagattggccgcctgctcagtgaggactttgtgagtgtgaaggtagaccgtgaggagcggcctgacgtggacaaggtgtacatgacgttcgtgcaggtgagcagccctcctcgggagtgtatgcgccacatgggctcagagcagctcccctcaccctcgccctctctccgccaggccaccagcagcggcgggggctggcccatgaatgtgtggctgactcccaacctccagccctttgtcgggggcacctatttccctcctgaggatggcttgacccgagtcggcttccgcacagtgttgctgagaatacgagaacaggtgggtgtgcctccgggagttgggggaccagggtgggggactaggaaacaagagcccctccccctagctgacctccaggtgtgcccccacctcccgcagtggaaacagaacaagaacaccctgctagaaaatagccagcgtgtcaccactgccctgctggcccgatcagagatcagcgtgggtgaccgccagctgccgccctctgccgccaccgtgaacaatcgctgcttccagcagctggatgagggctatgatgaggaatacggtggcttcgctgaggcccccaagtttcccacgccgggtcagtgccccacgcccgccttagcccaggctttggccttctgattcctatgctggtcagggacctactggctcctggcctcacccatagcttcctgtcctcctgactggcagtgacctccttgcccctagcctgtcggtagctatcggtgaagacccgactgctggtgtcagcagtgaccctctcaccttaacctagatgatgaccttctgtcccctgacttggtcagttacccagtgaccctgacttggctaatgacattctgggctctagggggacaagtaacttactggtcctctgtgaaccaatgatattctgacctctggcttaggctattaccttctgtcctgtgggttgactcttgacctcacagcctgtccagagactgcctgttgagtgaactcccagcctctgcctggcccaaggcctcctgaccaccccgatctctgtccccactttcccattctctcacctgcatgttcttggtgcccccacagtgatcctgagcttcctgttctcctactggctcagccatcgactgactcaggatggctctcgggcccagcagatggccttgcataccctgaaaatgatggctaacgggggcatccgggaccatgtggggcaggtgacgggcactgggtgttccctggaggggcagcagggggctgtggggtggggcagaagctgggactggcctccagctttgtatccgcacagggctttcaccgctactccacagaccgccagtggcacgtccctcactttgagaagatgctctatgaccaggcacagctcgctgtggcctattcgcaggccttccaggtgacccctgaccccagcccagagaacaggcatctcactctggctgcccctcccaaggccttcctggtgactgtggcttctcttaatctgaatcccctgttccctcccatgtacccactacccaggcttccctcccccgcctgcctcagagaatgttgccaccttccacctgggcctccccagtgacctctctgttcacagtctcctttcttccctttcttagctctctggtgatgaattctactctgacgtggccaaaggcatcctgcagtacgtggctcggagcctgagccaccgggtgtgtgtccatggtggcaggcaggcctggctgtgggaggggttggggcctccactgccctgtgggccggggccagccaactctcccctccccacagtccggaggcttctatagcgcagaagatgcagactcgcccccagagcggggccagcggcccaaagagggcgcctactatgtgtggacggtcaaagaggttcagcagctcctcccggagcctgtgttgggtgccaccgagccgctgacctcaggccagctcctcatgaagcactacggcctcacagaggctggtaacatcagccccagtcaggtgaggacttctggggtcacctgacgggccctggtgcctgccaggcgtgtgagctcgcagacaaaggccattctcctcaggaccccaagggggagctgcagggccagaatgtgctgaccgtccggtactcgctggagctgactgctgcccgctttggcttggatgtggaggccgtgcggaccttgctcaattcagggctggagaagctcttccaggcccggaagcatcggcccaagccgcacctggacagcaagatgctggctgcctggaatggtggggcagcacacctgagaccgagcctgtctgtaggatcccccttcacaaagcccctgtctttccggcagcggctaaatgctcactctcccttgattagcgttattattctcagttgacaaaagaggcttaaggagcttgagtaacccgcccaaggtcacgcgcaagggctgggaaccccgccatgtctggctttggagcccaagatcttagggatcacccatggctccagggaggtgttggggcctaaggtgatagggtggacatgcctggagggtcctggccagcttcttaccactacttgtctctcctggctccaggcttgatggtgtcaggctatgctgtgactggggctgtcctgggccaagacaggctgatcaactatgccaccaatggtgccaagttcctgaagcggcacatgtttgatgtggccagtggccgcctgatgcggacctgctacaccggccctggggggactgtggagcacaggttgggggctgggtagaccgggagggcccgtctccccaacgcgtccccagcctacctctgccctacttctcccctccatgtggactccagtcctggctctgccaggtgcttgctgtgagtttgtagcttccctgggcccatttactcatctgggaagtgggctgatggcacctgcccaagagggttcatctggagggttaagtgaacaaatgcgtgaaagggcctcctctgggaaaggccctctctcctggggctctccccagcccctcccgtaatgcctgtcccccagcaacccaccctgctggggcttcctggaggactacgccttcgtggtgcggggcctgctggacctgtatgaggcctcacaggagagtgcgtggctcgagtgggctctgcggctgcaggacacacaggacaagctcttttgggactcccagggtggcggctacttctgcagtgaggctgagctgggggctggcctgcccctgcgtctgaaggacggtcagtgggggtgcagggctagtctggggtcctgggaggtgtaagtgcagcgtgggtgaagagctggtgtgggcaggagccctcctggctttgtgtctctgctacttattaatggcgtgatttttggctgctgtaatatttctgtgtctcaatttcttttttttaaatagagacagagtcttgctatgttgcccaggctgatcttgaaatcctgggctcaagtgatcctcccacctcggcctcccaaagtgctgggattacaggcatgaaccactacactcagcgtgttttgtttcgttcctttcttttctttttatttcctttctctttctttctttctctttcctttcttcctttctttcttttctttctctctttctttctcttttttttttttttttgagacagggtctcactgtcacccaggctggaatgcagtggcatgatcttggctcacagcaacctctgcctccggggctgaatcaattctcccacctcagcctcctgagtagctaggactataggcatgcaccaccatgcctggctaattttttgtagagatgggatttctccatgttgcccaggctggtctgaaactactgggctcaagtgatctgcccacctcggcctcccaaagtgctgggattacaggcgagagccaccatgcctggcctgtttcttaataagtaaaatggagctaacattggtactaccttacagggttgatgtaaagatgaatgtagctgttctgtaaacatgcttagcacagtaactgacacccatggattcagatattgaccaaggctcacttggtctctgccctcatgaagcttacagtatggtaggggagacagcgaaaatgcagtaatgatgcaaaaacacatgcacaaatgtgcagttaaaattgtggtgagtgccatgaagaagtaggacgctctatgtgtgcctgctccctatcacccatgtgccttgtctgtggttaaaggtttctttcccaaaactcaaattttagctcctcaaagatcaggactttctgccactgttgtatccccagggtctagtgtggttctggcacattgtaagtgcttaataaatgttaactgagtgaatgaaagggccttgggagagaaccacagaggaggaccaactcagcctagggagagattagaggacacctgtgacaggtgtcatttaaccaaggcctggagggaaagaggggccatgtggccatggagaagctgtggagagagttcaggcatagggagcagtgcatgacaggcctggtgcaggcagcctgtatcctggaggacaggcagggcccgcgtgttccaggagggcaccgaggagaatgctgaggccggcagggcacggaagccgtcttttttttttttttttcctaagaaaagaaggctggtctcaaactcctgggctcaggtgatcctcccgcctcggcttcccaggtgctgggactacaggtgtgagccaccatgcccggctggcaaggaggttttaagtggattgtgatctgctctggtatggttttaaggaggtcactctgaccactgatggagagaagtgggggtgggggaaacaggcgaccagttaggaggccattactcgtgttcagtccaggcaggcattggtgaaggctcagaggatgtggaagtatgagatggggagacatggtgagatttggatctcttctggccacagccctggcaagactcacagatggattagaagcggagggagagggagaggaaggggacaggatgatgccgctctagcttgagcagctgagtggctggacagaggcatcagcagcgaggagggagcctggagaccaacagttgaggctaggacaggtagagtggagggtgccataaaaaagacagcaaagtactgataactgctggagtggcatccacacccagagcggggaaggggcaggatgggcagggccttttctctgtcccgtcccccaagtggccctggatacagtcctgggcagggtcctgggactcagtgacctgcccttacccccaccccctgcctccctatgtgctgtagaccaggatggagcagagcccagcgccaattccgtgtcagcccacaacctgctccggctgcatggcttcacgggccacaaggactggatggacaagtgtgtgtgcctattgaccgccttttccgagcgcatgcgtcgtgtcccggtggcgttgcccgagatggtccgcgccctctcagcccagcagcagaccctcaagcaggtggggggtgagggcatctgggctgggacctcgggtaggagggaagttggggctgcgatggcagatgggaacagggggtggggttcctgggctgtccccagagctcaggtctgtgtgtgtgcaggcacgtggcctgtcagacagggaggcagaagttaatatgagtccgtggtggctgatgaagtgtttctctgtacgtcttggtgtcagtgtaattgcttctgtccatactgtgttactggtgtgtgtgtacttccgggtgtgtgtgaccctggaggtgtgtgtctgtgcacctacctttgagggggatgctggtgtgagtgtttgtctgtctgcatgtggatgccccatctgcaggtttgcctctgtgtctgcctgcatgcgtgtgtgtctggtgtttgtgtgtgtggtatctgcctctgtgtgggcatctactgtgtgtgtgtgtgtgtgtgtgtgtgtgtgtgtgtgtgtgtgtgtgactactctgtgtctgtctgaatgggtctctgtgtgctctgggtcttctgggtgtgtgtctccccatgtttgtatctgtaccattgtgtatatgtatgacatttccacttcggtattctcatgtgtgagtgtgtgtgtgtgttcccacttgccaagcattaactcatcctggcagctgagatgagtccctgttccttcttagagatatacggtggggcggaaggaggatggggaagccctggtggtctagggctcagccctccctcccctgacacaccggagtgacctttctattccggtcagatcgtgatctgtggagaccgtcaggccaaggacaccaaggccctggtgcagtgcgtccactctgtctacattcctaacaaggtacccatccctgtgagcccaatctgccacctccccagagctgccccctcccatcctcagctcctcaacatctccttcccctcagaatgttgggaagagggaacttcccagtgggcctttctaatgggcaggtgaccccaccccggcaggtgactctccctgctctgctgctgccctaggtgctgattctggctgatggggacccctcgagcttcctgtcccgccagctgcctttcctgagtaccctccgacggttggaagaccaggccactgcatatgtgtgtgagaatcaagcctgctcagtgcccatcactgatccctgcgaattacgaaaactactacatccatgactgccccaacccccttggggtggggcagaaggtgaagcatcccaactgactagagactcaggccctgcagggccctatagaacctgtggccatccctgagcaccctgccaccaggtgacctcggccatactcactgccccccttgggcacccactcaccctagaataaacttaacagtgtcccgtggtaa

SEQ ID NO: 1928 - DNA, 8677 bp, Homo sapiens
cctcagcggccgggcccacggccccgagcagccatgctgggcgcgcgggcctggttgggccgcgtccttctgctgccccgcgccggtgcaggcctcgccgcgagccgcaggtacgggcgggcgagcgggcccctagggcactccctgcgcctgcctgcgggcccagtggagggtcttccggacaccggtccccagtgccagtctggaccacccctgcatgcctggcccttcccccaccccacctccggtctgctcctgagacctggctctggctgtaaggccctcctcccctcctctcccgtcctcatcccttccctcctctccccttccttccagtgcagtgccagctcctcagggactgttctgacactgcttccaggaagccttccttgcaccccagtgctggatgctgggtcaagggcctttctccaatagtaccctgtgccctgtcacagtcctttattgctgcatggacctttcgttatttaggtctgcctgcagtcccacttccaggctgaactccctgaggtctctgattccctaggtgtcctggagtctggcccaggacctggccccacaggagtcccagcaggtgggcgctgagtgagggagtccccatgtctggtttcctctgtttgtccctcacctggtcgagtcccagaccctactgatcttggcctgtccagccaccaacagtaggctgccttccagtggggccacacccaggcctgccagagagatgcctccaagcagctgctccaggaagggccgggggaggggcctggggaggggtaagaatggagccccaagaaccattctgcccattgtgacccgccctgacctcacagccatccttcccaccgccaggcccaggaggttgggggagactaacctggcaaggagcccccaatgagccacctctcctcaccccccaaaaaacataagggggagcacaaaggccacagtctcccccatggttcagaaaggtgggttgggctgggagcaggggtcctactggggtgctgagtgaaatggagcaggtgctggggggcctgggagaaggtgggtggaggcccctggcttgcctgatgcaccagtcctcgccaggggtagctcctcccgggacaaggaccgaagtgcgacggtcagtagttcagtgcccatgcctgctggagggaaaggaagccatccttcatctacaccccagagggtccccaaccgcctgatccacgagaagtcaccatacctcctacaacatgcctacaatcctgtggactggtgagcacctctcctggggccctgcctggaatcgctggggtcctgggcccctcccagaccccctgggctactgagtgatgccccaccctgctgggtctaggtacccctggggacaggaagccttcgacaaggccaggaaggaaaacaagccgattttcctctcaggtaatgctcccaccttccctgatgtgggggtgtgggcagggagtggcagtggatgggggagggtcctctcggcctggcgggtcttccaggagactagaggccaggacgtcttccatgtagccagggccacttggccagcctccctctgacccgttgctggccccctgacctctccccatggccctgttcagtcgggtactccacctgccactggtgccacatgatggaagaggagtccttccagaatgaggagattggccgcctgctcagtgaggactttgtgagtgtgaaggtagaccgtgaggagcggcctgacgtggacaaggtgtacatgacgttcgtgcaggtgagcagccctcctcgggagtgtatgcgccacatgggctcagagcagctcccctcaccctcgccctctctccgccaggccaccagcagcggcgggggctggcccatgaatgtgtggctgactcccaacctccagccctttgtcgggggcacctatttccctcctgaggatggcttgacccgagtcggcttccgcacagtgttgctgagaatacgagaacaggtgggtgtgcctccgggagttgggggaccagggtgggggactaggaaacaagagcccctccccctagctgacctccaggtgtgcccccacctcccgcagtggaaacagaacaagaacaccctgctagaaaatagccagcgtgtcaccactgccctgctggcccgatcagagatcagcgtgggtgaccgccagctgccgccctctgccgccaccgtgaacaatcgctgcttccagcagctggatgagggctatgatgaggaatacggtggcttcgctgaggcccccaagtttcccacgccgggtcagtgccccacgcccgccttagcccaggctttggccttctgattcctatgctggtcagggacctactggctcctggcctcacccatagcttcctgtcctcctgactggcagtgacctccttgcccctagcctgtcggtagctatcggtgaagacccgactgctggtgtcagcagtgaccctctcaccttaacctagatgatgaccttctgtcccctgacttggtcagtgacccagtgaccctgacttggctaatgacattctgggctctagggggacaagtaacttactggtcctctgtgaaccaatgatattctgacctctggcttaggctattaccttctgtcctgtgggttgactcttgacctcacagcctgtccagagactgcctgttgagtgaactcccagcctctgcctggcccaaggcctcctgaccaccccgatctctgtccccactttcccattctctcacctgcatgttcttggtgcccccacagtgatcctgagcttcctgttctcctactggctcagccatcgactgactcaggatggctctcgggcccagcagatggccttgcataccctgaaaatgatggctaacgggggcatccgggaccatgtggggcaggtgacgggcactgggtgttccctggaggggcagcagggggctgtggggtggggcagaagctgggactggcctccagctttgtatccgcacagggctttcaccgctactccacagaccgccagtggcacgtccctcactttgagaagatgctctatgaccaggcacagctcgctgtggcctattcgcaggccttccaggtgacccctgaccccagcccagagaacaggcatctcactctggctgcccctcccaaggccttcctggtgactgtggcttctcttaatctgaatcccctgttccctcccatgtacccactacccaggcttccctcccccgcctgcctcagagaatgttgccaccttccacctgggcctccccagtgacctctctgttcacagtctcctttcttccctttcttagctctctggtgatgaattctactctgacgtggccaaaggcatcctgcagtacgtggctcggagcctgagccaccgggtgtgtgtccatggtggcaggcaggcctggctgtgggaggggttggggcctccactgccctgtgggccggggccagccaactctcccctccccacagtccggaggcttctatagcgcagaagatgcagactcgcccccagagcggggccagcggcccaaagagggcgcctactatgtgtggacggtcaaagaggttcagcagctcctgccggagcctgtgttgggtgccaccgagccgctgacctcaggccagctcctcatgaagcactacggcctcacagaggctggtaacatcagccccagtcaggtgaggacttctggggtcacctgacgggccctggtgcctgccaggcgtgtgagctcgcagacaaaggccattctcctcaggaccccaagggggagctgcagggccagaatgtgctgaccgtccggtactcgctggagctgactgctgcccgctttggcttggatgtggaggccgtgcggaccttgctcaattcagggctggagaagctcttccaggcccggaagcatcggcccaagccgcacctggacagcaagatgctggctgcctggaatggtggggcagcacacctgagaccgagcctgtctgtaggatcccccttcacaaagcccctgtctttccggcagcggctaaatgctcactctcccttgattagcgttattattctcagttgacaaaagaggcttaaggagcttgagtaacccgcccaaggtcacgcgcaagggctgggaaccccgccatgtctggctttggagcccaagatcttagggatcacccatggctccagggaggtgttggggcctaaggtgatagggtggacatgcctggagggtcctggccagcttcttaccactacttgtctctcctggctccaggcttgatggtgtcaggctatgctgtgactggggctgtcctgggccaagacaggctgatcaactatgccaccaatggtgccaagttcctgaagcggcacatgtttgatgtggccagtggccgcctgatgcggacctgctacaccggccctggggggactgtggagcacaggttgggggctgggtagaccgggagggcccgtctccccaacgcgtccccagcctacctctgccctacttctcccctccatgtggactccagtcctggctctgccaggtgcttgctgtgagtttgtagcttccctgggcccatttactcatctgggaagtgggctgatggcacctgcccaagagggttcatctggagggttaagtgaacaaatgcgtgaaagggcctcctctgggaaaggccctctctcctggggctctccccagcccctcccgtaatgcctgtcccccagcaacccaccctgctggggcttcctggaggactacgccttcgtggtgcggggcctgctggacctgtatgaggcctcacaggagagtgcgtggctcgagtgggctctgcggctgcaggacacacaggacaagctcttttgggactcccagggtggcggctacttctgcagtgaggctgagctgggggctggcctgcccctgcgtctgaaggacggtcagtgggggtgcagggctagtctggggtcctgggaggtgtaagtgcagcgtgggtgaagagctggtgtgggcaggagccctcctggctttgtgtctctgctacttattaatggcgtgatttttggctgctgtaatatttctgtgtctcaatttcttttttttaaatagagacagagtcttgctatgttgcccaggctgatcttgaaatcctgggctcaagtgatcctcccacctcggcctcccaaagtgctgggattacaggcatgaaccactacactcagcgtgttttgtttcgttcctttcttttctttttatttcctttctctttctttctttctctttcctttcttcctttctttcttttctttctctctttctttctcttttttttttttttttgagacagggtctcactgtcacccaggctggaatgcagtggcatgatcttggctcacagcaacctctgcctccggggctgaatcaattctcccacctcagcctcctgagtagctaggactataggcatgcaccaccatgcctggctaattttttgtagagatgggatttctccatgttgcccaggctggtctgaaactactgggctcaagtgatctgcccacctcggcctcccaaagtgctgggattacaggcgagagccaccatgcctggcctgtttcttaataagtaaaatggagctaacattggtactaccttacagggttgatgtaaagatgaatgtagctgttctgtaaacatgcttagcacagtaactgacacccatggattcagatattgaccaaggctcacttggtctctgccctcatgaagcttacagtatggtaggggagacagcgaaaatgcagtaatgatgcaaaaacacatgcacaaatgtgcagttaaaattgtggtgagtgccatgaagaagtaggacgctctatgtgtgcctgctccctatcacccatgtgccttgtctgtggttaaaggtttctttcccaaaactcaaattttagctcctcaaagatcaggactttctgccactgttgtatccccagggtctagtgtggttctggcacattgtaagtgcttaataaatgttaactgagtgaatgaaagggccttgggagagaaccacagaggaggaccaactcagcctagggagagattagaggacacctgtgacaggtgtcatttaaccaaggcctggagggaaagaggggccatgtggccatggagaagctgtggagagagttcaggcatagggagcagtgcatgacaggcctggtgcaggcagcctgtatcctggaggacaggcagggcccgcgtgttccaggagggcaccgaggagaatgctgaggccggcagggcacggaagccgtcttttttttttttttttcctaagaaaagaaggctggtctcaaactcctgggctcaggtgatcctcccgcctcggcttcccaggtgctgggactacaggtgtgagccaccatgcccggctggcaaggaggttttaagtggattgtgatctgctctggtatggttttaaggaggtcactctgaccactgatggagagaagtgggggtgggggaaacaggcgaccagttaggaggccattactcgtgttcagtccaggcaggcattggtgaaggctcagaggatgtggaagtatgagatggggagacatggtgagatttggatctcttctggccacagccctggcaagactcacagatggattagaagcggagggagagggagaggaaggggacaggatgatgccgctctagcttgagcagctgagtggctggacagaggcatcagcagcgaggagggagcctggagaccaacagttgaggctaggacaggtagagtggagggtgccataaaaaagacagcaaagtactgataactgctggagtggcatccacacccagagcggggaaggggcaggatgggcagggccttttctctgtcccgtcccccaagtggccctggatacagtcctgggcagggtcctgggactcagtgacctgcccttacccccaccccctgcctccctatgtgctgtagaccaggatggagcagagcccagcgccaattccgtgtcagcccacaacctgctccggctgcatggcttcacgggccacaaggactggatggacaagtgtgtgtgcctattgaccgccttttccgagcgcatgcgtcgtgtcccggtggcgttgcccgagatggtccgcgccctctcagcccagcagcagaccctcaagcaggtggggggtgagggcatctgggctgggacctcgggtaggagggaagttggggctgcgatggcagatgggaacagggggtggggttcctgggctgtccccagagctcaggtctgtgtgtgtgcaggcacgtggcctgtcagacagggaggcagaagttaatatgagtccgtggtggctgatgaagtgtttctctgtacgtcttggtgtcagtgtaattgcttctgtccatactgtgttactggtgtgtgtgtacttccgggtgtgtgtgaccctggaggtgtgtgtctgtgcacctacctttgagggggatgctggtgtgagtgtttgtctgtctgcatgtggatgccccatctgcaggtttgcctctgtgtctgcctgcatgcgtgtgtgtctggtgtttgtgtgtgtggtatctgcctctgtgtgggcatctactgtgtgtgtgtgtgtgtgtgtgtgtgtgtgtgtgtgtgtgtgtgactactctgtgtctgtctgaatgggtctctgtgtgctctgggtcttctgggtgtgtgtctccccatgtttgtatctgtaccattgtgtatatgtatgacatttccacttcggtattctcatgtgtgagtgtgtgtgtgtgttcccacttgccaagcattaactcatcctggcagctgagatgagtccctgttccttcttagagatatacggtggggcggaaggaggatggggaagccctggtggtctagggctcagccctccctcccctgacacaccggagtgacctttctattccggtcagatcgtgatctgtggagaccgtcaggccaaggacaccaaggccctggtgcagtgcgtccactctgtctacattcctaacaaggtacccatccctgtgagcccaatctgccacctccccagagctgccccctcccatcctcagctcctcaacatctccttcccctcagaatgttgggaagagggaacttcccagtgggcctttctaatgggcaggtgaccccaccccggcaggtgactctccctgctctgctgctgccctaggtgctgattctggctgatggggacccctcgagcttcctgtcccgccagctgcctttcctgagtaccctccgacggttggaagaccaggccactgcatatgtgtgtgagaatcaagcctgctcagtgcccatcactgatccctgcgaattacgaaaactactacatccatgactgccccaacccccttggggtggggcagaaggtgaagcatcccaactgactagagactcaggccctgcagggccctatagaacctgtggccatccctgagcaccctgccaccaggtgacctcggccatactcactgccccccttgggcacccactcaccctagaataaacttaacagtgtcccgtggtaa

SEQ ID NO: 1929 - DNA, 5846 bp, Homo sapiens
gctttatatgagcttttatatttcacagaatggtgactttgcatatgccctggtgcattgtgggagctgctattgtcacgactaagacatttcttttggggtatccatctagccccagcctcgaaaggatggaagcagggcctccttgcaggaggtcatgttgtccatttgtctgctttcatacaagctggtccaaagaaagagttctctttcgtttggaacatctgttgggttggaagtccttccccaaatctatctgagtccttcttgctgcagagaaagccttcctgtgacctcatcctttcccctaaatgttgggaaatgctcctgagtcctgtccttgacacatacatcttccttgggttgagggatggggactgggacacatgctttgggaagggcaggtgcagagtgatggggctgacggggtgggggaagcagggggaggagctgtccctctgaggcctttgggaatcggctgtgccaggcatcctcagccctccagctaagcaacacagagagccaaaagaggctactagagacaagaaggccttcatggggccactgcttgtgggggatgtcagcagtggggaggagtgaagcaggaaggaaccgggagactggatggaattgctcccttcacacggtcacacatagccacacatggtcactgggaccagagtcagctctgtctgggcagccaggccctcagtgcaagccaccagcccatctggaggggattagtgctccggccaacaaggtcagctggccccttcctagctggagcctactcaaccttgccaggaagtcagagagctggacaagtggagcccagcctggggaggtggaagagagggaggatggagcatggtgaagcacaggtggcctttttggcagccccagccctggctttggaacagtctgggcagtgtgccaacccctcttgccactgtcgtcccattgaccctcatgaatgagttgcgaggcagttaccttcagcctcctatggataaatattcgaggcccagagagggtaagagacctgcctgcgacccctcagcacttctgtttctctctggggtcttgagggtacaataaagacccctaaggcttcctcttctcgcaggaggtccaggcgcagctgtgggggagggtgcccttggtgtcttctgtccctgcagccagtctgctttctactcggcagctcctctctccctcctgggatgagatgtgcacgcgatgatgggattctgtaaatgggttgggaagaaggagttacctccttaaagggttagttctcccaggagtgctcgaatttctaaagggggcagggtcccacataaatctcactcagaagcaggattataagagttcctgcagcatcccttcccctttgctggtccctcttgagtgtgcaccctgttctaccagcggaacacctgcgggccagggtcactggagacagggccataccgtctgggcggtcacttaagtaacttcatcattctgagcaccccccttccttatctgaaaggtggggggccatccacccagctctcagggctgttaaggtgactaaatgggataatggttgtatcatccctgagcaaagggtatcacagatgggaagattatcttagctccgcagggagccagatgggctgtgagggaggggtaaaggcagggctggagggggctggaggggctggctgagcagggtatatatggggggggttcttcctcaaacccagaaaaactcttagttaggcttagtgtctttgttgagaaactgaggcccaaagaaaggaatttcttgtccctttgtttccctttccctgcctgaggtcattcattcacctaacaactttgtgcccgacactagacaaggccctagtgagcaaaatgaacatagcccctctgggaacacagagcctagatagggagatgatcatttcattactgcaaacacaaacatataatcccagcctgggctaagtgctgtgaagttccagacttgtgtctggctcggtgctgtatcctaagcaccttggcacttaagtggcattgaaatacttgctggaaagaaggccactctgaggaggtgatgtcagagctgaggcttggagggctggagttaaataaagatggtttcaggtcttctttgccttccctgtaggttctgcctctgcctcctctctggcactcaggctaagggtaagcatctccgactggccatcagccccaacatgccgagtacagggatcagatcctgtcttgcgtggccggtctcccctaggtcctgaacccagggaagtgcatgtggatctcaatttatctagatggtgcgtttgtgcctgccctcctttcgggcatgttctagaacagagttcagtccagagcccaggggtggccgggatgatggatgagggtgtggggcctgctgaccaccaggggacctgatcattgggctgggccagcctctctgtcctcattttcccctctgcaaagaaggggtgttgggcgtccctacttctcgcgccagccccggggcctctatcctggcgggaagggcaggccgacccggcagactgcggcctctcgggagggaagaaggtgtcagacgcgcggagcaaccataaatagcccccctttcccagaagacggcacggggttcaagactcaggcgccgcatactcagaatgagagcagagactcccgccaggaaaaaaaggcacttaggggatctgctcattagcatgaaatgcaaatgagcccgcccggcctcatttacacaactctgtgcatggattcggcgaaagggcaaccagggagacgacggcgcagcagccactctgccacttcccccatcccctccccccatcggccggggcgggaactgagacgaccccaaccctctgcggtggcgggaggtgcgcgggggctgcgtgggtggtgcagccttaggagagtgaacaacgcccaggggtgatggcctcagcaaagtgaggggtggtgatggaggtcatccgacccatcccgccgcctctccgcagtggcgcaagcgccccaaaatctccggagagggaactgactgacccactaggttccgccgtgtctacctctcgcagatgttggggaagtgcttcccggcgtctaatcctcgctgttcccccctccaccggcgcccagcacacccgcggcgctccgctcccgggtacccacagctttctggagtggcgccggcggcaggagagagctagagccgactgagccccagaactcggggaggtaggcggggcaagggccggggtctgcgcgtgcgtgtgcacgcgtggaaagcacaaacccacgagggcccgctgccggtagggttaaggtgagtgagtgaaggcggcagacccgcgaagttccagttccgcggacactccttccctaagccacatagggacttaagagaaactgaggcacgaagttggggggtggcggtggtggggactttgaaggtcgagtcgataaagcccagctctgtgcttccgccccctcccacacactcgagacccccacaggttccttcttaggggtcctcgctctgctccgcagcccctcctggggatccgggctctgcggtccagcgcgacctgcctggggccacgtgttcaagcacgaagcccctgcgtggagtccacgcccttcaaaaggtccctaggggcaaagggatgaagcccaggagcgtcaatgtgaggtcaggtccagcgggttagggttacgaggtcagggtcgaagtctcagaattgactcgggagtatgaccaataagcccaagagatttgtggaggccacgcccagaccatgcctaccctagcctttctcgagctccgcccgtttctccaagactgggcccctccagcctgaagccccacccccaggacatccagctccgctccttcccttccccagtcccgcagccaagctcaactccagggtgggagattaaccaggtggagacctgggatttcgctctgggaccccctggtgacaaccctcacccccgtgccgcctgtctcctttcttccccaggcccgcccagagctgagctccgtcctccggctgctgcccaaatcaggggtcgtggacaaaggatgcctggggcctgcggccctacgccaggaccccgcgccgaatactctgattcttcgggctccctccaagggagtcccaaagaccccaatggccaataggaaagtgggttcggtctgggcagcagtctgattggctccagccttcgggagcggacccaggggcaaggggaggggagaggggcggtcctgggttttggggtgggaatcggattccagctgtggttctctccctgcgctcccgcccgcactgccacggcggacggccaatgggcgcgcggctcggggccggcggcgtccggcgattggctgcggggctgtctgggggcggggccgaggcttgaagttgaagtgagggatccagctgtggtgtgcgcggggctcctcgccgccgctttcgctcgctcgctccgcgtctcggccggaggaggaggctgtggcgccggcgacagctacggcagcggcagccaccgcggcggctgcggcggcggcatctccgcctccactcccgcccgggactgccccccactgtctccccgcccctcccggacagtgagcccgcggcggggcgggggaaggagccgcccccaccccctccaagcccacccctaaagagatccctcctcccctcccccgccgcctggcgcggagccgggacgatgctgaccccttagatccggctccagctgcgccgcgggaagagggggcgcccctccccggacccccgccctccgccgctgccccccttttcgttcgccctctcggggcggcttcgccgaaggtagcgccgaatccggcaaccggagcctgggcgcgaagcgaagaagccggaacaaagtgagggggagccggccggctggcccgggaagccccaggggcgcaggggaagcgggactcgcgccgggcggggtttccctgcgccccggcgccccgcgggcagcatgcccctgcgggcagggggagctgggctgaactggccctcccgggggctcagcttgcgccctagagcccaccagatgtgcccccgccggggcccccgggttgcgtgaggacacctcctctgaggggcgccgcttgcccctctccggatcgcccggggccccggctggccagaggatggacgaggaggaggatggagcgggcgccgaggagtcgggacagccccggagcttcatgcggctcaacgacctgtcgggggccgggggcggccggggccggggtcagcagaaaaggacccgggcagcgcggactccgaggcggaggggctgccgtacccggcgctggccccggtggttttcttctacttgagccaggacagccgcccgcggagctggtgtctccgcacggtctgtaacccatatccttcggggcacgacggccaggcgcggggtcagaagggggacgggccgcaccgccgggggtcgggggggaagaagacccaccgccaggtgagtcgaagtgagcccggagggtaggcggatggggggggggctgccagggaggggagggggcaccagagtgggagcggagacgcgagcaggtctcgtcggtaacccgggcttaccccacctgcgtacacacacctcagtcttcctgggttgggggggtggggatccaggccaggagaagagagctgtgccccgctggctcgcagctggacgccctccagatgtggtcaggggagggtcgtcatcctccagatgtgggaagc

SEQ ID NO: 1930 - DNA, 5848 bp, Homo sapiens
gctttatatgagcttttatatttcacagaatggtgactttgcatatgccctggtgcattgtgggagctgctattgtcacgactaagacatttcttttggggtatccatctagccccagcctcgaaaggatggaagcagggcctccttgcaggaggtcatgttgtccatttgtctgctttcatacaagctggtccaaagaaagagttctctttcgtttggaacatctgttgggttggaagtccttccccaaatctatctgagtccttcttgctgcagagaaagccttcctgtgacctcatcctttcccctaaatgttgggaaatgctcctgagtcctgtccttgacacatacatcttccttgggttgagggatggggactgggacacatgctttgggaagggcaggtgcagagtgatggggctgacggggtgggggaagcagggggaggagctgtccctctgaggcctttgggaatcggctgtgccaggcatcctcagccctccagctaagcaacacagagagccaaaagaggctactagagacaagaaggccttcatggggccactgcttgtgggggatgtcagcagtggggaggagtgaagcaggaaggaaccgggagactggatggaattgctcccttcacacggtcacacatagccacacatggtcactgggaccagagtcagctctgtctgggcagccaggccctcagtgcaagccaccagcccatctggaggggattagtgctccggccaacaaggtcagctggccccttcctagctggagcctactcaaccttgccaggaagtcagagagctggacaagtggagcccagcctggggaggtggaagagagggaggatggagcatggtgaagcacaggtggcctttttggcagccccagccctggctttggaacagtctgggcagtgtgccaacccctcttgccactgtcgtcccattgaccctcatgaatgagttgcgaaggcagttaccttcagcctcctatggataaatattcgaggcccagagagggtaagagacctgcctgcgacccctcagcacttctgtttctctctggggtcttgagggtacaataaagacccctaaggcttcctcttctcgcaggaggtccaggcgcagctgtgggggagggtgcccttggtgtcttctgtccctgcagccagtctgctttctactcggcagctcctctctccctcctgggatgagatgtgcacgcgatgatgggattctgtaaatgggttgggaagaaggagttacctccttaaagggttagttctcccaggagtgctcgaatttctaaagggggcagggtcccacataaatctcactcagaagcaggattataagagttcctgcagcatcccttcccctttgctggtccctcttgagtgtgcaccctgttctaccagcggaacacctgcgggccagggtcactggagacagggccataccgtctgggcagtcacttaagtaacttcatcattctgagcaccccccttccttatctgaaaggtggggggccatccacccagctctcagggctgttaaggtgactaaatgggataatggttgtatcatccctgagcaaagggtatcacagatgggaagattatcttagctccgcagggagccagatgggctgtgagggaggggtaaaggcagggctggagggggctggaggggctggctgagcagggtatatatggggggggttcttcctcaaacccagaaaaactcttagttaggcttagtgtctttgttgagaaactgaggcccaaagaaaggaatttcttgtccctttgtttccctttccctgcctgaggtcattcattcacctaacaactttgtgcccgacactagacaaggccctagtgagcaaaatgaacatagcccctctgggaacacagagcctagatagggagatgatcatttcattactgcaaacacaaacatataatcccagcctgggctaagtgctgtgaagttccagacttgtgtctggctcggtgctgtatcctaagcaccttggcacttaagtggcattgaaatacttgctggaaagaaggccactctgaggaggtgatgtcagagctgaggcttggagggctggagttaaataaagatggtttcaggtcttctttgccttccctgtaggttctgcctctgcctcctctctggcactcaggctaagggtaagcatctccgactggccatcagccccaacatgccgagtacagggatcagatcctgtcttgcgtggccggtctcccctaggtcctgaacccagggaagtgcatgtggatctcaatttatctagatggtgcgtttgtgcctgccctcctttcgggcatgttctagaacagagttcagtccagagcccaggggtggccgggatgatggatgagggtgtggggcctgctgaccaccaggggacctgatcattgggctgggccagcctctctgtcctcattttcccctctgcaaagaaggggtgttgggcgtccctacttctcgcgccagccccggggcctctatcctggcgggaagggcaggccgacccggcagactgcggcctctcgggagggaagaaggtgtcagacgcgcggagcaaccataaatagcccccctttcccagaagacggcacggggttcaagactcaggcgccgcatactcagaatgagagcagagactcccgccaggaaaaaaaggcacttaggggatctgctcattagcatgaaatgcaaatgagcccgcccggcctcatttacacaactctgtgcatggattcggcgaaagggcaaccagggagacgacggcgcagcagccactctgccacttcccccatcccctccccccatcggccggggcgggaactgagacgaccccaaccctctgcggtggcgggaggtgcgcgggggctgcgtgggtggtgcagccttaggagagtgaacaacgcccaggggtgatggcctcagcaaagtgaggggtggtgatggaggtcatccgacccatcccgccgcctctccgcagtggcgcaagcgccccaaaatctccggagagggaactgactgacccactaggttccgccgtgtctacctctcgcagatgttggggaagtgcttcccggcgtctaatcctcgctgttcccccctccaccggcgcccagcacacccgcggcgctccgctcccgggtacccacagctttctggagtggcgccggcggcaggagagagctagagccgactgagccccagaactcggggaggtaggcggggcaagggccggggtctgcgcgtgcgtgtgcacgcgtggaaagcacaaacccacgagggcccgctgccggtagggttaaggtgagtgagtgaaggcggcagacccgcgaagttccagttccgcggacactctttccctaagccacatagggacttaagagaaactgaggcacgaagttggggggtggcggtggtggggactttgaaggtcgagtcgataaagcccagctctgtgcttccgccccctcccacacactcgagacccccacaggttccttcttaggggtcctcgctctgctccgcagcccctcctggggatccgggctctgcggtccagcgcgacctgcctggggccacgtgttcaagcacgaagcccctgcgtggagtccacgcccttcaaaaggtccctaggggcaaagggatgaagcccaggagcgtcaatgtgaggtcaggtccagcgggttagggttacgaggtcagggtcgaagtctcagaattgactcgggagtatgaccaataagcccaagagatttgtggaggccacgcccagaccatgcctaccctagcctttctcgagctccgcccgtttctccaagactgggcccctccagcctgaagccccacccccaggacatccagctccgctccttccctcccccagtcccgcagccaagctcaactccagggtgggagattaaccaggtggagacctgggatttcgctctgggaccccctggtgacaaccctcacccccgtgccgcctgtctcctttcttccccaggcccgcccagagctgagctccgtcctccggctgctgcccaaatcaggggtcgtggacaaaggatgcctggggcctgcggccctacgccaggaccccgcgccgaatactctgattcttcgggctccctccaagggagtcccaaagaccccaatggccaataggaaagtgggttcggtctgggcagcagtctgattggctccagccttcgggagcggacccaggggcaaggggaggggagaggggcggtcctgggttttggggtgggaatcggattccagctgtggttctctccctgcgctcccgcccgcactgccacggcggacggccaatgggcgcgcggctcggggccggcggcgtccggcgattggctgcggggctgtctgggggcggggccgaggcttgaagttgaagtgagggatccagctgtggtgtgcgcggggctcctcgccgccgctttcgctcgctcgctccgcgtctcggccggaggaggaggctgtggcgccggcgacagctacggcagcggcagccaccgcggcggctgcggcggcggcatctccgcctccactcccgcccgggactgccccccactgtctccccgcccctcccggacagtgagcccgcggcggggcgggggaaggagccgcccccaccccctccaagcccacccctaaagagatccctcctcccctcccccgccgcctggcgcggagccgggacgatgctgaccccttagatccggctccagctgcgccgcgggaagagggggcgcccctccccggacccccgccctccgccgctgccccccttttcgttcgccctctcggggcggcttcgccgaaggtagcgccgaatccggcaaccggagcctgggcgcgaagcgaagaagccggaacaaagtgagggggagccggccggctggcccgggaagccccaggggcgcaggggaagcgggactcgcgccgggcggggtttccctgcgccccggcgccccgcgggcagcatgcccctgcgggcagggggagctgggctgaactggccctcccgggggctcagcttgcgccctagagcccaccagatgtgcccccgccggggcccccgggttgcgtgaggacacctcctctgaggggcgccgcttgcccctctccggatcgcccggggccccggctggccagaggatggacgaggaggaggatggagcgggcgccgaggagtcgggacagccccggagcttcatgcggctcaacgacctgtcgggggccgggggccggccggggccggggtcagcagaaaaggacccgggcagcgcggactccgaggcggaggggctgccgtacccggcgctggccccggtggttttcttctacttgagccaggacagccgcccgcggagctggtgtctccgcacggtctgtaacccatatccttcggggcacgacggccaggcgcggggtcagaagggggacgggccgcaccgccgggggtcgggggggaagaagacccaccgccaggtgagtcgaagtgagcccggagggtaggcggatggggggggggctgccagggaggggagggggcaccagagtgggagcggagacgcgagcaggtctcgtcggtaacccgggcttaccccacctgcgtacacacacctcagtcttcctgggttgggggggtggggatccaggccaggagaagagagctgtgccccgctggctcgcagctggacgccctccagatgtggtcaggggagggtcgtcatcctccagatgtgggaagc

SEQ ID NO: 1931 - DNA, 2932 bp, Homo sapiens
ttcacatcagttactcattgagctggggttcgtcatattaaccaagaattcattcatctttcttttgatattgtaatcttgtcctcatctccacaactgagttggggcctgaggggtttaagagttctcactccatcacaggaggcaaggggtacccttgtgaaccagacttcaactcctggaagtcttgttcagttcataggcaaatatctttgcaagtttagtatgagacagcccaacggttaaataaataagacacagtgccatggttctaggcatttggagagggaaaaggcacattacacagattcccctggagaaaatacaggccattctcatcttctcaacatgcattttcccactcttcagtgacttttaatcttatcccctggtctatgagaaaccataacccacgtgctactgaatacatttttattttcccttcatgacatagacttggttccaagtatattttattttcctcccttatgcctacaagacatccaattttgttcaggtcccttttaatggcacttaataaatatacattctgagacctggcagaacaggctgtcccctttcacactgcctttaaagcgcctgtttgaactagctagtgcagagctcaggtggggcacgtcctagcttacagctcatggccatctctggcaccaggtctatctgtccaatactttgtgtctagggtagaggtccctaaccctggctgcacattggaagcacctgggaagctttctgaattcctgaggcccgagccacaccctaaaccaatttcatcagaatctctgggtgggacggagcctggattctgccagttgaaacctgccatggtaacttcagtgagcagctacactgagaactcctgagctacaattctagcacacagtaggccttcggtaggtatctgtggaacccacgagtgggtttcctatttcattatctgttcccctatgctctctatttttatcagaaatctgagcaggaaagagcagagagaatgagtcaagagcatcctctcaagtgaattcgctgctgagaaaggaaccgtagggcttgcatttctcttgtgtcatgcagtcttcatgctttaacaggcccagaggaggcaagttatagactgacacagacatgtatatatttcttaaaagcccttcaaaaaccagagctcactgcttaggcactatggttataacacagacatgttcttggaagcatatctaaactacctcctgtttgacacacattctaacttgggttggttacaaactttgtcagttgttaagatcacacttggtcacattttcccatttctgtgaatcttgcaacttatctttgcccagagcaacagcctagacatgaccaccccaagcagggactgcactgcacccaacattgccccagcaggtcagtcctccttgaacaggaactgtttttgaggggctccaatttccaggttctagaatggggtggctcacttaccaagttaaagaggctggctacatagaatgcagtattgagaagccccccaaggtagatcctgggttacaggaaagaaagctatactgatgaacaaggtttgctgccacaggcatgggcgtgggggagggcagcatgccgggggccaccccgagatcactgctgtcatttacatttgtatcacacttcacagtttacagggagctctgcatgcttagccccacgtcattctcagcacaaccctgtgagtgaggtctttctggatgggaacactgaagttgtgtcctacatctaaggtcccacagccaattgcatcacatccacggctgcctccaggacctcaggggccacctgaaaccactgggggttccccctggctccccttctaaccagaaacaggaaagcaagccattccctaacctccccacccaccaggccttatcaccgccttcccagagtttcctctatgatttgcatacccctttgttccctagtcctgagaacacagcagtagctgttcacctgctgccaacagcctcacacaccccacctaacacagtatcaaaatcccctcttccctggaacagcctctgaatttgcctacacacattccagaactatgacttggtcacacccactcccaggaccagtcaagagtcttgggaacctctctgctacaccgataaatccatggcttccccacttgagagggctcccagtgggtcactgcccaagataaactcagcttccagcatagagaaataaaagctgactcattggttatgatgtctcctgataccatgtgtaggaagtgaactgtctgaccaggcagttctggactcctccagaacccgcttcctgcaaccacacagcacgcaggtaacattatcccgtgtgacccacgcccacaggcaggcccggatgcaggcacagctaagactggccataacctatggagagtcctggccaatcagctgtgacctgctgtccaagtgcattgtgaccccaggtcggaatgagttctttatgcagacataatgagcagtcctggctggagcctcctgtgcccccaccacaccaagcactctgcgaggcccgcccatgtcttctggctgcctcctgagtgtgcttcacccaccctggcctggtcttcccttccacctccacctttcctttgcttcttttccccccagggtcagagcctctaagcctcccccatcatttggcaatgtaggctccaaagagggtaccctaagagggcagactccagccccacagaactgggctccgagcactggccaagaagccagaaggcacataacccctctgtccattcacttccaccaggctccactcagggttccccttcttgtcctgggcctccaggatggtcacaggctggcctgcctgcaggctcacttcatggctgcttctggcc

SEQ ID NO: 1932 - DNA, 353 bp, Homo sapiens
agagaggctgtttatcctgttcccatccacctggctctcgtccccattgctggatgctcgtcacctcccaagtacatcttttgtactaaaggcaatgactgcatctgctagtaccacagcccatactatgtgactggcactgtcctagcactctactgggtttgggttctcacaataattctatcattctatttgctgcatttttcagataagaaaaatgaggatcagagaagtcaaggaacttactcaaaattgcacagcagtgaatctaggcctgtctgacctccaaacagatatttttgatccactactgccacatcactgagcagactcagcaccctctccctctccag

SEQ ID NO: 1933 - DNA, 10876 bp, Homo sapiens
ggagcctaggcagccgagagggtgcccgaacctgagtctgagttgcggccacttcaggagctgagaggagcaggtaggtgaggagggagcgtgggctgcggggatggtgttcctgggggcctgagatatgagtaggggtcctgggagggggctcggggttccttggagacattttagcactagtggggaatggaatggcgtgtatggggaggtcctttttgtaccctgatcccaggaagtgaattcaggtgtgggtgggaggctccggagggtgctggtggtgggggatgggactccttgagaccctccctgtcccaggaacgggattcaggacttgggaaaaggatttcctgagccagtttgagctctaatggggaccttgaatgggggtttctgagatacctccttcccaaggagtaagcgcgggagggagctggggtttcttcagagacgctgtacctacaagacaggggctccaggctcgggtggggattgcagagacacccccaccccaggaaactcggtaggccacgggagggggtctttgatgaaggtctcagaaatagctcttcctccggaggggaaatgagggctcgggccaggttcctgagacaccccacaccccacacctaggaagtttctcaagtctggcagtgtctccaaattgacttctgccagaagatgagtgtttaagacttgctaggggccctggaaaagacctctaggccctagaattggggtcaaatgggagtccctgggtcatttctgtccctgggaaggggctcggttcgggcacttgtctttggcttctagtgaggatattcagagtcgtggcagagagcagtttgcagcgtctggggcaggggtctccgagtctgtccccaaccctcagctcactcaacaggttgcattagctctggtctcgggcttgggggcccaggcgggaaggaggggggtgagggcattaggaggggtggggcagccaggccgacacgtgtccctgcaaggagtgagccgcctggccacgcggtgagggtggagggaaggagagggggtggcgcgggggaccggggaatgaaagacacagatggcaagagagacagcgtgagtctggggtctgggaggagaggctatcccttctccacgtggtcggctcatctgcgctggggtccggctctctctgtagctttctgtctctctcttccccactatttctctctcactggctctctctgtgtctctctgagtaactaactgttggcttctctccttctctgatttttgttcttctctctctctcatctctttctctgtcagtctgcctccatttctatccctgtctgttcctgctcccctgccttgtctctttctccgtctttccatcggtctctatgggactcccctccccccttcttcagctcccctcactttgaagcatgctcgttccatctctgatccccccaccccatttctttgcccacaggatggaactgcaggatccaaagatgaatggagccctcccttcggatgctgtggggtgagtcaggggtccaaggaggtgggctcagggatcaggggttaggatttccctcttatcggcccctatttccctgccctatccagctacaggcaagaacgtgagggcttcctgcccagtcgtggtcctgctcctgggagcaagccggtccagttcatggatgtgagtggccccacaggatctgtcctggtggcaccttccccagctaatctcctcccgcactgctccctcttccccactcctcctcctccctgctgttcccctgcccagctatctccccagcacagctacacactacttggtcgctcccctctccagatactcctcttccccagatatgccctttccagctctctccctggccttgtttctccccacccgctcttcggcccagtgactgccctccctggctgctcccctcccggcctgcctttctcctccagctgttcttcctcctccagcactccccatcctcagcctatccccacccgcagcgtctcccctccccagctgttttacctctggtggctgcttcaccctcccccggtcctctccacttccagctgctccctccaaagtttgtcctagtttcccccttcccagctctccccattcgcagcctcttccatcttcaactcttcttccctgctagcctcttccctcctccgatggtctctccttggcttctctccaccccgcttgcttcttctctagtctttccctggccctggcattagtctccttaccctgtgccctgtcccaatgtgtgcccgggctttgctccttgcgtgcagttcgaggggaagacatcgtttggaatgtcagtgttcaacctcagcaacgccatcatgggcagcggcatcctggggctggcctatgccatggcccacacgggggtcatcttcttcctgtgagtccataggtggcctgcggggccaggggtgttgtggggcaggtgggaggcctggggccaggtctgagctgtgccacctgccgcagggccctgctgctgtgcattgcgcttctgtcgtcctactccatccacctcctgctgacctgtgctggtattgcaggtgagacccagagcctggatcccagtccccactccacccctttggaccccagactctggagccacatccagagctcaacacagaccttggaccccagaccccagacccagctccctgaatgcagaccccagatcccggacccagcaccccagaacccacccccagaccactacactctacctctaacccccacccctcagtccccggttccccagctcctaccatggtctcagttcatagtctggctccaagacccctactcttacctccagccctcatccttttccctggcctcagatcccacctcccagactctgcccccaaactcaagcccaactgcttaacccccaccttcatcctccatcagtcaaagccggttcccccaagccccaactccccagctcctgggccctctggcctgcacctctggcctggcctcctggaccttcaaccctgttcctgactccccccgctaggcatccgagcctatgagcagctgggacagagggcattcgggcctgcggggaaggtagtggtggccacagtcatctgtctgcacaatgttgggggtgaggactctgggaggtgggggtcagcttggggggagagggcggagtgaggtgggcttccccaggctgggctggggaagacggggtgggggcatgaagagaatccttctgcttacacctcccccacctgcaccagccatgtccagttacctgttcatcatcaaatctgagctccccctggttatcggcaccttcctgtacatggaccccgaggggtgagtgagcaacaccccttggctggccagcagccccttgactctgcctgtgaggcccggtcagtatcttcagcgctgtgtgtgcagctgacttccagatgttctagtttgagactgctgggcaggccacttgggtcagactgattcctctgtgtgcctgttgctctgaccacaggagtccagtcgaccgtgtgctgattttgtgacttattctggctgcttctggctggaggctgactctttatgtccggtttactctgctgctgaccatgtgtgtgtgaatgtacatagccaatggactcagactctgcctgtgggtttgactctgcgtctgctgtcctggctgattctcttgggctagctctgtgattgactacagctgtgtcccgtatactgggattccaaccatatgtgtcttaccctcggtcactctgacttcccctgtccagctgattgtttgagcttgattctaggttcatctggctgaatctgtctagctgtgagtgtgtgatcactgactccgtctagctgtgagtgtgtgatcgctgactccagcagtgtgtctgtgtgcacgtagtatgctgtggtaccaactatgtgtgactcactctgactgtacgtgtccagccaactccatctctgtgtttgatttggtggctgttctggcaaattctctctggtgtgtgtgtgtgtgtgtgtgtgtgtgatccctgaatgtggctatgtgtcctctgtattatggttgcaaccatatatgctggactgttctgattatgcatctggctgactgtgtgtgagtccggatccgctgtgctggcttggtatgtgtggggggcatgtgcacgatgggactccagcagggctagtgtgtatgcacagtgtgttgcagtgcttgtgctccagctgcacgtgtgtagctgcctctgtgtgtttcatgaacagctctgtgtgtccagtggctaactctgcctctggtcccatgggctaactctgcctctggtcccatgggctttgcatggtgtgtagatgtgtctctggttttgtcagtctgactctggtctgtgtgacagtttttttttttttttgacagagtctcattctgtcgcccaggctggagtgcagtgacacgatctcagctcactgtaacctctgcctcccaggttcaagcgattctccttcctcagcctcctgagtaggtgggattacaggcatgcaccaccatgctcggttaattttttaattttatttttttgagacagagtcttactctgttgcccaggctggagtgcagtggcgccatcttggctcactgcaacctccacctcccaggttcaagccatccttctgcctcagcccccatgctcggctaatttttgtatttttagtagagacggggttttgccatgttggccaggctggtcttgaactcctgacctcaggtgatctgcttgccttggcctcccaaagtgctgggattataggcatgagccaccacacccggccagtctgacaattttaactgagtgcttgatctttactctctgtgtgtatccttttagatttttggtttgattctgagaacactagatagctgatagtgtgaccagagatgtctcattattatagttagctcccattggtttatttctgtgtaactgtatatgagatagaaagagaccatgtgaatgtctagaacataggcattcaatcaagttgttttgaatgcatgagcagttgttcagctgattctgtcttaactgactgtcttgcctggtcaccttcctccaatatctgtacagatcccaccttttctcagagcttggttccaacagtgtggccagctggatgatttcgtttctatttcagtctttctttggctgtgcagccaaatcagtccacaggcatactttcaggcatccaacaaaccttgagctgttcaaacaagcatgcatgtgtgtttctgactttttgatggactctgcatcgtggcttgtctactggatcatcagactgttgctctacctgtcagacataccacgatcgtgactcactctctttgtgtctggcaccttgtgttgcactgattttctcctttctttctttctctttctttctttctttctttctttctttctttctttctttctttctttctttctttctctctctttctttcttcctttctctttctttcctcccttccttcttttttttctttctttcttcctttttttttttttttttgagtgtcttgatctgtcacccaggctggagtgcaatggcgcgatcttggctcactgcaacctctgcctcctgggttcaagtgattctcctgcctcagcctcgcgagtagctgggattacaggcacgcgccaccatacctggctatttatctatttatttatttttttgagacagagtctccctttgtcgcccaggctggagtgcagtggcgtgatctcggctcactgcaagctccacctcccgggttcatgccattctcctgccttagcctcctgagtagctgggactacaggcactccccaccacgcctggctaatttgttttgtatttttagtagagacagggtttcaccatgttggccaggctggtctcaaactcctgaccttaggtgatccacccgcctcagcctcccaaagtgctgggattacaggcgtgagccaccacacctggcctggactgatttttacattgagtctgactgatttggggtgtttgaccttctggttgtgcaaccacttgcgaagtctgatggcaagttttgtccagctgtgtatgtgttagctgtgtcccactgatagtatctgacaatctcataatcagcttgactgtttttgtcaaccctattgtgccgtttgtcactgtgaccacctgaatgacttctcaagctgaggttgtcagcttaactctcctgacttagggcagaaagctgcctgtccagctgtcttctgtgagtgtctgcctgacagtttcctttggctggcagctaggcactgtgtcttcctgtctctctagggactggttcttgaagggaaacctcctcatcatcatcgtcagtgtgttaatcatcctgcccctcgccctcatgaaacacttgggtaagaggctccctgggttggccattgggtagtgggattagacagaagaagccagactgagaaaacccccattcattttcaagggctgcagcacactaggagagagcttatttgatgtgggcttgaacagattagtaggagtttgctatggaggggaggtttttctgggtggaagtagaagcttatgcaaaggtaactggggtgggtagaccttgaaggctagactaggtgtttggagttcactgttccgggggtccattgattttttgttttgttttgtttttttgagaccgagtctcactctgtcacccaggctggagtggtgcaatggcgtggtcttggctcactgcaacctctgcctcccggttcaagcgattctcctgcctcagcctcccgagtagctgggattacaggtgtatgcgccaccacacccagctaatttttgtatttttagtagagatggggctttgccatgttggccaggctggtctcgaactcctgacctcaggtgatccacccgcttaggcctcccaaagcgctaggattataggtgtgagccaccacgcctggctgatttctgagactctgtgttttgcccctcttaggctacctggggtacaccagtggtctctctctgacctgcatgctgtttttccttgtttcggtgagtcacagagaagcggggagagagtttgggacattgggacatagcttcctccatgacctggcttccctgctgcccccatcctcaggtcatctacaagaagttccaacttggctgtgctataggccacaatgaaacagcaatggagagtgaagctctcgtgggactccccagccaaggactcaacagcagctgtgaggcccagatgttcacagttgactcacaggtgtgtgtgcaggcatgtaggagattgcatcacactcaggccctctggttctgtcatatggtgcatcctgctcagagtggagctggatattggacattgggagcttctatgtgtctgatatggagggcgattacggggcgggagggggatgggaagaaggggatggacccctgttggctctaatcccatgtactcgggcattcccctagatgtcctacacagtgcccattatggcttttgcttttgtctgccaccctgaggtgctgcccatctatacggagctctgccggtgagtgggcaggcaagtgggcctgaatgatgggccagcaagtggggtggtaaccagaatgtctgacactccctacagcagtcctgggactgtcacttggtggaagctaggttgtgtcatgggaggggtttggggtggccaggaggtcttggggcactcagggtagtgactgtttgctgattggggcttaagtattctcctattttaatatccagcacaaatgtggatggacagagttgggaagcagagatcagatgatcagatggagggggtgatatgcatggctggtgatatggggatagggaggtacggacagacagaggcggaggcagggatgatatgatgggagatgtgtggatgatcagacagagggacagcatggatggtcagatggaagaggcagtggcagtcaaacgcaggggagagggagacagtcatatcgggggagatatggatggtcagagaggggattttggctagtcacaggggaggcagagacgggtgtccccatgtgtgccagctgaatggcagtctgggagaaggggactctggagggtggaggctggctttgagggacctggggcaagtctcagggtctgggcatgacagttccacgacctctacacctcaggccctccaagcgcaggatgcaggccgtggccaacgtgtccattggggccatgttctgcatgtatgggctcacagcaacctttggatacctcaccttctacagtgagtggggctggggctagggctggggggagggggaaggcctggggcaggagcctctgagctctttccttctgtgaccacggacctgtcagtttccaaacagaaggtgtgcctcacttgtgtggattttgtcactgtgcatgtatgtatgggtttctggggcattggtcctggtgctctctccacatcctgcatcccgtaccctctgtctcatggcccaggcagtgtgaaggcggagatgctgcacatgtacagccagaaggacccgctcatcctctgtgtgcgcctggccgtgctgctcgcggtgaccctcactgtgccagtcgtgctgttccctgtgcgtggggcccacggctgagagggacatggatggatgggtagagggcataggcatggatgtgtgggtcaaggctggaaacaggagtggatggatggatgaaggaggcaaggatggacagacaggaaagggcagtgttttcagatggacagagatggcaaaaatcgataaacagaagtggggaggacatagatagcaggagagagagggtcaggggacagggtagtcagttggagggaggaggcacagatggatggctagaaagaagagggaggcaggaagggtcagttggagggtagaattaagaaacagggatggacagaaaaagggtggaggctgaagtgatgggatgtaggagggtcaagtctcccagatggggaggcagaactaattagacagaggagggaggtagaggtcagatggagagaggcagggagctcacacagggtggaaggatcggtggatggtcagacagaaggagaaggcaaagatggtcagctagaggaggaggcaaggatttcagacagtgggtgcaggtgccgatgggtgttcagacagaaggaagagacgtggattgtcagaggatggaggcaggaagcctgttcagaacatagagacacagatgttgggttaggcagggtggagccatagatagtcagagggaggggaaatcagggatctcagccagagggtggagctaaagacagatgatcacgtggaaggggggcagcacttgggtcctgacttctgtcccaccctactctggccacagatccgccgggccctgcagcagctgcttttcccaggcaaggccttcagctggccacgacatgtggccatagctctgatcctgcttgttttggtcaatgtccttgtcatctgtgtgccaaccatccgggatatctttggagttatcggtcagtaaacctcaccccagtcccataccccatctaatatgggccttgtccccaagtcaggttgactcctgtcccttcttcttgttctccagggtccacctcagcccccagcctcatcttcatcctccccagcatcttctacctccgcattgtaccctctgaggtggagcctttcttatcctggcccaagatccaggtaagcattccagggcagagctagggagagagggagcactccaaggagggagtgctcactccaggatggctggaggtgaaagggacatgcataggagggggctgggagagcatctgaaagaatggtctggaagaatgaaggtgattgtctaggaaggggcagaggagacagagcaccagcagggtccaggaagacagggagcactcaaacagaggctggcatagagggagcattctccagacagatggaaagagcactattgggaagagagctggaagcactttgaagaaggaggatggaggaacgtattctgtcatgggtcctgggaaggtggaaggactcgcagaaaggggctggctgtaaggaaggagagggcatacagaggagggtcaggaatggatggagcactctctgaaggaggtggaagacttgaggaacattctcagaaggcaactgggtgaggagtcccaaccagccccatcttgtctctctggcccacaggccctgtgctttggagtcctgggagtcctcttcatggccgtcagtctaggctttatgtttgccaactgggccacaggccagagccgcatgtctggacactgatcaggccctgctggcccaggtccctgtgcgcatgcacatggaggggtcagggccgctccctagggtccctcctgcccaacatgtggaggtggctggttcccatgaacgtggttgtcagaggcgggggacagcagaggctgcagactggcccacttccctcctccccagggatgccaagcttggatcatggccctaatcccaaccccaaccccatgggaggaggaggaggaggaagaagaggaggaggaggaggaggaggaggaggaggaggaggaggccaggtcctggtggagcctttgcccagcccagtcctctctgcctcctcctggctgaagctgtttgtcaggattaccctcgggctaaagaggaaaaataaagatgttgagctaccactctgga

SEQ ID NO: 1934 - DNA, 742 bp, Homo sapiens
tggctactacccctgcacctgttcccctgctgtccccaggcctctctgcctgaatctgcctctctctgcctcttttctcctgtccctccaggagtctctctgcctcaaccactctctctgccccttcatctctctgagctggtgtgtctggtcctaccctctgtttggggagctgtctggctctgtcccccacctcttggccagcctgtgtctcctgtctatgactgagcccaattgcctgttgcctttctgcaggtgtttccacgagcctatccctacccacctgtttgtttctgagtctgcctgtgtgtccctttctccctgtctctgcctgtcttccaagctcccctagcatcccctcctcccgcccatctgtctttctgtcccttctgtggtctgtctgttcctgtgctgtttctcatgcctgctttctttgtaacttcagttctcctactctctctctgtctcctctctgcacctttttctgccatccatcccatcctgctgtccgtctgctctgtgagtccatcccctctgtctgcctgtcactctctctagctgtgggtctacaccctcaatctttcaggccatttcccccaccatcaacacacaaacaaaccgctgtctccctccaagtgggtccagatagggggcgccccttctccacctcttcccccgcccagggccagaaggagggaaacgaaattaaaattaacatttcttctcaggaaaaaaaaaaaag

SEQ ID NO: 1935 - DNA, 1340 bp, Homo sapiens
acagcagagatctgtggagtaggattgtgggctggcagtgggtttatcccacagacctaagacagctacttaatttgtatagacccttcccagcctgggcctctgggttttccttctgggtggagatcatcttctgtaggaaatggaactgcttcaagccaagaagcttttacttttactaggtctttttgtgtcctgctgttcaaatattaggaagactgaaccctgtttcggtcttgacagtattacgtttcgtgatcccaaaaaaaagtgtttgtgtaacctcaagtcatgctgaaagtgaaatacagcttaaagtgggattctgctggacctgactcaacttttcacctcaccgcttggctccgtgcaggcagtatttgagtatgtggttccccctcaagtctgtaggagttgtattgtcaataaagtccaaggccagagtgcttgctttctagtaagtagagagaatttttgaaattcaacgacaaacatttattaagcccttattgtgtacagggctcaaagctaagtgctttgggtgattcagggtgattagggataggattccatcttcaagaagcctcccatctaggaagaaaggtcgataagcatagttttggacacacgggagagcatggctttctctgggcccagtaattactttggtatccagatcattagagaacggaatgccttctattgaactatgtaacagtcacaggtttagatcttctcaagttattattgcctttaatcttcatatgattcctatcctgcagttaggaaatggaaaccctaggatatagtgactgtgagctcagaaaattaggttgggagataagccagtagattgaggtggtagattcttcaagatcttgaaggggggaaggtgggggggggggacgggggagctgttcccagctatatttgcccttggcagatgggatggattctgggagaaagctctaagaaattaggcctgtacgacttattttcatgaatctagctgctaagctggaataagtgaagttaaaagtagtgatgggccaggcacggtggctcacacctgtaatcccagttctttggaaggctgaggcaggcggatcatgaggtcaggagttccagaccagcctggtcagcatggtgaaaccccgtctctactaaaaatataaaaattagccaggcatagtggcacgtgcctgtaatcccagctactcaggaggctgaggcgggagaatcccttgaacctgggtggcaggggttgcagtgagctgagatcgtgccactgcactccagcctgggtgacagaatgagactccgtcttaaaaaaaaaaaaa

SEQ ID NO: 1936 - DNA, 147 bp, Homo sapiens
acgcctgtaagcccagctactcaggaggctgaggcaggagaatcgcttgaacccgggaggcggaggttgcagtgagctgagatcgtgccactgcactccagcctgggtgacagagtgagactccatctcaaaaaataaaaataaaaa

SEQ ID NO: 1937 - DNA, 590 bp, Homo sapiens
ctattttcaaggagttcacttacactcagggaccctaggaacatttaaaggataattttattgtcataatctgcccttaacaaaattaacaaaatgaccctcaaaatttgctgattcagccattcctagcaatgaaaggaggaacctggctacctaccagacttcttatttctggtgtacttggttcttggtgacctctaggcaggcagcaccccagcagggctggactgtgtgtgctccctggaaggctgacatttccggagtgtgaatgctggcagtaagacatcggaagcatcttcctctttgagtgtgccaactcttggccaaagatagctctagaaattgtaagaactttgagagcagattctgtttgtcctatagaaaactcccatcagcatattgcctctacatccagctagaatgtgtcagatttcacatgttcattcatagtctcaaccactcttttttcccccctctctttttatctttttccagttttttgtttgttttatctcttcatcacggtgaatggggttcttacagcttagagttgtcttgtttgtgtgtactcatgctcttgaaggaagggg

SEQ ID NO: 1938 - DNA, 16772 bp, Homo sapiens
cggtgccgtggcccaggggccgggccgaggtcccgggggcggtgccttgcgggcccgtcccggggcggtgcctggtgggctggccccgcggctcctcccctctctgcgggcccagtcgccctttggccgggcgagctaatcgtcggctcaatgacgacgaggcccgacccttcccgtccaggacctacagagacaaccgaaggagagcccaaggcggcttctttgctgtcgccgcccccactgaagcaagagctccccggctccactgaaacaccagctcatttaagctttccccaacgcccggccctccgggacgatacctaacaacgaccggcgcccgcatctggaataggctggcgagatacttagtatccgagggctcgggacttggcgccatcgaggtcatggggacccaggatccagggaacatgggaaccggcgtcccagcctcggagcagataagctgtgccaaagaggatccacaagtttattgccctgaagagactggcggcaccaaggatgtgcaggttacagactgtaagagtcccgaagacagccgacccccaaaagagacggactgctgcaatccggaggactctgggcagctgatggtttcctatgagggtaaagctatgggctaccaggtgcctccctttggctggcgcatctgtctggctcatgagtttacagagaagaggaaaccctttcaagctaacaacgtctccctaagcaacatgataaagcatataggcatgggcttgaggtgagtagaccccattgcctagaatgcctttggcttcactttgttccagctcaaaacttctagcagaggtgggaaagggcaagaaagcagttgggcttcttgtctgagtgaagcggtccctatccctggcatattttaggcctgtggttttggaccgtgagaccaggtcacatctctttgcaacacccttccctcccagtgttttgtcttttcagaaggaaagggtaggaacatttggtcatgcaatcagcctttcccattcaggctcttctcacatactggtttccaatgacttccctttgggattagctatactttgtggcaaggtaggaaaggataatctggctgctgtgatactaacacaatgttgttttatttgggggtgggggggtctcaaccccttatttcccacaagcagctggggcattctctgtacctcattagacacactgttagagtcccaacactactgcttctttcttcaagctttagctccagggagtaggtaagaagagcctccctgccctcacctctgaagtgatgagaaggtgctgtcattctgttctgggatagagagctcttgatattaagtcatttatcagagaggcactgccatagatgtagaacccatctagatccccactgagttcaaagactagtgatgaggagccagacccattaacaggaacaggtggatgtgaggacagaaagcatcaccctgaggtcatcctgactcagtctacacaatacacacagaactgtggagggaggcataaagcttgggaaaccctgcccttacagtttctagagtaggagacccttcatttccccagtcagtgctgtggggctgtgatggggagatcagttatctaaccctagccctggggagtgggaagggcctgatgctgcctgcacatctggctttgttggtgcctgtgggtagcctgtagcagagaagaatcatccctccaggctgcttctggaatcaattcagtccaagtttgaccccaaaagtttttgcatcaaaataggatctagtgtacatagagaagtacactgagttgcatgtggtaggaacaatgagatcaagaaaagatgggcatcctagcctcttagcccttaaatatgaactgagtcatagaggcctgaagctgtgctcaaccccctggaccctggctccccattccaggatagagtggggggtactgatacaaggcttttggaataggatgagttcctatgaggagaaagcacaggtgagacaagaattctaagtgataactcttgagttgaggttgaaattgtggagaaggccaaataggtcaggaatggccagctaccatattaagggagtaagagagctcctaagatggagctgaactgtgggcactctgaccaggagctctagcaagacagaattctctgggtcttaccttcgtaagaactcaatttcaattgttctcccttccagccagagtccactcattcaataaatatttattgagtgcttgttccatgccagatagtcctttgttctgtctgtcctcatagattgcagttactctccctggttgccctaatcctcggccacaccctccctctaccagtcctttctggtctctagtttcaaagtccggttttctctaagctggcagagaggattctctgccttcctgtcatcccatcctttgtcttccctcttctttccacccctagaatgtgctgtccctttttattttattattattttttttttgagacagtcttgctcttgtcacccaggctggagtacaatggtgcaatctcagctcagtgcaacctccgtctcctgggttcaagcgattctcctgcctcagcctcctgagtagctgggattgcaggtgcctgccaccacagctggctaatgtttttgtatttttagtagagacggggtttcaccacattggccaggctggtcttgaactcctgacctcacgtgatccgcccacctcggcctctcaaagtgctgggattacaggtgtgagccaccgtgcctggccgctgtccctattcattaatcacatttcttctcctctgctccagtctgttatctctcttgtgccccatcatttgtatgttcattcatctgtaaaattggcaaatatgcattgactgcagaccatatgtcctaccctgtgcttggacctgagggtaatattcagctagtctttgtcattgtccctttccccaaggaacttaaaagtatgtcagcctcacatgaggaacattgaaataacaaggcaatgtctgattaggaattgagataacagtttgtatatatgagtaataatcatacctgtactttatggctttcttatctattatgtcatttgatctttcaaccatttcattagatagctagagcaggtggtatccccattttgtagatgaggaaactgggacttaggggttacttacccaattatttggttagaagtggtgtgactgaacagtaggcataatgtggcagtaggcaggagagtggaaatgggaaagagtctggcagggcaggggctacttagtgaggacccatctggaatgagaatttgtaggaaataagattagaagataggctgggacagatgtcagagccttgaaaacagaatcgtttgcctattgaaaacagcctcaatcatttgcctcttggatatagggctgtaccaagcccaggaaaatgttgggattttttgaaggctttaccaagagcaaaatcagaaagcttcacagtttaaatgttgaatttaaaaaaaaaaaaaaaaaaggcttgagaggaaatgtccagaaataaatataaacactgattgtctatgggtgagattatttttttccccctttcacctttcataattagaaagaaaaatgatcattttaaaaagaagaaaggccagaagcggtagctcacgcctctaatcccagcactttgggaggccgaggcgggcggatcacctgaggtcaggagttcaagaccagcctggctaacatggtgaaaccccatctctactaaaaacacaaaaaaatgtgccaggcatggtggcgggcacctgtaatcccagctacttgggaggctgaggcagaagaatttcttgaacttgggaggcggagtttgcagtgagccaagaccgagccactgcactccagcctggacaacaaggaacgaaactctgtctcaaaaaaaaaataataaataataaaaataaagataagaaagttattcccagcagcctatgcctgttttggaggtaggggattgggggcggaggctgtaggccaggaaaccataaatggtcctttcagcacgtcagacagaagctcctgatgttggaaataaagcagtggtggtggtgctagagaggtaaggagagatcagaaagccccttctgaggagaacaaaggagagaaacaaagccactccttcacttcagctggggtgactgggaagatgaagggaccttgaactgtatagaaatcaagaggaagaaaggtttgaaagcagatgtccttgggacatttaatgggaggtcacagagagaggcaggtgactcagcctgtgaacagctgcccacctgcccccttccactcacattgcctcttgctcctcaggtacctgcagtggtggtaccggaagacccatgtggaaaagaagacacctttcatcgacatgatcaattctgtacccctaagacagatttatggtgagccccaccccatctctgctctgctcagagaaggcctagcctccaggtctaccacagttaggaagagacttccagcttatgcaaattgcactgttccatcccctaggttttcagaggaaccaggctttatagtctagaaagttagaaatgggcttattttcctctcccaataccccactaaccaccctgatttctctaggttgtcccttgggtggcatcgggggaggcactattacccgtggctggagaggccagttctgtcgttggcagcttaaccctggaatgtatcagcaccggacagtcatcgctgaccaagtaagagccaggaggtggagaggccaggacaatacctccccaggccaagaaggaaggacctcttggctagtgtagaaggtagcagttagatgtgaataagattcaatctaataagtactctcgggatgcttcctgtgtgcccagccctgagctaggatataccgtaggaataagacacacacaagcacacattccttgaaagagtaaacagatctggcatttctctagtaaatgcctcctgtctacctcactgccccaacccaactagctgaggcagcccccaaccacagagaatgcagagaattcccaaatcacttaacctgcctgaaagaacattttgtaggactggaagggaaaagaaaacccaaagtctataaactcatgggaaaaaaagacacgtagtacaaggttcctcaccctgattgaggaaccttcaccaaagttcagctcctctgctgatcactcccctggaggtctcctggcttagggtctaaaaagctccttctctcccaggcttagatctctagccttcttccctcttctgaagcttcacttttttccttttgctcctgcatcacatctgggccttaaattgccagaagtatgtgtcctgcctctcatcatctctctctagttgaccgcccctttagagttgcctaggaagttcctctttcttggctccagcattcagcctcatcttcaaaggaaaaatgactagcaaatctttagtccaattaatgacaatacccttcctggttcacgtttaccagccctgcccatgtcccaagatccctctctgcctcatcccttaggtatcctgaggggaatggcttccagaattgtgactctacaattaaagtaattattgcatgcttaacatgtgctagacactgtgctaggctctttgtatactgtttaatattaaaaacaatcctacaagggaagtaccactattatgctcattttgcagatgaggacactaagatccagagaggtttagtaacatgcgcaaggtcacaaggttggtaaatggaaaggttgggattcagaaccatttctttctggggtgaagagcttgtggtcttaaccattatgtaccattccaacaaaatgaaaaattattttatacagttgtccctcagtatccatggggggttgggcccaggacctgctatccgaggatgctcaagtctttgatttgaaatggcttatagtatttgcaaataaccattgcacatcctcctatatactttaaatcatctgtagattacttataatacctcatacattgttacataaacccttgttgtgccgtacagtaaataaagtgtgtacatattcggtacagacacaactttttttccacatattttagatttggttggttgaatccactgatgtggaactcacagatatggagagcccactgtatacaataaaaatatttgacatagtttgaaccagggaaagggatattaatccctcatagctcctaccctccaagagctaaaactttttttgagaaaataagacttaggggaaatggagactgtgagaccacatcagtgctaaaaggagaggggtggatagtatactgtggaaaaagggacggtgctgcagatttcgctcattccctccacatacatgccaactctgaagaagggtgcatcagtgaattaaaaaatgtccctaccctcagaagaatccatacagcagtcagggacacagaatggtcagtcaatacattataacataatacaccaaatgctagaatagaaggggaggggggcacacataatgactcactgctggaagaagtagaggaggaagagatggcttttgacctaggctttgaaggatgagaggtttcaccagatagcgaacaagcatgagcacaggcatggaggagagaatgtagtgtgctcaaggaacagtgagtgtttttatatgaacagactataggtgcttgaacaggtgatgagtctgatgggcagggagaggccagctcaagaagggccttgaaagccaggcaagagttgagactttagcctgagggccatggggagtcactgaaacatcctaaccaaggactgacatatcttgatttgcctgtgagaaagatcactctgctacccagatgaaaagggccacagaaaaagcaggagattgggcttaagtgaggtgctaacaccaccgtagtggagaagggagagaaagcttgggagatagatggatggggaggtagcaggacttggtgattcactgagcctgggggatgacttgaagctgatggtgcagtggtaacagttgcaggctctgaaaggggaggagctgatttgaggagagggaagacttagtctgtggtccctgtggtttaccccgttccagcctatctgccctcttaagttcacagtgtgcctgcgtcgggaagggcagactgtgtaccagcaagtcctgtccctggagcgcccaagtgtcctccgcagctggaactggggcctgtgtgggtactttgctttctaccatgccctctatccccgagcctggactgtctatcagcttcctggccagaatgtcaccctcacctgccgtcagatcacacccatcttgccccatgactaccaggtgaggcccccacatctgtatcttccattgccctcccttccccaggacctgcctctgctagaaactgcatggcctgcgaggcgcggtagctcacgcctgtaatcccaacactttgggaggccaaggcaggcggatcatgagatcaggagatcgagaccatcctggctaacacgtgaaaccccatatctactaaaaatacaaaaaaaaaaattagctgggcgttgtggcaggcacctgtagtcccagctactcgggaggctgaggcaggataatggtgtgaacccgggaggcggagcttgcagtgagccgagattgcgccaccgcaccccccaaaaaaaaaaaaaaagaaactgcatggcctgtgaaagggaggttggagccatgaacatcacactggcttcccagaaccaccgcccaactggttctggtcttctatattccctgctaggcagcttgcctgggaatatggggagatgcaagtggacaaaagaagagtacactggggagtatttgagtcaggtcctctgtgtgcccaggactgatcctagcagagtggggtcaggaggcgctctactgggaccgtctgagtctaatcttctgcccccaggacagcagcctgcctgtaggagtctttgtgtgggatgtggaaaatgaaggggacgaagctctagatgtgtccatcatgttctccatgcggaatggactgggtggtggagacgatgccccaggggtttgtggaatgagcccttctgtctggagcgtagcggggaaactgtccgggggctgctcctgcatcatccaacccttccaaacccctacacgatggctgtggctgcacgagtcacggtaaggaaagagcctgccctataccttagcccctgaaccccacctccaccccagcatggtctcttcatccaccctcatcatactcctgtaagcccctgggcctgggaggttaagagtaagtaagaggagctggggagctagccgggacccagtgtactcgtggagcctgccctcacagtccctgaccccttcacaggcagctaccacggtaacccacatcacagcctttgaccctgacagcacggggcagcaggtgtggcaggatctacttcaggatggacagctggactctcccactggtgatggggggtctgactgggagatggtgggaagagaggttgtccctgtcttgggaccaggggtgggaggcctggtaataagtaggccttgtttccatgttagggatccctatccctggggctgaaggggctcctgtcctgaattctcttgtgtttctctcaggccaaagcacccctacgcagaaaggagtaggcattgctggagctgtgtgtgtttccagcaagttgcgacctcgaggccagtgccgcctggagttttcactggcttgggacatgcccaggatcatgtttggagctaaaggccaagtccactacaggtgaggggaccaagaaagtgtaaggatccagagtgctggggctctgacctggggcttgtgttcatccttccccttcccaccccaggcggtatacaaggttctttggccaggatggagatgcagcacctgccctcagccactatgcactgtgccgatacgcagagtgggaagagaggatctcagcttggcagagcccggtattggatgacaggtgccagtggggcccatttcttgcctttctcctgggcactcactccaaatgggactcctcgatttactctccacccaccaaagtcagtagacttgcactgggattcatttgatgatcccactctgctgaacccccaaatcctttccatcttgggaggtacatgttccttaaaccatttcctcctcctcgcttcccagatcactgcctgcctggtacaaatctgcgctgttcaatgaactatacttcctggctgatggaggcacagtgtggctggaagttcttgaggactccctaccagaggagctgggcagaaacatgtgtcacctccgccccaccctacgggactacggtcgatttggctaccttgagggtacaggatgctggtgggctgggatatggcaggccatccccaagtcaggatgatggatttgcctaccccagggtattggttaggatgagggggtgttgggtgtggactagtaacaatgccccacctctaaatctagaggacaagctacagaggggtttgaaggggaagcaggaattctggcaacagtgtgtctcattcattcctccaggccaggagtaccgcatgtacaacacatatgatgtccacttttatgcttcctttgccctcatcatgctctggcccaaacttgagctcagcctacagtatgacatgggtgaggatcccttttgtgccgcttctgccctcttggctccccatacccccgaacttctgtggtccctcagattgtctcttctttcccttcccttcatacgtatctgcatgctgcttactggttccccactgcagtcacacacatagctgtgtgcccctcctcaggcatgcccattccctgcctcccttctgtgtctctcccccagctctggccactctcagggaggacctgacacggcgacggtacctgatgagtggggtgatggcacctgtgaaaaggaggaacgtcatcccccatgatattggggacccaggtaaaagtccaccccaaggtcagcttccctccctcaacttttgcaccctctaccctatccaccaatgcaagtgacccaagtcccctcctctcccacagatgatgaaccatggctccgcgtcaatgcatatttaatccatgatactgctgattggaaggacctgaacctgaagtttgtgctgcaggtttatcgggactattacctcacgggtgatcaaaacttcctgaaggacatgtggcctgtgtgtctagtaagggatgcacatgcagtggccagtgtgccaggggtatggttggtgtctgggaagagcctagctggttgttgcctttcctcggtacctaggtcttcaacatcttggtccctctctaggctgtgatggaatctgaaatgaagtttgacaaggaccatgatggactcattgaaaatggaggctatgcagaccagacctatgatggatgggtgaccacaggccccaggttagcgggtaggggtttccaggaggcctgaggtgagaaactgggcaacaagggattgtagggctcaagaaagaatgactcattgtctattacacggcatgggagcagctggagctgccagtctgacccccaaacccatgtccctgatcagtgcttactgtggagggctgtggctggcagctgtggctgtgatggtccagatggctgctctgtgtggggcacaggacatccaggataagttttcttctatcctcagccggggccaagaagcctatgagagactgctgtggaatggtgagttcggggagcctaagtagtcttaaggcagctgagaggacaccaggagccttatttttctcttcctcgactccaggccgctattacaactatgacagcagctctcggcctcagtctcgtagtgttatgtctgaccagtgtgctggacagtggttcctgaaggcctgtggcctaggagaaggagacactgaggtgagagaggaggaggagcagccagagagaaaaatgggttttccctggaggtgggaagtaagtatatgagaccatgttcctgcccttgcccctccaggtgtttcctacccaacatgtggtccgtgctctccaaactatctttgagctgaacgtccaggcctttgcaggaggggccatgggggctgtgaatgggatgcagccccatggtgtccctgataaatccagtgtgcagtctgatgaagtctgggtgggtgtggtctacgggctggcagctaccatgatccaagaggtaatgcactccttttcccatctctccaccatctgtatcctggcccagaaaacttcctcaaccaccaaatttcttcaaggcataacccaatgccatcttgtccgtctataaagcctcccatttttccctggtatgcattccagctcctgccttcaggcttctgtctgtgggtcatagttatctcctccacttgctgggagctccttgaaggcaaagactctactgcctccatctatccagtggaagtggctcttcagagggtgccaagttagtatgtatgactgtcatctctcccaacagggcctgacttgggagggcttccagacagctgaaggctgctaccgtaccgtgtgggagcgcctgggtctggccttccagaccccagaggcatactgccagcagcgagtgttccgctcactggcctacatgcggccactgagcatatgggccatgcagctagccctgcaacagcagcagcacaaaaaggcctcctggccaaaagtcaaacagggcacaggactaaggacagggcctatgtttggaccaaaggaagccatggcaaacctgagcccagagtgagccgtctgaactgtgggagggaagtgctaacagcccagcctccagcctggcctttcctccttcccctctgaacctcctgcaaccctgagccatcaggacaatcataccccttcccttctctccacccaattgtgccagtaaatgggggttgagggtgacctaggcagcattagaatcacttatttatttctttcctcacctgttccctgactgcgtgaaatgttcagggaggtcagttgatttccccaggtacattcatggtgtgacagacacatgggtacaaataaaagacccagaaagccattaagtgtggtgtgtttgagccctcagtcgtcctgacagggcacaggagctgcggccagcccttgcccaccgctttttatttggacacagatggggagccccccaggctcctgctgagaccccccacatatcctcatatctagcctgagtatctgtcctgcaaaatgacagaggggctaccagtaggaagccatcctcccttccttgtgagatttgcctgcagggggaggatgggacctcggcagagaggctctgagaagaggtcagggaatggccactccaggggaggctctgcactgggagcctgaggcatgtaatgcagcaggcaggaagtgttgccaggggcctggagtacacagtctgagccgtccaaccactggtgtgtgctgtctttcggcacttctgactgcagggcaggcagctccagctggtaagggtcctcactggggagggcacgaagctggcgggacaacactgaggagacaaagaatcttcagaggccaacccagacctctccccttgccctgtctgagagctatccttaagcctcttacctccatgctcagctggcaggctcccccttgtgtcagaggagtacatagcaggtacaaggaggaggcagaaggagactagtaggacctagagcacaggaaaaaggagatgaagaagggctctggattgccctgtccccaccaactgagaaaaggatttctcccctcatcaccatcctcaccaagatgcaggtgctgctgctgctggttttgtttgatatctcaatcaccatggcctggagtttcctcagttgatctagaagggacctagaggaagagaggggccaatagtgagcatcccctggcctagcatcctgagacacagtgaaactcctgttcaggccacctcctccatctctgcactggatcctctctcttacttttcattctatttttgcaaacgacttcttcctctctggacaaaatgcctgaagttcctcattaaaacaacaacaacaacaaaaagcaaaaacaaaacaaaacaaaaaaactctgccaggacttaacctcctttgcgaatatcatcagtcgttccccactgtctgatcagctatgcacataatcctcaccaggcattttctatgttctctaccttctgtcccagctcatgtgtgttaagagttccagcccaagatgactatgctggactagtcctcttgcctaggatgctttctctctgcctagaatgctttcccaacccaaccccagaatcctaactactatgaaagcccatgacgtctttcttaccccctttctttttcttggtacttaacttattcttagttacttgtaaatgtattcctcactactgggagcttcttggaatcagagacctagtgaaggcagctgcccagttagaaatcaagtgtagggcaggggaaagagtgagaaagcattaaatgaggggcataggaagggaatggtttggagggatacttacaaattctgttcctccagaagctgtactttgttctgaagctccatattctgggctgtgtatttcaagaccctgggggaaataacaaagatacggggatatggcctgtatcctcccttcaaaaacctaatacttacaacagagtccctctccctttcatacctgctctctaaacccccaacatacaccttctttttcctgcggctctcttgagcagatcttttatttcgaatcttcctccgcacacgtttcagaatttgttcctctgtctgaaaggaaacagggaaagggatatcattagaggaactctagaaaaaggagttgaaacgcaactgagatcaatctctttccaatacagaaatcccttctacagcttccctgaccaacaggcattcagattctttctgaatgcctccacggaccaggtgttaaccctaacaagccagaccattttaaactattaaaaaaaaaactggtcgggcagtattcaggcgacgtggctcatgcctgtaatcccaacactttggggagctaagacaggaggaccggttgagcccaggagtttgagaccagcctgagcaacatagtgagaccttgtctctactaaaaataaaaaattagccgggtgtggtggcacatgcctgtggtccctgctactcaggagactgaggaaggaggatcacttgagcctgagaggttgaagctgtagtgagccatgatctcgccactattctccaacctgggcaataaagcaagaacctgtcttcaaacaagcaaataaaaacttccttatcctgaaccaacagctgcctccttataatttctatccgttggacttacctagtatctctggggccaaatagaataaaccctgtttagctattttaaggcacttaacatttcctcagagcttaaagaaaaaaaaaaagacaaaatttttaactcatcttctcaggatagactgcatcctcttagtatctgtcaaagatgtgctctagccagtatcaaggaaagcaagagagtgacttgtagagacaataactctattgctacagtttccaaatcccatgaactttcttagtagccacatcacactgctgactcatcttgtactttgaagaaattaaaattcttcactttgggaggccaaggtgggtagatcacttgagcccaggagttcgagaccagcctggcaacaaggcaaaaccccatttctactaaaaataccaaaaaaaaaattgccgggcagggtagtgtgcacctgtagtctcagctactcgggaggctgaggtgggagaatcacctaagcccagaaagtcaaggctgcagtgagccatgatcacatcagtgcactccagcctgggcaacagagcaagaccttgtcaaaaaatatatatatattcctgtaacctttctattaatgagcactgatttcatcatagtaccccagtactctgcttgtgaagttgccactcattgcttaaaactgaaaactaaggattttacatttattcatgtactgcttagtccaaccctgttgaactctctaaacagttctaccattcagcaagaggtggattactatgaagccaacgaagtgtcaaggcccttcacttacacagtcctttccaaggcccaatactaatgttgcactgataattttgagttatttttttaacagaacaccaaaatttgtataagcccaacaaaaacgaggatctgcccttgcatctggcatattgtgtacctgcctcaacttcctattagcaataaatctactaagtttctcacctcaatccttttttaaagttattgatataaagttaacagaatttgcctacttgggacttttaatcccttttcagcctttgttcaaccaatgagagtcttaccttagtgagaggaagtgtctcaggcagaataagcccctccttctccaatagactcttctcctcatctgtcagtactagcctagcaatctcctagggtaacaagaaagtggacggcagttgcatggggatgtcagagaggaatggggaatcctgcccccacctggggaatgtgagagtaatctcctgaaaatcaagtcaagtacctgctctgccagctcctccatatgctgtggagtcatctgggtcccctcttttctacagctctcactctctgcaaaagggaaagtatgaatagccaggcccatgaaccctgtcctccccgcaaacttatttcagactcacctagatccatagagacagtttcccgtgggagggagtaggtgtggtcatggtggacaaggcaggggttggaggagctgagaatgttcaacgacgctgggggactcagcagggagcacagcaaatcatctacttcccagtcgctcggtacctgcgcagggttccaatgaacaggccttgaccttatcaccatcacctgacttcatggacatcccacgctttccccagtcagaaccccaacctacctcagaaagcggcagcgcccagtccagtggggccctcacggcctcatcgggtgccgtccccaaatctccactttcctctagcaggaaggccagcaggtcttggtcaccagcatccaattccagctccatttgggacaactacggaaagggtgggccaccgggccccaacgtccgaagcccagacacgagccccaggccagctgtaggcctcgggcacctatccactgtccctctacggccgggattccccgccggcggctttccatagccctctccggacccgcctcccaggctcaattctcctcagcctccaacgcagcgaaagtgacgcaccccaccccgtggcactgtgggacttggagttccctccaactgagaagaggcttgggtgcagcgccacgtcccaggggctatgcaaatgtaggggacggccctgctgccgcctcgcaccccgagggcgggggttccggggctccggctccgccttctaccccaagctagaaaaaggaagagttctagcctgaaagggaactcgggcgtcgtcctggcgtcctctccggattgcg

(The sequence listing continues in the following parts.)
